United States Patent Application Publication US 2011/0183924 A1 - sequence listing, part 85

SEQ ID NO: 290173 - DNA, 1113 bp, Homo sapiens
gcaggaaatgacgaaggcagagggcgtccaggtccgctcggtaaccgtttcccgcgcgcccggccccgactccggggtaaagagccccggagcggagcagcgctggccgcgtgccgcctccggagccggcagcccccatggctgggggttatggagtgatgggtgacgatggttctattgattatactgttcacgaagcctggaatgaagccaccaatgtttacttgatagttatccttgttagcttcggtctcttcatgtatgccaaaaggatatttggcttttggaggattgaggagaatcacaatggaggaacttcactttgttgtgttaaatggatgtgttcagctacttttctcacagcctcatactttttagtgaaagaaagaatactttgagccaaggaagcagctctcaaagacaaaatagaaagtaaaatggtcttgtcatttaagtccttttaccacagcttctgatgaccaggatcatgagcatattacaactctatagacattaatacaaacatctcttctgcatggattttgtgtttaggaacaaaaggagaattatgaggatattcagtgtgccacctacagaggaaactttgtcagagcccaacttttatgacacgataagcaagattcgtttaagacaacaactggaaatgtattccatttcaagaaagtacgactatcagcagccacaaaaccaagctgacagtgtgcaactctcattggaatgaaacctcagaaaaagagcaacagaagtaattgtttcaagctcctgattctttctactaaatcatgaacagctttaaaaacatttctgtctgcataaaattattttacttgtaacttttccccaattgttctgtgcattgttttgcctttttaaattacatctccaagtggctcaaaaggccttgacacagggaacctgcacatatccaggatatgtgtaaccagcgatggtgacttgaccttgccaagacctgtgattccttcaggatacaatcagtgagaaataaaaacacatcttgggaagtgggaatcctggagtttatgccatttgcaatattaaaaaataaaaatgcaagttattatttcaataata

SEQ ID NO: 290174 - DNA, 838 bp, Homo sapiens
caccatggagtttactaaccatacacgacgacgtttctgatcgacgctacagtgaggatgaaccttgaaacttcattgtaaataaaagccagccggctgggtgtggtggctcacgcctgtaatcccaggactttgggaggccaaggtgggcggatcactaggtcaggagatcgagaccctcctggctaacacagtgaaaccccgtctctactaaaaatacaaaaaattagctgggtgtggtggtgggcacctgtagtctcagctactcgggaggctgagccaggagaatggcgtgaacccaggaggcagaggttgcagtgagccgagatcgcgccactgcaccccagcctgggcgacagagcaagattcgtttaagacaacaactggaaatgtattccatttcaagaaagtacgactatcagcagccacaaaaccaagctgacagtgtgcaactctcattggaatgaaacctcagaaaaagagcaacagaagtaattgtttcaagctcctgattctttctactaaatcatgaacagctttaaaaacatttctgtctgcataaaattattttacttgtaacttttccccaattgttctgtgcattgttttgcctttttaaattacatctccaagtggctcaaaaggccttgacacagggaacctgcacatatccaggatatgtgtaaccagcgatggtgacttgaccttgccaagacctgtgattccttcaggatacaatcagtgagaaataaaaacacatcttgggaagtgggaatcctggagtttatgccatttgcaatattaaaaaataaaaatgcaagttattatttcaataata

SEQ ID NO: 290175 - DNA, 442 bp, Homo sapiens
cacagggttacattctgatgttggagcggccacaaaaccaagctgacagtgtgcaactctcattggaatgaaacctcagaaaaagagcaacagaagtaattgtttcaagctcctgattctttctactaaatcatgaacagctttaaaaacatttctgtctgcataaaattattttacttgtaacttttccccaattgttctgtgcattgttttgcctttttaaattacatctccaagtggctcaaaaggccttgacacagggaacctgcacatatccaggatatgtgtaaccagcgatggtgacttgaccttgccaagacctgtgattccttcaggatacaatcagtgagaaataaaaacacatcttgggaagtgggaatcctggagtttatgccatttgcaatattaaaaaataaaaatgcaagttattatttcaataata

SEQ ID NO: 290176 - DNA, 548 bp, Homo sapiens
agctttagtgccgcccagcagggttgttgggataattcagtgactctgtggactgcccagcacctgtgaattgctttcctggatgttgggtgaaggcctgtgagcttgtatgtaccctttggcttcagaataccaagcctttagtgtttcagagggatgagagaaagaaatcccattttttgatgcagaggattttgttgtaagggactctaggaactaagtggttccaatgtgaatttgtatcaaagtaacaaagttctaagtgagagacaaaaatgataacattcaaggcacgatgacaagcggtggtcaattttagaatcacctagacgtgacatcaggaacccaaaatcacgacacagattttaaagcttatgatacagtgacctagtccctagaaaaagtagttctcggctgggcacggtggctcacgcctgtaatcccagcactttgggaggctgaggcgggcggattgcctgagctcaggagttttgagaccagcctgggcagtatagtgagacgacccccaccccacccccgtctttaaa

SEQ ID NO: 290177 - DNA, 750 bp, Homo sapiens
agtcccaccccaagcgcgcacagcggagcaggaggcgcccggcactcgcagccccatggctgggggttatggagtgatgggtgacgatggttctattgattatactgttcacgaagcctggaatgaagccaccaatgtttacttgatagttatccttgttagcttcggtctcttcatgtatgccaaaaggaacaaaaggagaattatgaggatattcagtgtgccacctacagaggaaactttgtcagagcccaacttttatgacacgataagcaagattcgtttaagacaacaactggaaatgtattccatttcaagaaagtacgactatcagcagccacaaaaccaagctgacagtgtgcaactctcattggaatgaaacctcagaaaaagagcaacagaagtaattgtttcaagctcctgattctttctactaaatcatgaacagctttaaaaacatttctgtctgcataaaattattttacttgtaacttttccccaattgttctgtgcattgttttgcctttttaaattacatctccaagtggctcaaaaggccttgacacagggaacctgcacatatccaggatatgtgtaaccagcgatggtgacttgaccttgccaagacctgtgattccttcaggatacaatcagtgagaaataaaaacacatcttgggaagtgggaatcctggagtttatgccatttgcaatattaaaaaataaaaatgcaagttattatttcaataata

SEQ ID NO: 290178 - DNA, 1500 bp, Homo sapiens
gcaggaaatgacgaaggcagagggcgtccaggtccgctcggtaaccgtttcccgcgcgcccggccccgactccggggtaaagagccccggagcggagcagcgctggccgcgtgccgcctccggagccggcagcgtgagtggccccgcgtccccgcttctcccggtccccggcggggccgcgtcacccggccccgccccgcgccgcccgccccgccccggacgcgggggtaaggggggtggccgcccgcctgccctcggtcccgtgcggtccccgaaactccgagcacctgcccggtcccggcgcggagcccctcggcgtcgcgtggagctgcgagtcgcccgcttccggaagcgcacacgggccagttgcggcggcccatctgccggggcggcgggggctcggcgggagggttgaggctgaatcacgcgcagcctgcgggcggcggaaacgtccctagagcctcgccgccctgggacccgggctgcttcctgggagaggattacattttctccctgctccacttgactttcttccggaaggagcaggtctcgcaggatcggggccaagactggaagagttcaggtttgggagtcgtgtgtataacagccccgcgcctccacgcccaggcctgtgtggctttggacaagttatataaccaccgccgccaccccagtttcttctcctgtaaaatggagctttagtgccgcccagcagggttgttgggataattcagtgactctgtggactgcccagcacctgtgaattgctttcctggatgttgggtgaaggcctgtgagcttccccatggctgggggttatggagtgatgggtgacgatggttctattgattatactgttcacgaagcctggaatgaagccaccaatgtttacttgatagttatccttgttagcttcggtctcttcatgtatgccaaaaggaacaaaaggagaattatgaggatattcagtgtgccacctacagaggaaactttgtcagagcccaacttttatgacacgataagcaagattcgtttaagacaacaactggaaatgtattccatttcaagaaagtacgactatcagcagccacaaaaccaagctgacagtgtgcaactctcattggaatgaaacctcagaaaaagagcaacagaagtaattgtttcaagctcctgattctttctactaaatcatgaacagctttaaaaacatttctgtctgcataaaattattttacttgtaacttttccccaattgttctgtgcattgttttgcctttttaaattacatctccaagtggctcaaaaggccttgacacagggaacctgcacatatccaggatatgtgtaaccagcgatggtgacttgaccttgccaagacctgtgattccttcaggatacaatcagtgagaaataaaaacacatcttgggaagtgggaatcctggagtttatgccatttgcaatattaaaaaataaaaatgcaagttattatttcaataata

SEQ ID NO: 290179 - DNA, 1781 bp, Homo sapiens
gcaggaaatgacgaaggcagagggcgtccaggtccgctcggtaaccgtttcccgcgcgcccggccccgactccggggtaaagagccccggagcggagcagcgctggccgcgtgccgcctccggagccggcagcgtgagtggccccgcgtccccgcttctcccggtccccggcggggccgcgtcacccggccccgccccgcgccgcccgccccgccccggacgcgggggtaaggggggtggccgcccgcctgccctcggtcccgtgcggtccccgaaactccgagcacctgcccggtcccggcgcggagcccctcggcgtcgcgtggagctgcgagtcgcccgcttccggaagcgcacacgggccagttgcggcggcccatctgccggggcggcgggggctcggcgggagggttgaggctgaatcacgcgcagcctgcgggcggcggaaacgtccctagagcctcgccgccctgggacccgggctgcttcctgggagaggattacattttctccctgctccacttgactttcttccggaaggagcaggtctcgcaggatcggggccaagactggaagagttcaggtttgggagtcgtgtgtataacagccccgcgcctccacgcccaggcctgtgtggctttggacaagttatataaccaccgccgccaccccagtttcttctcctgtaaaatggagctttagtgccgcccagcagggttgttgggataattcagtgactctgtggactgcccagcacctgtgaattgctttcctggatgttgggtgaaggcctgtgagcttccccatggctgggggttatggagtgatgggtgacgatggttctattgattatactgttcacgaagcctggaatgaagccaccaatgtttacttgatagttatccttgttagcttcggtctcttcatgtatgccaaaaggatatttggcttttggaggattgaggagaatcacaatggaggaacttcactttgttgtgttaaatggatgtgttcagctacttttctcacagcctcatactttttagtgaaagaaagaatactttgagccaaggaagcagctctcaaagacaaaatagaaagtaaaatggtcttgtcatttaagtccttttaccacagcttctgatgaccaggatcatgagcatattacaactctatagacattaatacaaacatctcttctgcatggattttgtgtttaggaacaaaaggagaattatgaggatattcagtgtgccacctacagaggaaactttgtcagagcccaacttttatgacacgataagcaagattcgtttaagacaacaactggaaatgtattccatttcaagaaagtacgactatcagcagccacaaaaccaagctgacagtgtgcaactctcattggaatgaaacctcagaaaaagagcaacagaagtaattgtttcaagctcctgattctttctactaaatcatgaacagctttaaaaacatttctgtctgcataaaattattttacttgtaacttttccccaattgttctgtgcattgttttgcctttttaaattacatctccaagtggctcaaaaggccttgacacagggaacctgcacatatccaggatatgtgtaaccagcgatggtgacttgaccttgccaagacctgtgattccttcaggatacaatcagtgagaaataaaaacacatcttgggaagtgggaatcctggagtttatgccatttgcaatattaaaaaataaaaatgcaagttattatttcaataata

SEQ ID NO: 290180 - DNA, 694 bp, Homo sapiens
gcaggaaatgacgaaggcagagggcgtccaggtccgctcggtaaccgtttcccgcgcgcccggccccgactccggggtaaagagccccggagcggagcagcgctggccgcgtgccgcctccggagccggcagcgaacaaaaggagaattatgaggatattcagtgtgccacctacagaggaaactttgtcagagcccaacttttatgacacgataagcaagattcgtttaagacaacaactggaaatgtattccatttcaagaaagtacgactatcagcagccacaaaaccaagctgacagtgtgcaactctcattggaatgaaacctcagaaaaagagcaacagaagtaattgtttcaagctcctgattctttctactaaatcatgaacagctttaaaaacatttctgtctgcataaaattattttacttgtaacttttccccaattgttctgtgcattgttttgcctttttaaattacatctccaagtggctcaaaaggccttgacacagggaacctgcacatatccaggatatgtgtaaccagcgatggtgacttgaccttgccaagacctgtgattccttcaggatacaatcagtgagaaataaaaacacatcttgggaagtgggaatcctggagtttatgccatttgcaatattaaaaaataaaaatgcaagttattatttcaataata

SEQ ID NO: 290181 - DNA, 1281 bp, Homo sapiens
gcaggaaatgacgaaggcagagggcgtccaggtccgctcggtaaccgtttcccgcgcgcccggccccgactccggggtaaagagccccggagcggagcagcgctggccgcgtgccgcctccggagccggcagcgtgagtggccccgcgtccccgcttctcccggtccccggcggggccgcgtcacccggccccgccccgcgccgcccgccccgccccggacgcgggggtaaggggggtggccgcccgcctgccctcggtcccgtgcggtccccgaaactccgagcacctgcccggtcccggcgcggagcccctcggcgtcgcgtggagctgcgagtcgcccgcttccggaagcgcacacgggccagttgcggcggcccatctgccggggcggcgggggctcggcgggagggttgaggctgaatcacgcgcagcctgcgggcggcggaaacgtccctagagcctcgccgccctgggacccgggctgcttcctgggagaggattacattttctccctgctccacttgactttcttccggaaggagcaggtctcgcaggatcggggccaagactggaagagttcaggtttgggagtcgtgtgtataacagccccgcgcctccacgcccaggcctgtgtggctttggacaagttatataaccaccgccgccaccccagtttcttctcctgtaaaatggagctttagtgccgcccagcagggttgttgggataattcagtgactctgtggactgcccagcacctgtgaattgctttcctggatgttgggtgaaggcctgtgagcttccccatggctgggggttatggagtgatgggtgacgatggttctattgattatactgttcacgaagcctggaatgaagccaccaatgtttacttgatagttatccttgttagcttcggtctcttcatgtatgccaaaaggaacaaaaggagaattatgaggatattcagtgtgccacctacagaggaaactttgtcagagcccaacttttatgacacgataagcaagattcgtttaagacaacaactggaaatgtattccatttcaagaaagtacgactatcagcagccacaaaaccaagctgacagtgtgcaactctcattggaatgaaacctcagaaaaagagcaacagaagtaattgtttcaagctcctgattctttctactaaatcatgaacagctttaaaaacatttctgtctgcataaaattattttacttgtatacattaatatgcatgaatgctcatgtatacaggccggctg

SEQ ID NO: 290182 - DNA, 1001 bp, Homo sapiens
  misc_feature (3)..(3): n is a, c, g, or t
  misc_feature (5)..(6): n is a, c, g, or t
ggncnnggctgctacaggggctcccagcggcctcccgcaccgaagggaccctgggcgtctgaggccctgatccgggcgggccttcaggatgttagcagtccctgtccggttgaaggtaggaagccgaaaacccgagtgggggacgaacagacttacctcctgtcccgcaaaagatccactagatcgtcgtctccaaaacctgagagaccgcgaacgggttccagagccgcagcgttctctcagacctggcgttcaggaagattctagagagcacgggcaggtcccggaggtctcagacccgcaggcctgcggggcgggggcggggtggcgcccaggacgactccccgggctcagcttggctgcctgcctccttctgtaagtgctttttttttcttcacctgggaccctctagaggttggaaagagaagagaggctgggagcggatggaaagcatgactgcatctggagcccctggggggagtggggaagagggagtggaaggacagtggctgaggggcttcctgttgcagccttcagctggactcagggttggggtcactggaggaggaggtggcttcctgccccattgttctggactgcagtgtttcttgggaatacttactgtatgtggattttcagtaaccaacttggaaagctgtatttgttcccatgattcagcaaacaatgagtacctactgtgtgtagaagcagcaggacagcctgtcatcactgggaaagaggccagaagagccgtttggccagggtctccaatttaggctttcaacattatctctaaagaaggttatacattatgtcggctccactggctgatgggatcaaagaccctccttgtatatccttaaacctgtactctattaccaggccactgtgcctgtggagcactgtaagttcctaccttttaataaattttataattatcttgtgagcagcaaaattgtcatagttttttgtatcagaaacattaatttgttaaacatttt

SEQ ID NO: 290183 - DNA, 737 bp, Homo sapiens
  misc_feature (3)..(3): n is a, c, g, or t
  misc_feature (5)..(6): n is a, c, g, or t
ggncnnggctgctacaggggctcccagcggcctcccgcaccgaagggaccctgggcgtctgaggccctgatccgggcgggccttcaggatgttagcagtccctgtccggttgaaggtaggaagccgaaaacccgagtgggggacgaacagacttacctcctgtcccgcaaaagatccactagatcgtcgtctccaaaacctgagagaccgcgaacgggttccagagccgcagcgttctctcagacctggcgttcaggaagattctagagagcacgggcaggtcccggaggtctcagacccgcaggcctgcggggcgggggcggggtggcgcccaggacgactccccgggctcagcttggctgcctgcctccttcttaaccaacttggaaagctgtatttgttcccatgattcagcaaacaatgagtacctactgtgtgtagaagcagcaggacagcctgtcatcactgggaaagaggccagaagagccgtttggccagggtctccaatttaggctttcaacattatctctaaagaaggttatacattatgtcggctccactggctgatgggatcaaagaccctccttgtatatccttaaacctgtactctattaccaggccactgtgcctgtggagcactgtaagttcctaccttttaataaattttataattatcttgtgagcagcaaaattgtcatagttttttgtatcagaaacattaatttgttaaacatttt

SEQ ID NO: 290184 - DNA, 698 bp, Homo sapiens
  misc_feature (3)..(3): n is a, c, g, or t
  misc_feature (5)..(6): n is a, c, g, or t
ggncnnggctgctacaggggctcccagcggcctcccgcaccgaagggaccctgggcgtctgaggccctgatccgggcgggccttcaggatgttagcagtccctgtccggttgaaggtaggaagccgaaaacccgagtgggggacgaacagacttacctcctgtcccgcaaaagatccactagatcgtcgtctccaaaacctgagagaccgcgaacgggttccagagccgcagcgttctctcagacctggcgttcaggaagattctagagagcacgggcaggtcccggaggtctcagacccgcaggcctgcggggcgggggcggggtggcgcccaggacgactccccgggctcagcttggctgcctgcctccttctcaaacaatgagtacctactgtgtgtagaagcagcaggacagcctgtcatcactgggaaagaggccagaagagccgtttggccagggtctccaatttaggctttcaacattatctctaaagaaggttatacattatgtcggctccactggctgatgggatcaaagaccctccttgtatatccttaaacctgtactctattaccaggccactgtgcctgtggagcactgtaagttcctaccttttaataaattttataattatcttgtgagcagcaaaattgtcatagttttttgtatcagaaacattaatttgttaaacatttt

SEQ ID NO: 290185 - DNA, 1473 bp, Homo sapiens
ctacaatccccagcaggcaccgcgcgtcaggctctctcttcccccccatcttagtggcctgagcggcttgaccagagctgctgcaactgcagcaagaggtagggctcaggcgttgggaattgcaccgacaggcagtcgcacagaaaggcacacagatgtagtggtgtgcatagcccttgacagcgaataggaggacagtacaggacatgagtcctggtgagggacccgaggagcaggacagagaagacggcccctgaatcccatttggccccttgctggctggaggtgtgaaaaccagcggtggaggcagccttcggggcctgcatttgagaataagggtgtcactagttccaggcgtctgctgaaagatttggaacagaagatgatggccactccgaaccagaccgcctgtaatgcagagtcaccagtggccctggaggaggccaagacctctggtgccccggggagcccccaaacaccccctgagcgtcatgactctggtggttccctgcccctgacaccgcggatggagagccactcagaggatgaagatcttgctggggctgtcggtggcctgggctggaacagtaggagtccccggacccagagcccagggggctgctcagcggaggctgtgctggcccggaagaaacaccgtcggcggccatcgaagcgcaaaaggcactggcgaccctacctggagctgagctgggctgagaaacaacagcgggatgagaggcagagccagagggcctcccgggtccgcgaagagatgttcgccaaaggccagcccgtggccccctacaacaccacccagttcctgatgaatgacagggacccggaggagcccaacttggatgtgccccatgggatctcccacccaggttccagtggggagagtgaggccggggacagtgatgggcggggccgagcgcacggtgagttccagcggaaggacttctctgagacttacgaacgcttccacaccgagagcctgcagggccgcagcaagcaggagctggtgcgagactacctggagctggagaagcggctgtcgcaggcggaggaggagactaggaggctgcagcagctgcaggcgtgcaccggccagcagtcctgccgccaggtggaggagctggctgccgaggtccagaggctccggaccgaaaaccagcggcttcgtcaggagaaccagatgtggaaccgagagggctgccgctgtgatgaggagccgggtacctaggggtgcctcccagcctggtggacccaaggagaaggtcccatttcgtgcacactcaggccagctgggtctcaaggaggcaggtggcagatgaaaaccaccgtcaacaccctgtgcgccctgagaacagctaaatcggttcagactcccacctcaccgtttccatagttggctcttttgtgtcatcttaccctttacagagaaattaaatggccttggtgggaccaaaaaga

SEQ ID NO: 290186 - DNA, 2046 bp, Homo sapiens
taagaagctgctacagctataatgtaaggttaagagtttattctttcaaagcaggtctcctcatctcttaaacgctatacatatgaagtagataaaaactggtttcttttttggtagcatttaggatctacaaaagtgatccttcaattacttggaatttcaaaaaattgaggttacctagtaacaatgcaccagtagaacacaaaatactctgactttgtttagtctgtgggaaaagaaaaatctttaaactggaaagattttgtagtcttacaaagattacattggaattggaattactgtagttcgtttttccctctaggagggcagccatttctctaaaagttgtgtaaaagttaagactaggatttcaaaatgcaagcagatgttgatgaagcatacgaaatgggcaactccgtttctatttcggagccgcagcgactccgactttgtgccccaaccctgtaaagggcaaaacctcatcccttcggtgtaaactttcaagagaagtggggcagcacactttaggcgtttcaccaagaggctggcgacatgctaggtcaggttgtccggagaatcggggctgaatgggagagatcttgagggcaagagcctcagagaccttcaggcaccgagctcgtgaaggtttccaagtgcccctctctagctgctcccagggggaattagtggttgctacagtagtttaagagggtcgtggtttttcgcaacccgggcggcgagatggcgctttggtgtaagcgaggaggacagtacaggacatgagtcctggtgagggacccgaggagcaggacagagaagacggcccctgaatcccatttggccccttgctggctggaggtgtgaaaaccagcggtggaggcagccttcggggcctgcatttgagaataagggtgtcactagttccaggcgtctgctgaaagatttggaacagaagatgatggccactccgaaccagaccgcctgtaatgcagagtcaccagtggccctggaggaggccaagacctctggtgccccggggagcccccaaacaccccctgagcgtcatgactctggtggttccctgcccctgacaccgcggatggagagccactcagaggatgaagatcttgctggggctgtcggtggcctgggctggaacagtaggagtccccggacccagagcccagggggctgctcagcggaggctgtgctggcccggaagaaacaccgtcggcggccatcgaagcgcaaaaggcactggcgaccctacctggagctgagctgggctgagaaacaacagcgggatgagaggcagagccagagggcctcccgggtccgcgaagagatgttcgccaaaggccagcccgtggccccctacaacaccacccagttcctgatgaatgacagggacccggaggagcccaacttggatgtgccccatgggatctcccacccaggttccagtggggagagtgaggccggggacagtgatgggcggggccgagcgcacggtgagttccagcggaaggacttctctgagacttacgaacgcttccacaccgagagcctgcagggccgcagcaagcaggagctggtgcgagactacctggagctggagaagcggctgtcgcaggcggaggaggagactaggaggctgcagcagctgcaggcgtgcaccggccagcagtcctgccgccaggtggaggagctggctgccgaggtccagaggctccggaccgaaaaccagcggcttcgtcaggagaaccagatgtggaaccgagagggctgccgctgtgatgaggagccgggtacctaggggtgcctcccagcctggtggacccaaggagaaggtcccatttcgtgcacactcaggccagctgggtctcaaggaggcaggtggcagatgaaaaccaccgtcaacaccctgtgcgccctgagaacagctaaatcggttcagactcccacctcaccgtttccatagttggctcttttgtgtcatcttaccctttacagagaaattaaatggccttggtgggaccaaaaaga

SEQ ID NO: 290187 - DNA, 2351 bp, Homo sapiens
taagaagctgctacagctataatgtaaggttaagagtttattctttcaaagcaggtctcctcatctcttaaacgctatacatatgaagtagataaaaactggtttcttttttggtagcatttaggatctacaaaagtgatccttcaattacttggaatttcaaaaaattgaggttacctagtaacaatgcaccagtagaacacaaaatactctgactttgtttagtctgtgggaaaagaaaaatctttaaactggaaagattttgtagtcttacaaagattacattggaattggaattactgtagttcgtttttccctctaggagggcagccatttctctaaaagttgtgtaaaagttaagactaggatttcaaaatgcaagcagatgttgatgaagcatacgaaatgggcaactccgtttctatttcggagccgcagcgactccgactttgtgccccaaccctgtaaagggcaaaacctcatcccttcggtgtaaactttcaagagaagtggggcagcacactttaggcgtttcaccaagaggctggcgacatgctaggtcaggttgtccggagaatcggggctgaatgggagagatcttgagggcaagagcctcagagaccttcaggcaccgagctcgtgaaggtttccaagtgcccctctctagctgctcccagggggaattagtggttgctacagtagtttaagagggtcgtggtttttcgcaacccgggcggcgagatggcgctttggtgtaagcgaggtaaggtgggtgcactgggatctccgctctcggagcctccagctgactgccacgccgacttgtggccagacctgcgacctccgccctcccccgcggcgccagcctctggaatctggcgtcgcccccacctctccagtcgaagtgggagtccctctgtgcggggcctcgccgccatacccaggccgaatgggggtggggagggaagctggcagagctcggcctcaggatccgcgcccctgtggaaagaccgcagagggaagccgtttcaccagcctctccccttctggggtctcgggaaacacgcggaggacagtacaggacatgagtcctggtgagggacccgaggagcaggacagagaagacggcccctgaatcccatttggccccttgctggctggaggtgtgaaaaccagcggtggaggcagccttcggggcctgcatttgagaataagggtgtcactagttccaggcgtctgctgaaagatttggaacagaagatgatggccactccgaaccagaccgcctgtaatgcagagtcaccagtggccctggaggaggccaagacctctggtgccccggggagcccccaaacaccccctgagcgtcatgactctggtggttccctgcccctgacaccgcggatggagagccactcagaggatgaagatcttgctggggctgtcggtggcctgggctggaacagtaggagtccccggacccagagcccagggggctgctcagcggaggctgtgctggcccggaagaaacaccgtcggcggccatcgaagcgcaaaaggcactggcgaccctacctggagctgagctgggctgagaaacaacagcgggatgagaggcagagccagagggcctcccgggtccgcgaagagatgttcgccaaaggccagcccgtggccccctacaacaccacccagttcctgatgaatgacagggacccggaggagcccaacttggatgtgccccatgggatctcccacccaggttccagtggggagagtgaggccggggacagtgatgggcggggccgagcgcacggtgagttccagcggaaggacttctctgagacttacgaacgcttccacaccgagagcctgcagggccgcagcaagcaggagctggtgcgagactacctggagctggagaagcggctgtcgcaggcggaggaggagactaggaggctgcagcagctgcaggcgtgcaccggccagcagtcctgccgccaggtggaggagctggctgccgaggtccagaggctccggaccgaaaaccagcggcttcgtcaggagaaccagatgtggaaccgagagggctgccgctgtgatgaggagccgggtacctaggggtgcctcccagcctggtggacccaaggagaaggtcccatttcgtgcacactcaggccagctgggtctcaaggaggcaggtggcagatgaaaaccaccgtcaacaccctgtgcgccctgagaacagctaaatcggttcagactcccacctcaccgtttccatagttggctcttttgtgtcatcttaccctttacagagaaattaaatggccttggtgggaccaaaaaga

SEQ ID NO: 290188 - DNA, 1224 bp, Homo sapiens
acaacactacttacgggctacggttacgaggaccctcgggtgttttaatcggcgcggcttgaccagagctgctgcaactgcagcaagaggtgtcactagttccaggcgtctgctgaaagatttggaacagaagatgatggccactccgaaccagaccgcctgtaatgcagagtcaccagtggccctggaggaggccaagacctctggtgccccggggagcccccaaacaccccctgagcgtcatgactctggtggttccctgcccctgacaccgcggatggagagccactcagaggatgaagatcttgctggggctgtcggtggcctgggctggaacagtaggagtccccggacccagagcccagggggctgctcagcggaggctgtgctggcccggaagaaacaccgtcggcggccatcgaagcgcaaaaggcactggcgaccctacctggagctgagctgggctgagaaacaacagcgggatgagaggcagagccagagggcctcccgggtccgcgaagagatgttcgccaaaggccagcccgtggccccctacaacaccacccagttcctgatgaatgacagggacccggaggagcccaacttggatgtgccccatgggatctcccacccaggttccagtggggagagtgaggccggggacagtgatgggcggggccgagcgcacggtgagttccagcggaaggacttctctgagacttacgaacgcttccacaccgagagcctgcagggccgcagcaagcaggagctggtgcgagactacctggagctggagaagcggctgtcgcaggcggaggaggagactaggaggctgcagcagctgcaggcgtgcaccggccagcagtcctgccgccaggtggaggagctggctgccgaggtccagaggctccggaccgaaaaccagcggcttcgtcaggagaaccagatgtggaaccgagagggctgccgctgtgatgaggagccgggtacctaggggtgcctcccagcctggtggacccaaggagaaggtcccatttcgtgcacactcaggccagctgggtctcaaggaggcaggtggcagatgaaaaccaccgtcaacaccctgtgcgccctgagaacagctaaatcggttcagactcccacctcaccgtttccatagttggctcttttgtgtcatcttaccctttacagagaaattaaatggccttggtgggaccaaaaaga

SEQ ID NO: 290189 - DNA, 1316 bp, Homo sapiens
acaacactacttacgggctacggttacgaggaccctcgggtgttttaatcggcgcggcttgaccagagctgctgcaactgcagcaagaggtagggctcaggcgttgggaattgcaccgacaggcagtcgcacagaaaggcacacagatgtagtggtgtgcatagcccttgacagcgaataggtgtcactagttccaggcgtctgctgaaagatttggaacagaagatgatggccactccgaaccagaccgcctgtaatgcagagtcaccagtggccctggaggaggccaagacctctggtgccccggggagcccccaaacaccccctgagcgtcatgactctggtggttccctgcccctgacaccgcggatggagagccactcagaggatgaagatcttgctggggctgtcggtggcctgggctggaacagtaggagtccccggacccagagcccagggggctgctcagcggaggctgtgctggcccggaagaaacaccgtcggcggccatcgaagcgcaaaaggcactggcgaccctacctggagctgagctgggctgagaaacaacagcgggatgagaggcagagccagagggcctcccgggtccgcgaagagatgttcgccaaaggccagcccgtggccccctacaacaccacccagttcctgatgaatgacagggacccggaggagcccaacttggatgtgccccatgggatctcccacccaggttccagtggggagagtgaggccggggacagtgatgggcggggccgagcgcacggtgagttccagcggaaggacttctctgagacttacgaacgcttccacaccgagagcctgcagggccgcagcaagcaggagctggtgcgagactacctggagctggagaagcggctgtcgcaggcggaggaggagactaggaggctgcagcagctgcaggcgtgcaccggccagcagtcctgccgccaggtggaggagctggctgccgaggtccagaggctccggaccgaaaaccagcggcttcgtcaggagaaccagatgtggaaccgagagggctgccgctgtgatgaggagccgggtacctaggggtgcctcccagcctggtggacccaaggagaaggtcccatttcgtgcacactcaggccagctgggtctcaaggaggcaggtggcagatgaaaaccaccgtcaacaccctgtgcgccctgagaacagctaaatcggttcagactcccacctcaccgtttccatagttggctcttttgtgtcatcttaccctttacagagaaattaaatggccttggtgggaccaaaaaga

SEQ ID NO: 290190 - DNA, 1464 bp, Homo sapiens
acaacactacttacgggctacggttacgaggaccctcgggtgttttaatcggcgcggcttgaccagagctgctgcaactgcagcaagaggtagggctcaggcgttgggaattgcaccgacaggcagtcgcacagaaaggcacacagatgtagtggtgtgcatagcccttgacagcgaataggaggacagtacaggacatgagtcctggtgagggacccgaggagcaggacagagaagacggcccctgaatcccatttggccccttgctggctggaggtgtgaaaaccagcggtggaggcagccttcggggcctgcatttgagaataagggtgtcactagttccaggcgtctgctgaaagatttggaacagaagatgatggccactccgaaccagaccgcctgtaatgcagagtcaccagtggccctggaggaggccaagacctctggtgccccggggagcccccaaacaccccctgagcgtcatgactctggtggttccctgcccctgacaccgcggatggagagccactcagaggatgaagatcttgctggggctgtcggtggcctgggctggaacagtaggagtccccggacccagagcccagggggctgctcagcggaggctgtgctggcccggaagaaacaccgtcggcggccatcgaagcgcaaaaggcactggcgaccctacctggagctgagctgggctgagaaacaacagcgggatgagaggcagagccagagggcctcccgggtccgcgaagagatgttcgccaaaggccagcccgtggccccctacaacaccacccagttcctgatgaatgacagggacccggaggagcccaacttggatgtgccccatgggatctcccacccaggttccagtggggagagtgaggccggggacagtgatgggcggggccgagcgcacggtgagttccagcggaaggacttctctgagacttacgaacgcttccacaccgagagcctgcagggccgcagcaagcaggagctggtgcgagactacctggagctggagaagcggctgtcgcaggcggaggaggagactaggaggctgcagcagctgcaggcgtgcaccggccagcagtcctgccgccaggtggaggagctggctgccgaggtccagaggctccggaccgaaaaccagcggcttcgtcaggagaaccagatgtggaaccgagagggctgccgctgtgatgaggagccgggtacctaggggtgcctcccagcctggtggacccaaggagaaggtcccatttcgtgcacactcaggccagctgggtctcaaggaggcaggtggcagatgaaaaccaccgtcaacaccctgtgcgccctgagaacagctaaatcggttcagactcccacctcaccgtttccatagttggctcttttgtgtcatcttaccctttacagagaaattaaatggccttggtgggaccaaaaaga

SEQ ID NO: 290191 - DNA, 2355 bp, Homo sapiens
taagaagctgctacagctataatgtaaggttaagagtttattctttcaaagcaggtctcctcatctcttaaacgctatacatatgaagtagataaaaactggtttcttttttggtagcatttaggatctacaaaagtgatccttcaattacttggaatttcaaaaaattgaggttacctagtaacaatgcaccagtagaacacaaaatactctgactttgtttagtctgtgggaaaagaaaaatctttaaactggaaagattttgtagtcttacaaagattacattggaattggaattactgtagttcgtttttccctctaggagggcagccatttctctaaaagttgtgtaaaagttaagactaggatttcaaaatgcaagcagatgttgatgaagcatacgaaatgggcaactccgtttctatttcggagccgcagcgactccgactttgtgccccaaccctgtaaagggcaaaacctcatcccttcggtgtaaactttcaagagaagtggggcagcacactttaggcgtttcaccaagaggctggcgacatgctaggtcaggttgtccggagaatcggggctgaatgggagagatcttgagggcaagagcctcagagaccttcaggcaccgagctcgtgaaggtttccaagtgcccctctctagctgctcccagggggaattagtggttgctacagtagtttaagagggtcgtggtttttcgcaacccgggcggcgagatggcgctttggtgtaagcgaggtaaggtgggtgcactgggatctccgctctcggagcctccagctgactgccacgccgacttgtggccagacctgcgacctccgccctcccccgcggcgccagcctctggaatctggcgtcgcccccacctctccagtcgaagtgggagtccctctgtgcggggcctcgccgccatacccaggccgaatgggggtggggagggaagctggcagagctcggcctcaggatccgcgcccctgtggaaagaccgcagagggaagccgtttcaccagcctctccccttctggggtctcgggaaacacgcggtaattaccgaagaaccccgcactctgtgagaggcgaggctgcggggctgccgggacggtttgaggaccgggctcggccgaggagactccaaccttcaccctccctggcccccggtcccacttcccgccgtctcccggcgccgccacttcaggtgtcactagttccaggcgtctgctgaaagatttggaacagaagatgatggccactccgaaccagaccgcctgtaatgcagagtcaccagtggccctggaggaggccaagacctctggtgccccggggagcccccaaacaccccctgagcgtcatgactctggtggttccctgcccctgacaccgcggatggagagccactcagaggatgaagatcttgctggggctgtcggtggcctgggctggaacagtaggagtccccggacccagagcccagggggctgctcagcggaggctgtgctggcccggaagaaacaccgtcggcggccatcgaagcgcaaaaggcactggcgaccctacctggagctgagctgggctgagaaacaacagcgggatgagaggcagagccagagggcctcccgggtccgcgaagagatgttcgccaaaggccagcccgtggccccctacaacaccacccagttcctgatgaatgacagggacccggaggagcccaacttggatgtgccccatgggatctcccacccaggttccagtggggagagtgaggccggggacagtgatgggcggggccgagcgcacggtgagttccagcggaaggacttctctgagacttacgaacgcttccacaccgagagcctgcagggccgcagcaagcaggagctggtgcgagactacctggagctggagaagcggctgtcgcaggcggaggaggagactaggaggctgcagcagctgcaggcgtgcaccggccagcagtcctgccgccaggtggaggagctggctgccgaggtccagaggctccggaccgaaaaccagcggcttcgtcaggagaaccagatgtggaaccgagagggctgccgctgtgatgaggagccgggtacctaggggtgcctcccagcctggtggacccaaggagaaggtcccatttcgtgcacactcaggccagctgggtctcaaggaggcaggtggcagatgaaaaccaccgtcaacaccctgtgcgccctgagaacagctaaatcggttcagactcccacctcaccgtttccatagttggctcttttgtgtcatcttaccctttacagagaaattaaatggccttggtgggaccaaaaaga

SEQ ID NO: 290192 - DNA, 1158 bp, Homo sapiens
gctggtactggccggaattttgggtgtcactagttccaggcgtctgctgaaagatttggaacagaagatgatggccactccgaaccagaccgcctgtaatgcagagtcaccagtggccctggaggaggccaagacctctggtgccccggggagcccccaaacaccccctgagcgtcatgactctggtggttccctgcccctgacaccgcggatggagagccactcagaggatgaagatcttgctggggctgtcggtggcctgggctggaacagtaggagtccccggacccagagcccagggggctgctcagcggaggctgtgctggcccggaagaaacaccgtcggcggccatcgaagcgcaaaaggcactggcgaccctacctggagctgagctgggctgagaaacaacagcgggatgagaggcagagccagagggcctcccgggtccgcgaagagatgttcgccaaaggccagcccgtggccccctacaacaccacccagttcctgatgaatgacagggacccggaggagcccaacttggatgtgccccatgggatctcccacccaggttccagtggggagagtgaggccggggacagtgatgggcggggccgagcgcacggtgagttccagcggaaggacttctctgagacttacgaacgcttccacaccgagagcctgcagggccgcagcaagcaggagctggtgcgagactacctggagctggagaagcggctgtcgcaggcggaggaggagactaggaggctgcagcagctgcaggcgtgcaccggccagcagtcctgccgccaggtggaggagctggctgccgaggtccagaggctccggaccgaaaaccagcggcttcgtcaggagaaccagatgtggaaccgagagggctgccgctgtgatgaggagccgggtacctaggggtgcctcccagcctggtggacccaaggagaaggtcccatttcgtgcacactcaggccagctgggtctcaaggaggcaggtggcagatgaaaaccaccgtcaacaccctgtgcgccctgagaacagctaaatcggttcagactcccacctcaccgtttccatagttggctcttttgtgtcatcttaccctttacagagaaattaaatggccttggtgggaccaaaaaga

SEQ ID NO: 290193 - DNA, 2384 bp, Homo sapiens
gcacaatctctctctcacacacacacacacacacacacacacacacactcactcactctattttgtgctgtcgtaaaacccacgtgtccagccgggaagctgccagagcgtggaaccaaggagccaggacgcggcagcggccaagcgcagcagcccacggcggttgagtcgggcgcccaggtccgtccgcactctcgcgccctccgcgggcctcccaattttctcgcttgcaggtcgggaggtttccgggcggcacaatctctaggactctcctcccgcgctgctcaggggcatgtagcgcacgcagggcgcacactctcgcgcacccgcacgctcaccgagacacccgcgctggctggtctctcggccctgccggtgtcgcagctgccggtgttcgcgcctctagccgccgctgccgtcgccgccgagccgctgccccccaaggaactgtgcctcggcgccacctccggccccgggcccgtcaagtgcggtggtggtggcggcggcggcggggagggtcgcggcgccccgcgcttccgctgcagcgcagaggagctggactattacctgtatggccagcagcgcatggagatcatcccgctcaaccagcacaccagcgaccccaacaaccgttgcgacatgtgcgcggacaaccgcaacggcgagtgccctatgcatgggccactgcactcgctgcgccggcttgtgggcaccagcagcgctgcggccgccgcgcccccgccggagctgccggagtggctgcgggacctgcctcgcgaggtgtgcctctgcaccagtactgtgcccggcctggcctacggcatctgcgcggcgcagaggatccagcaaggcacctggattggacctttccaaggcgtgcttctgcccccagagaaggtgcaggcaggcgccgtgaggaacacgcagcatctctgggagtaaatgtcccttcaacggtaatggaagccatgtgcagacaagacgccctgcagcccttcaacaaaagcagcaaactcgcccctaccacccagcagcgctccgttgttttcccccagactccgtgcagcaggaacttctctcttctggataagtctgggcccattgaatcaggatttaatcaaatcaacgtgaaaaaccagcgagtcctggcaagcccaacttccacaagccagctccactcggagttcagtgactggcatctttggaaatgtgggcagtgctttaagactttcacccagcggatcctcttacagatgcacgtgtgcacgcagaaccccgacagaccctaccaatgcggccactgctcccagtccttttcccagccttcagaactgaggaaccacgtggtcactcactctagtgaccggcctttcaagtgcggctactgtggtcgtgcctttgccggggccaccaccctcaacaaccacatccgaacccacactggagaaaagcccttcaagtgcgagaggtgtgagaggagcttcacgcaggccacccagctgagccgacaccagcggatgcccaatgagtgcaagccaataactgagagcccagaatcaatcgaagtggattaacggattgactggttggaattaaactgcaaggaaagtcatgattaaatgtcacggacacttaagcaaaaccaaagatttcctctgagcaactttcaatcagtcccagaaaaccaaaagcagtaataaaataagtaagatgttaagagatattgatcctggcatggaagtcagaccaggaaagagattatttatttatgacttagggatgagacttatttcagtggacaactaacctgggatggtaaacattcccagtcccaccatgtattttgctttgtttctaaaaagctttttaaaaactgttatttaataccaaagggaggaatcgtatgggttcttctgcccaccgttgtgactaagaatgcacagggacttggttctcgttgcacctttttttagtaacatgtttcatggggacccactgtacagcccttcattctgctgtgtcagtttggcctggcctgacactggctgccccagcggggaccacggaagcagagtgagagccttcgctgagtcaatgctaccttcagccccagacgcatcccatttccatgtcttccatgctcactgctcatgcactttttacacggtttcttccaaacagcccggtcttgatgcaggagagtctggaaaaggaagaaaatggtttcagtttcaaaattcaaaggaaaaagttgaggacttattttgtcctgtcaagattgcaagaacatgtaaaatgtacggagcttcataatacgttatattgttccgaagcagctcgttgagaaacatttgttttcaataacattttagcttaaaaaaaaa

SEQ ID NO: 290194 - DNA, 697 bp, Homo sapiens
gcacaatctctctctcacacacacacacacacacacacacacacacactcactcactctattttgtgctgtcgtaaaacccacgtgtccagccgggaagctgccagagcgtggaaccaaggagccaggacgcggcagcggccaagcgcagcagcccacggcggttgagtcgggcgcccaggtccgtccgcactctcgcgccctccgcgggcctcccaattttctcgcttgcaggtcgggaggtttccgggcggcacaatctctaggactctcctcccgcgctgctcaggggcatgtagcgcacgcagggcgcacactctcgcgcacccgcacgctcaccgagacacccgcacgcacccaccggcagcaccgagttttcagttcgaggcgccggacatgctgaagcccggagaccccggcggttcggccttcctcaaagtggacccagcctacctgcagcactggcagcaactcttccctcacggaggcgcaggcccgctcaagggcagcggcgccgcgggtctcctgagcgcgccgcagcctcttcagccgccgccgccgcccccgcccccggagcgcgctgagcctccgccggacagcctgcgcccgcggcccgcctctctctcctccgcctcgtccacgccggcttcctcttccacctccgcctcctccgcctcctcctgcgctgctgcggccgc

SEQ ID NO: 290195 - DNA, 2512 bp, Homo sapiens
gcacaatctctctctcacacacacacacacacacacacacacacacactcactcactctattttgtgctgtcgtaaaacccacgtgtccagccgggaagctgccagagcgtggaaccaaggagccaggacgcggcagcggccaagcgcagcagcccacggcggttgagtcgggcgcccaggtccgtccgcactctcgcgccctccgcgggcctcccaattttctcgcttgcaggtcgggaggtttccgggcggcacaatctctaggactctcctcccgcgctgctcaggggcatgtagcgcacgcagggcgcacactctcgcgcacccgcacgctcaccgagacacccgcgctggctggtctctcggccctgccggtgtcgcagctgccggtgttcgcgcctctagccgccgctgccgtcgccgccgagccgctgccccccaaggaactgtgcctcggcgccacctccggccccgggcccgtcaagtgcggtggtggtggcggcggcggcggggagggtcgcggcgccccgcgcttccgctgcagcgcagaggagctggactattacctgtatggccagcagcgcatggagatcatcccgctcaaccagcacaccagcgaccccaacaaccgttgcgacatgtgcgcggacaaccgcaacggcgagtgccctatgcatgggccactgcactcgctgcgccggcttgtgggcaccagcagcgctgcggccgccgcgcccccgccggagctgccggagtggctgcgggacctgcctcgcgaggtgtgcctctgcaccagtactgtgcccggcctggcctacggcatctgcgcggcgcagaggatccagcaaggcacctggattggacctttccaaggcgtgcttctgcccccagagaaggtgcaggcaggcgccgtgaggaacacgcagcatctctgggagatatatgaccaggatgggacactacagcactttattgatggtggggaacctagtaagtcgagctggatgaggtatatccgatgtgcaaggcactgcggagaacagaatctaacagtagttcagtacagtaaatgtcccttcaacggtaatggaagccatgtgcagacaagacgccctgcagcccttcaacaaaagcagcaaactcgcccctaccacccagcagcgctccgttgttttcccccagactccgtgcagcaggaacttctctcttctggataagtctgggcccattgaatcaggatttaatcaaatcaacgtgaaaaaccagcgagtcctggcaagcccaacttccacaagccagctccactcggagttcagtgactggcatctttggaaatgtgggcagtgctttaagactttcacccagcggatcctcttacagatgcacgtgtgcacgcagaaccccgacagaccctaccaatgcggccactgctcccagtccttttcccagccttcagaactgaggaaccacgtggtcactcactctagtgaccggcctttcaagtgcggctactgtggtcgtgcctttgccggggccaccaccctcaacaaccacatccgaacccacactggagaaaagcccttcaagtgcgagaggtgtgagaggagcttcacgcaggccacccagctgagccgacaccagcggatgcccaatgagtgcaagccaataactgagagcccagaatcaatcgaagtggattaacggattgactggttggaattaaactgcaaggaaagtcatgattaaatgtcacggacacttaagcaaaaccaaagatttcctctgagcaactttcaatcagtcccagaaaaccaaaagcagtaataaaataagtaagatgttaagagatattgatcctggcatggaagtcagaccaggaaagagattatttatttatgacttagggatgagacttatttcagtggacaactaacctgggatggtaaacattcccagtcccaccatgtattttgctttgtttctaaaaagctttttaaaaactgttatttaataccaaagggaggaatcgtatgggttcttctgcccaccgttgtgactaagaatgcacagggacttggttctcgttgcacctttttttagtaacatgtttcatggggacccactgtacagcccttcattctgctgtgtcagtttggcctggcctgacactggctgccccagcggggaccacggaagcagagtgagagccttcgctgagtcaatgctaccttcagccccagacgcatcccatttccatgtcttccatgctcactgctcatgcactttttacacggtttcttccaaacagcccggtcttgatgcaggagagtctggaaaaggaagaaaatggtttcagtttcaaaattcaaaggaaaaagttgaggacttattttgtcctgtcaagattgcaagaacatgtaaaatgtacggagcttcataatacgttatattgttccgaagcagctcgttgagaaacatttgttttcaataacattttagcttaaaaaaaaa

SEQ ID NO: 290196 - DNA, 1185 bp, Homo sapiens
gagactcctgtcttatcatggaccctgatgggcttatttgattcagatgtccaagtgtggaattgccagcctttccagatgagaccctaccaatgcggccactgctcccagtccttttcccagccttcagaactgaggaaccacgtggtcactcactctagtgaccggcctttcaagtgcggctactgtggtcgtgcctttgccggggccaccaccctcaacaaccacatccgaacccacactggagaaaagcccttcaagtgcgagaggtgtgagaggagcttcacgcaggccacccagctgagccgacaccagcggatgcccaatgagtgcaagccaataactgagagcccagaatcaatcgaagtggattaacggattgactggttggaattaaactgcaaggaaagtcatgattaaatgtcacggacacttaagcaaaaccaaagatttcctctgagcaactttcaatcagtcccagaaaaccaaaagcagtaataaaataagtaagatgttaagagatattgatcctggcatggaagtcagaccaggaaagagattatttatttatgacttagggatgagacttatttcagtggacaactaacctgggatggtaaacattcccagtcccaccatgtattttgctttgtttctaaaaagctttttaaaaactgttatttaataccaaagggaggaatcgtatgggttcttctgcccaccgttgtgactaagaatgcacagggacttggttctcgttgcacctttttttagtaacatgtttcatggggacccactgtacagcccttcattctgctgtgtcagtttggcctggcctgacactggctgccccagcggggaccacggaagcagagtgagagccttcgctgagtcaatgctaccttcagccccagacgcatcccatttccatgtcttccatgctcactgctcatgcactttttacacggtttcttccaaacagcccggtcttgatgcaggagagtctggaaaaggaagaaaatggtttcagtttcaaaattcaaaggaaaaagttgaggacttattttgtcctgtcaagattgcaagaacatgtaaaatgtacggagcttcataatacgttatattgttccgaagcagctcgttgagaaacatttgttttcaataacattttagcttaaaaaaaaa

SEQ ID NO: 290197 - DNA, 1654 bp, Homo sapiens
gcacaatctctctctcacacacacacacacacacacacacacacacactcactcactctattttgtgctgtcgtaaaacccacgtgtccagccgggaagctgccagagcgtggaaccaaggagccaggacgcggcagcggccaagcgcagcagcccacggcggttgagtcgggcgcccaggtccgtccgcactctcgcgccctccgcgggcctcccaattttctcgcttgcaggtcgggaggtttccgggcggcacaatctctaggactctcctcccgcgctgctcaggggcatgtagcgcacgcagggcgcacactctcgcgcacccgcacgctcaccgagacacccgcgctggctggtctctcggccctgccggtgtcgcagctgccggtgttcgcgcctctagccgccgctgccgtcgccgccgagccgctgccccccaaggaactgtgcctcggcgccacctccggccccgggcccgtcaagtgcggtggtggtggcggcggcggcggggagggtcgcggcgccccgcgcttccgctgcagcgcagaggagctggactattacctgtatggccagcagcgcatggagatcatcccgctcaaccagcacaccagcgaccccaacaaccgttgcgacatgtgcgcggacaaccgcaacggcgagtgccctatgcatgggccactgcactcgctgcgccggcttgtgggcaccagcagcgctgcggccgccgcgcccccgccggagctgccggagtggctgcgggacctgcctcgcgaggtgtgcctctgcaccagtactgtgcccggcctggcctacggcatctgcgcggcgcagaggatccagcaaggcacctggattggacctttccaaggcgtgcttctgcccccagagaaggtgcaggcaggcgccgtgaggaacacgcagcatctctgggagatatatgaccaggatgggacactacagcactttattgatggtggggaacctagtaagtcgagctggatgaggtatatccgatgtgcaaggcactgcggagaacagaatctaacagtagttcagtacagtaaatgtcccttcaacggtaatggaagccatgtgcagacaagacgccctgcagcccttcaacaaaagcagcaaactcgcccctaccacccagcagcgctccgttgttttcccccagactccgtgcagcaggaacttctctcttctggataagtctgggcccattgaatcaggatttaatcaaatcaacgtgaaaaaccagcgagtcctggcaagcccaacttccacaagccagctccactcggagttcagtgactggcatctttggaaatgtgggcagtgctttaagactttcacccagcggatcctcttacagatgcacgtgtgcacgcagaaccccgacaggtaaccctgactctcactgctgacagtgtgtttgcttagtgagacccactgcttgccttcccgccaacttctgagcacctccacaggggaagccctgtgatttgtggtgtctgcattctggaaggtcagagagaaatgcaagaccactgcttgactttcttgcatataagggctgcacagacaggttggtggctgcagagaggaatctgcacttgccttccgaacagttctgcccaagcctaaa

SEQ ID NO: 290198 - DNA, 314 bp, Homo sapiens
tttgggatccccttacaatgcattgcccaggatgaaaactgtaagaatttattttagctctgaattcacatttcaatatacctatttcaaagctaacttttaagagctttttttgaaactcatgaaacgtggttcactgtaataagtaacacaaacatatacaagtctattccatcgttttcttttccctgcatgtcatctgctttctctagggcatcttaacctgtatgggccagtccttcacttatcaacaacttcaaagccttgccagaattttaaataatagttgaagcaagttaagtcagctggtattc

SEQ ID NO: 290199 - DNA, 2637 bp, Homo sapiens
gcacaatctctctctcacacacacacacacacacacacacacacacactcactcactctattttgtgctgtcgtaaaacccacgtgtccagccgggaagctgccagagcgtggaaccaaggagccaggacgcggcagcggccaagcgcagcagcccacggcggttgagtcgggcgcccaggtccgtccgcactctcgcgccctccgcgggcctcccaattttctcgcttgcaggtcgggaggtttccgggcggcacaatctctaggactctcctcccgcgctgctcaggggcatgtagcgcacgcagggcgcacactctcgcgcacccgcacgctcaccgagacacccgcgctggctggtctctcggccctgccggtgtcgcagctgccggtgttcgcgcctctagccgccgctgccgtcgccgccgagccgctgccccccaaggaactgtgcctcggcgccacctccggccccgggcccgtcaagtgcggtggtggtggcggcggcggcggggagggtcgcggcgccccgcgcttccgctgcagcgcagaggagctggactattacctgtatggccagcagcgcatggagatcatcccgctcaaccagcacaccagcgaccccaacaaccgttgcgacatgtgcgcggacaaccgcaacggcgagtgccctatgcatgggccactgcactcgctgcgccggcttgtgggcaccagcagcgctgcggccgccgcgcccccgccggagctgccggagtggctgcgggacctgcctcgcgaggtgtgcctctgcaccagtactgtgcccggcctggcctacggcatctgcgcggcgcagaggatccagcaaggcacctggattggacctttccaaggcgtgcttctgcccccagagaaggtgcaggcaggcgccgtgaggaacacgcagcatctctgggagatatatgaccaggatgggacactacagcactttattgatggtggggaacctagtaagtcgagctggatgaggtatatccgatgtgcaaggcactgcggagaacagaatctaacagtagttcagtacaggtcgaatatattctaccgagcctgtatagatatccctaggggcaccgagcttctggtgtggtacaatgacagctatacgtctttctttgggatccccttacaatgcattgcccaggatgaaaacttaaatgtcccttcaacggtaatggaagccatgtgcagacaagacgccctgcagcccttcaacaaaagcagcaaactcgcccctaccacccagcagcgctccgttgttttcccccagactccgtgcagcaggaacttctctcttctggataagtctgggcccattgaatcaggatttaatcaaatcaacgtgaaaaaccagcgagtcctggcaagcccaacttccacaagccagctccactcggagttcagtgactggcatctttggaaatgtgggcagtgctttaagactttcacccagcggatcctcttacagatgcacgtgtgcacgcagaaccccgacagaccctaccaatgcggccactgctcccagtccttttcccagccttcagaactgaggaaccacgtggtcactcactctagtgaccggcctttcaagtgcggctactgtggtcgtgcctttgccggggccaccaccctcaacaaccacatccgaacccacactggagaaaagcccttcaagtgcgagaggtgtgagaggagcttcacgcaggccacccagctgagccgacaccagcggatgcccaatgagtgcaagccaataactgagagcccagaatcaatcgaagtggattaacggattgactggttggaattaaactgcaaggaaagtcatgattaaatgtcacggacacttaagcaaaaccaaagatttcctctgagcaactttcaatcagtcccagaaaaccaaaagcagtaataaaataagtaagatgttaagagatattgatcctggcatggaagtcagaccaggaaagagattatttatttatgacttagggatgagacttatttcagtggacaactaacctgggatggtaaacattcccagtcccaccatgtattttgctttgtttctaaaaagctttttaaaaactgttatttaataccaaagggaggaatcgtatgggttcttctgcccaccgttgtgactaagaatgcacagggacttggttctcgttgcacctttttttagtaacatgtttcatggggacccactgtacagcccttcattctgctgtgtcagtttggcctggcctgacactggctgccccagcggggaccacggaagcagagtgagagccttcgctgagtcaatgctaccttcagccccagacgcatcccatttccatgtcttccatgctcactgctcatgcactttttacacggtttcttccaaacagcccggtcttgatgcaggagagtctggaaaaggaagaaaatggtttcagtttcaaaattcaaaggaaaaagttgaggacttattttgtcctgtcaagattgcaagaacatgtaaaatgtacggagcttcataatacgttatattgttccgaagcagctcgttgagaaacatttgttttcaataacattttagcttaaaaaaaaa

SEQ ID NO: 290200 - DNA, 479 bp, Homo sapiens
ataaaacacgagtacgtatgagggtagatgtgtagaagggggtatttccggccgcattctttttttagtaacatgtttcatggggacccactgtacagcccttcattctgctgtgtcagtttggcctggcctgacactggctgccccagcggggaccacggaagcagagtgagagccttcgctgagtcaatgctaccttcagccccagacgcatcccatttccatgtcttccatgctcactgctcatgcactttttacacggtttcttccaaacagcccggtcttgatgcaggagagtctggaaaaggaagaaaatggtttcagtttcaaaattcaaaggaaaaagttgaggacttattttgtcctgtcaagattgcaagaacatgtaaaatgtacggagcttcataatacgttatattgttccgaagcagctcgttgagaaacatttgttttcaataacattttagcttaaaaaaaaa

SEQ ID NO: 290201 - DNA, 2289 bp, Homo sapiens
gcacaatctctctctcacacacacacacacacacacacacacacacactcactcactctattttgtgctgtcgtaaaacccacgtgtccagccgggaagctgccagagcgtggaaccaaggagccaggacgcggcagcggccaagcgcagcagcccacggcggttgagtcgggcgcccaggtccgtccgcactctcgcgccctccgcgggcctcccaattttctcgcttgcaggtcgggaggtttccgggcggcacaatctctaggactctcctcccgcgctgctcaggggcatgtagcgcacgcagggcgcacactctcgcgcacccgcacgctcaccgagacacccgcgctggctggtctctcggccctgccggtgtcgcagctgccggtgttcgcgcctctagccgccgtgcgggacctgcctcgcgaggtgtgcctctgcaccagtactgtgcccggcctggcctacggcatctgcgcggcgcagaggatccagcaaggcacctggattggacctttccaaggcgtgcttctgcccccagagaaggtgcaggcaggcgccgtgaggaacacgcagcatctctgggagatatatgaccaggatgggacactacagcactttattgatggtggggaacctagtaagtcgagctggatgaggtatatccgatgtgcaaggcactgcggagaacagaatctaacagtagttcagtacaggtcgaatatattctaccgagcctgtatagatatccctaggggcaccgagcttctggtgtggtacaatgacagctatacgtctttctttgggatccccttacaatgcattgcccaggatgaaaacttaaatgtcccttcaacggtaatggaagccatgtgcagacaagacgccctgcagcccttcaacaaaagcagcaaactcgcccctaccacccagcagcgctccgttgttttcccccagactccgtgcagcaggaacttctctcttctggataagtctgggcccattgaatcaggatttaatcaaatcaacgtgaaaaaccagcgagtcctggcaagcccaacttccacaagccagctccactcggagttcagtgactggcatctttggaaatgtgggcagtgctttaagactttcacccagcggatcctcttacagatgcacgtgtgcacgcagaaccccgacagaccctaccaatgcggccactgctcccagtccttttcccagccttcagaactgaggaaccacgtggtcactcactctagtgaccggcctttcaagtgcggctactgtggtcgtgcctttgccggggccaccaccctcaacaaccacatccgaacccacactggagaaaagcccttcaagtgcgagaggtgtgagaggagcttcacgcaggccacccagctgagccgacaccagcggatgcccaatgagtgcaagccaataactgagagcccagaatcaatcgaagtggattaacggattgactggttggaattaaactgcaaggaaagtcatgattaaatgtcacggacacttaagcaaaaccaaagatttcctctgagcaactttcaatcagtcccagaaaaccaaaagcagtaataaaataagtaagatgttaagagatattgatcctggcatggaagtcagaccaggaaagagattatttatttatgacttagggatgagacttatttcagtggacaactaacctgggatggtaaacattcccagtcccaccatgtattttgctttgtttctaaaaagctttttaaaaactgttatttaataccaaagggaggaatcgtatgggttcttctgcccaccgttgtgactaagaatgcacagggacttggttctcgttgcacctttttttagtaacatgtttcatggggacccactgtacagcccttcattctgctgtgtcagtttggcctggcctgacactggctgccccagcggggaccacggaagcagagtgagagccttcgctgagtcaatgctaccttcagccccagacgcatcccatttccatgtcttccatgctcactgctcatgcactttttacacggtttcttccaaacagcccggtcttgatgcaggagagtctggaaaaggaagaaaatggtttcagtttcaaaattcaaaggaaaaagttgaggacttattttgtcctgtcaagattgcaagaacatgtaaaatgtacggagcttcataatacgttatattgttccgaagcagctcgttgagaaacatttgttttcaataacattttagcttaaaaaaaaa

SEQ ID NO: 290202 - DNA, 611 bp, Homo sapiens
caatcctgctggatcaagatgtatatctagtgcagagaaaatctgacaggaacttaaagctaggatatagcagatgatggacttcagggctgagaatactctgctactgatggaaattctgtttaaatgtcactttgcatactacatacacagtgttgggacaagctggaactaaacaacccctctgtggaattaatcatattactgcgtagagcattagacaactgttccattcaaatgttactgatgtcatgtgcaaaatggttgatgggttcacatttggcattcattaagaagtagtggctaaaattagtcagaatcctaggtgattaatctttgatatgcatggccataaatggtgttcagtcacttagccagctttttcatatggatccttcttaaggactggagcatatctcataaaccatttgcttagtcatttaactagagtgcctacttttgccaacagcttgacagtttaaaaaagaataaaagcctgttccctactggaaaaatctggaattttgccataatcgttataggcagtgctctcagtaaattccagctttatgcctcttagacaaacggagtatgaattttactgtcagtag

SEQ ID NO: 290203 - DNA, 475 bp, Homo sapiens
ttatctcactttaccgcccgagaatggcgccagccggggtggggggggctaaagatttggacccagaccgtgccactgccaactgccctcccgcccttgctcccttcccgggctggggccagtgggccctgcctaggggagatgtggacagcgccggcagctcgtgttcgcagtcaccctgaacgccctcctctgaactcccacgtgtctccattctcctaagctcaggtcgtcaaaggcaaacggagaagcccctttaggtcggagagtggtcagtattgcccacccagagctgggagaaaaacgggaaccccaagagaacctcttcccaccaaagcgcagccaccacgccacagatggcgcccttcaacagtgtgtaataccacaacatgctgtaatcgtttactctttacaaatttctttttcacgtactcacaaaatagtacaaattaaaaaaagttacaaaaacgttata

SEQ ID NO: 290204 - DNA, 411 bp, Homo sapiens
cccctccccgccctgccccggcaagccggcggctctacccagcgccgcggtcctggctctggccagacgtgggggaagccggttgcggctgtccctcccgggccgcggttccctagctcccccgcccccgtcccggcaccaccgcaggcccagagcgaggcagcacctgctgggtacgggagtcggcgtgcggcactccaagtccatcatgatgagctgtggaccgtgtgttggggctccccgacggcggccctgttccggctgccgaggcgcggcgcggacagggcggctctggtggcggcggcggcggcggtggcggctgcgtcggcggctcctccgggctccccggcactcggtaatcggctacacgccggcgggcccctgcccgctccgcctcccgccccacaaggg

SEQ ID NO: 290205 - DNA, 607 bp, Homo sapiens
cccctccccgccctgccccggcaagccggcggctctacccagcgccgcggtcctggctctggccagacgtgggggaagccggttgcggctgtccctcccgggccgcggttccctagctcccccgcccccgtcccggcaccaccgcaggcccagagcgaggcagcacctgctgggtacgggagtcggcgtgcggcactccaagtccatcatgatgagctgtggaccgtgtgttggggctccccgacggcggccctgttccggctgccgaggcgcggcgcggacagggcggctctggtggcggcggcggcggcggtggcggctgcgtcggcggctcctccgggctccccggcactcgctcaggtcgtcaaaggcaaacggagaagcccctttaggtcggagagtggtcagtattgcccacccagagctgggagaaaaacgggaaccccaagagaacctcttcccaccaaagcgcagccaccacgccacagatggcgcccttcaacagtgtgtaataccacaacatgctgtaatcgtttactctttacaaatttctttttcacgtactcacaaaatagtacaaattaaaaaaagttacaaaaacgttata

SEQ ID NO: 290206 - DNA, 1070 bp, Homo sapiens
ccagagaggagcaagtgtttcctagagagccctttcttttctccagaagatatggcttttgaaggcataagcagagcccaaaaaaaaggaaagaatacctgctcttgttaggttaagaagaataaaagaagtgctatcacttggctgtagatcttgcaacaagctagaagactctgaagtggacaaaaactccggggatttctgtacagtctgagctctcgtctcctctccgtctggacccacattcacccgaaggcttctcaaaacagctgaggaagggacctccttggaggagttagaatgatttgtagtatcatctagtaaagggaaaataccacagctttatgtagcacctatctctaggagcccaccattttgatacacagcacccaacatctcttggaagctaacatccttatagcaacagacagcattctcattacacaaataaaaactttgtctcacagaagaacagagagatggctttatgttccaaaggcagtcagccaaaacgtgaggaacagaattctctgtcacttggcagtaatggttggtgaataaccaaccattcaacatttggacatcacagaatttagtcctttttgaggccagaaatcagtactttctccttgaaaaatatagctatacaatgaatactaactcaagaataggatctacattttatttttcctggagagagctccctctccttaacttttgtattaggttggtgcaaaagctattgcagtttttgccattacctttttacctatggttgtatctcaggctgcggttattttttctgtgccaccacacctggttaacttttgcatttttagtagagagggtttcaccagccaggctggtctcaaactcctgaccttaagtgatccacccacctcggcctcccaaagtgctgggattataggcatgagccaccacgcccggcctaaatggttacttttttacaatgaaaaatgaggatttcaggtagcttagaaagagagagggagaaaccaacaggacaaaaaaaacaaaaacagagtgacaatccgactttccagatttat

SEQ ID NO: 290207 - DNA, 341 bp, Homo sapiens
tggggcgctgggggaggacgcgtggcctctgtactggatgtgaatgtagtaggtactgtgcgggtgctgcaggacttcctgccagacatgaagcggccgggttcgggacgcgtgttggtgactgggagcatgggaggattgatggggctgcctttcaatgacgtttattgcgccagaaggttcgcgctcgaaggcttatgcgagagtctggcggttctgctgctgcccttgggggtccagtgagtcaacacccccgtctcctcaaccctcagatgggtttgggagggctgtcgagcaataacccgctattcaaatgttctggttatccccagcacaagaac

SEQ ID NO: 290208 - DNA, 485 bp, Homo sapiens
tggggcgctgggggaggacgcgtggcctctgtactggatgtgaatgtagtaggtactgtgcgggtgctgcaggacttcctgccagacatgaagcggccgggttcgggacgcgtgttggtgactgggagcatgggaggattgatggggctgcctttcaatgacgtttattgcgccagaaggttcgcgctcgaaggcttatgcgagagtctggcggttctgctgctgcccttgggggtccagtgagtcaacacccccgtctcctcaaccctcttaactctgacctagagatgccgagcaccctgtcctgcggaagccgctctggtctctgcccggcttacatttgctgcgtgccaggcacttaggctggagcattggcacgcattgtgccacttgctgacctggctgctgaagtgttggtattgttatggggaagctccagccaagagaggttaggtgactggcccaaggtcatgcagcggccgggg

SEQ ID NO: 290209 - DNA, 461 bp, Homo sapiens
caattaactctattagtttggtggtggtggtggtggtggttgttgttttgagatagggtctcagtcttcacccagactggagtgccatggcgtgaccacagctcactgcagccttgaccttctgggttcaagtaatcctctctccttggcctcctaagtagctgagactacaggcatctgccgctgtgcctggccaattttttacatttttctgtagagacagggtctcattatgttgccgaggcttgtcttgaactcctgggctcaagcagtccttctatctcggcttcccagagtgttggggttacaggcgtgagccaccacattcagcctaactcttattagttctacattgctaccatgataatctggaagcctgaaaatagtctgttttttgagacttccctgagcaaacatgactatgaagagcactactttcctccttttcctttgcaggtgtt

SEQ ID NO: 290210 - DNA, 663 bp, Homo sapiens
ttttggctcttgccacccaaatcctgactggatgtgatgaagtgttggaaatgctacagcaggtcacaactgccctcataaatagtgacatagcagaccgtgagcagaggtgaggaatggattgtgggctgtgaccagctgccctgtgggaagaaaagtttgtttattgaaattaaatctttttagaatatagaaggatcaattttatatagagagatttttgtgagaataggctaaaagggcaagtgtttgaaagccaagtgcagtcacactctttcatgtgctttcaggtgagattgggccaacagccatgatctaagggtagcgaggttgtggagggcacagcctaatctctgccacttgagacttctactgccatcactcccaaaatggcctttcctttaattatcaaggtcagcaccatgcacacttagtttcctcatgataaagacttttgggaggaagaagtgacttaccaactgctacacaaaggatgacactgatgtggtacctcaagattttactgtaattttacttctccaaatacatggctgacctatatagagggcagacttctctttcacagtaataaagccctttctcagcctttcacattaaaatttctgctgtaaccccatctctactaaaaatacaaaaaaaaaa

SEQ ID NO: 290211 - DNA, 472 bp, Homo sapiens
ttttggctcttgccacccaaatcctgactggatgtgatgaagtgttggaaatgctacagcaggtcacaactgccctcataaatagtgacatagcagaccgtgagcagaggttaaaaggcttggaacaagttactaaggctactatgcttggtcaccttcttccagtgttactgacctccttgatgcatccaaatttacagactctgatcatggcggatgccctgatgcctcagctagtgcagctggtactctataccagccagacggcgttgctgcttaaaacccagtgtccggtttttgctgaggtgggctgttccccgtgtggtgcaccagaccagaagtgcaggctgttccctgatgagaggtaatgaatgctgcttccttgcaggaacccttttcttgttttctttgggtgaaagcgtagtactccttttatgaaaatgatttttagcaaggattatctagctgtgaa

SEQ ID NO: 290212 - DNA, 572 bp, Homo sapiens
gcggccgcggcgcccgccctcgcccgcgccccatggggtcacagagtctgtagaagaggcgacaccagggcttccaaatgaacaaccgaaaggaagatatggaaatcacgtcccactaccggcacctgctgcgggagctcaacgagcagaggcagcacggcgtcctgtgcgacgtctgcgtggtcgtggagggcaaggtcttcaaggcgcacaagaacgtcctgctgggcagcagccgctacttcaagacgctctactgccaggtgcagaagacgtcggagcaggccacggtcacgcacctggacatcgtcacggcccagggcttcaaggccatcatcgacttcatgtactcagcgcacctggcgctcaccagcaggaacgtcatcgaggtgatgtcagccgccagcttcctgcagatgacggacatcgtgcaagcctgccacgacttcatcaaggcggcgctggacatcagcatcaagtcggacgcctcagatgagcttgcggagttcgagatcggcgcctcgtccagcagcagcacggaagctctcatctcggccgtgatggctgggagg

SEQ ID NO: 290213 - DNA, 764 bp, Homo sapiens
ctctaaagaagtgctgctcactagaaatacattgtgagccaaaaagatgagccacatagagcttctcggcttagcggctgaagactgacactgccagatcgcctcggaagccccctagaccatcacggatgccgagcttcgggtaactctcacagtggaggacaacttccatcttcaccatgagctgggaggcaggaggataatctggcttcaggaaggaagaaaatgtttgtagttctgggaactccagctcatttttaccactgcctgacagcctccacagcagggtttgtttgaaccccaagggaaggatatctcagcagcttcagggagtgactgcgtactttggtgaaaagccccagcgagctcttggtttaagctaaaaggtccagcacgcccactacaaaatccttgcattgcatagataacttcctgtaatcgttctaacagaatagagagaaatcagcggtatgtcacatggaggcccgcagattggcttgcccagcatagcagtgtcgatcagcaactgctcaccacatgtgaccttatggagcacattggatgcacttatggaacgcagcaggatgtgctgggtgcagaaggcggggcaatttctcttgacacgtgacctgaaggacattttctctaggtcagcatgtgtgaaggtgtggtccatgggccacctgcatcagagtcaccttagctgcgtgctaaagttgcagattcccaggtcccaccctagacttactgagtcagaatacctg

SEQ ID NO: 290214 - DNA, 441 bp, Homo sapiens
gagaccaaaatagggtccaacgcatcctgagacctcgagctggtaacgtacagggaaggtgaacagtgagtcagcccttccttccgctaagtcaacatagtggccttattcccaccactccaggctgggaaaggacaaacatacaagaaatgcttttaatcacggaataagactaagcctcaagccccctcatctgccaaagagtgtgctctgctgtcaaacctcaaagtcattgagaaacaaaccctgataatctcacccagcttcaagaccaagggagtcctagtgtcatggagaagagcaaggaggggcccagggctgccgaagatagatgtctaccaactaggaagagagccctcaccaggaaccaaatctgctgacacctggatcttgaacttcccagccaacagaattgtgaggaataaatgtatgtattttaag

SEQ ID NO: 290215 - DNA, 538 bp, Homo sapiens
gagaccaaaatagggtccaacgcatcctgagacctcgagctggtaacgtacagggaaggtgaacagtgagtcagcccttccttccgctaagtcaacatagtggccttattcccaccactccaggctgggaaaggacaaacatacaagaaatgcttttaatcacggaataagactaagcctcaagccccctcatctgccaaagagtgtgctctgctgtcaaacctcaaagtcattgagaaacaaaccctgataatctcacccagcttcaagaccaagggagtcctagtgtcatggagaagagcaaggaggggcccagggctgccgcaggacatgccactccagacagaactcaacttccctagtgactattggctatccaacctctcctccagcacagcaagcagatgacaatacttgcaagacatgatgtgttaaattaaaaaacatagtctatttaacaaattcttttataaatttttctggattctctggccaaatttttccttgtataaaactaaatcacacatagaaaatggca

SEQ ID NO: 290216 - DNA, 1169 bp, Homo sapiens
caacctggcatttaggtggtgtgggaacaggagaccccagactttcttgttttggggtctggggcaggcaaccaggctccagggacagtgagttgaaggaagggtggctgggagaccccttgacttgctgccaaggagacagagctggagctagggtggccggtggtgtctgaggcaggtgcagagagggagggagggaaggggcctttgactccaacctcctttttctgtaccgactgcaggtggcagctgccctttcaggagccagtgggggaacctgggtggctgggtggggacacctgcaagtcctccctaagccagctaccaccctacactgttggcctcccttctccaactgtggggatgctgctcaggccttttgtgacatcacacctgagagtccctggggtccagtcattgctgctgggcacagcgaggtccaagctcaggtcgccctgccccctacccaccatgccagatccagcatcgttgtgggcaaacaattatctggatgatctttatggggcttaagcttgggtgggagcagatggggcatgagctggggatttggggatggggggaatccacacccccacgtcctggacgtttaaaaggccctctctggcactgggccggggcagaggccagcagaaaagtgactggagtccagggacatgatggatcaggaggagaagacggaggaaggctcaggcccctgtgccgaggcgggctccccagaccaggagggcttcttcaatctgctgagccacgtgcagggcgaccggatggagggacagcgctgttcactgcaagccgggccgggccagaccaccaagagcctctgtgaacgtccacgcagagagcgaccccacccccgagatggacagcctcatggacatgctggccagtacccagggccgccgcatggatgaccaacgtgtgacagtcagcagcctgcccggcttccagcccgtggggtccaaggacggagcacagaaacgagctgggaccctcagtccccaacccctgctcacccctcaggacccgaccgctctcggcttccgtcggaacagcagcccccagcccccgacacaagccccctgagggcctgaggcatcctgggtctcactcggcccccaaaaactgataaaagaataaaacacttaaat

SEQ ID NO: 290217 - DNA, 1108 bp, Homo sapiens
gcacgaagtcgctggaggtgcacacctcgacgacacgctcacagatgggagttcagacacacacttcctggcttgcgtgcgaagcaggatcgcagggcaataatccctccatcttccccgggaggttctgtgcctgcaagatacacggcacccactcgatgccaccgggccgccactgtctgggcctgggatcttgacccacttgccttctgtacttcagggtttagaggcagcagcagcagcagcagccgtcttggataacttttgatggattcaggaggcctggagacctcttgtgtgcaggcacctggacataattttcattcagtcctgcccaatgttccgacctggactgcggtgccgacgaggaaaccgaggcttagcgggatccctaatccaaggccacgacgagtgagcctgctgggttcaagccaggagcctgtccccagggggcatttgtcacagccttaccctcttccgggaggcgcaacgcttaccctcgtggaccaacaatcgaattaacatgctgatacacacatggggtgagtgacgccctcaaatgcttgcaaacacagacacacactcggaatttcagaagctgcttctgctgtgtgtcctgtcgcttggaaggcacagccccagcagcacccatacaaaatgaggtctccgatttaaggtgcgaggcgggctccccagaccaggagggcttcttcaatctgctgagccacgtgcagggcgaccggatggagggacagcgctgttcactgcaagccgggccgggccagaccaccaagagccagagcgaccccacccccgagatggacagcctcatggacatgctggccagtacccagggccgccgcatggatgaccaacgtgtgacagtcagcagcctgcccggcttccagcccgtggggtccaaggacggagcacagaaacgagctgggaccctcagtccccaacccctgctcacccctcaggacccgaccgctctcggcttccgtcggaacagcagcccccagcccccgacacaagccccctgagggcctgaggcatcctgggtctcactcggcccccaaaaactgataaaagaataaaacacttaaat

SEQ ID NO: 290218 - DNA, 153 bp, Homo sapiens
gggctccccagaccaggagggcttcttcaatctgctgagccacgtgcagggcgaccggatggagggacagcgctgttcactgcaagccgggccgggccagaccaccaagagccgtgagcatgggcacgggggtgctgtccatggggcgtgaac

SEQ ID NO: 290219 - DNA, 1150 bp, Homo sapiens
caacctggcatttaggtggtgtgggaacaggagaccccagactttcttgttttggggtctggggcaggcaaccaggctccagggacagtgagttgaaggaagggtggctgggagaccccttgacttgctgccaaggagacagagctggagctagggtggccggtggtgtctgaggcaggtgcagagagggagggagggaaggggcctttgactccaacctcctttttctgtaccgactgcaggtggcagctgccctttcaggagccagtgggggaacctgggtggctgggtggggacacctgcaagtcctccctaagccagctaccaccctacactgttggcctcccttctccaactgtggggatgctgctcaggccttttgtgacatcacacctgagagtccctggggtccagtcattgctgctgggcacagcgaggtccaagctcaggtcgccctgccccctacccaccatgccagatccagcatcgttgtgggcaaacaattatctggatgatctttatggggcttaagcttgggtgggagcagatggggcatgagctggggatttggggatggggggaatccacacccccacgtcctggacgtttaaaaggccctctctggcactgggccggggcagaggccagcagaaaagtgactggagtccagggacatgatggatcaggaggagaagacggaggaaggctcaggcccctgtgccgaggcgggctccccagaccaggagggcttcttcaatctgctgagccacgtgcagggcgaccggatggagggacagcgctgttcactgcaagccgggccgggccagaccaccaagagccagagcgaccccacccccgagatggacagcctcatggacatgctggccagtacccagggccgccgcatggatgaccaacgtgtgacagtcagcagcctgcccggcttccagcccgtggggtccaaggacggagcacagaaacgagctgggaccctcagtccccaacccctgctcacccctcaggacccgaccgctctcggcttccgtcggaacagcagcccccagcccccgacacaagccccctgagggcctgaggcatcctgggtctcactcggcccccaaaaactgataaaagaataaaacacttaaat

SEQ ID NO: 290220 - DNA, 874 bp, Homo sapiens
gcacgaagtcgctggaggtgcacacctcgacgacacgctcacagatgggagttcagacacacacttcctggcttgcgtgcgaagcaggatcgcagggcaataatccctccatcttccccgggaggttctgtgcctgcaagatacacggcacccactcgatgccaccgggccgccactgtctgggcctgggatcttgacccacttgccttctgtacttcagggtttagaggcagcagcagcagcagcagccgtcttggataacttttgatggattcaggaggcctggagacctcttgtgtgcaggcacctggacataattttcattcagtcctgcccaatgttccgacctggactgcggtgccgacgaggaaaccgaggcttagcgggatccctaatccaaggccacgacgagtgagcctgctgggttcaagccaggagcctgtccccagggggcatttgtcacagccttaccctcttccgggaggcgcaacgcttaccctcgtggaccaacaatcgaattaacatgctgatacacacatggggtgagtgacgccctcaaatgcttgcaaacacagacacacactcggaatttcagaagctgcttctgctgtgtgtcctgtcgcttggaaggcacagccccagcagcacccatacaaaatgaggtctccgatttaaggtgcgaggtatgtgtgcaaacagactcttgctggtctgagctggttccttcgctcggccgtgttgatgaaggtaccaagccccctgccacttacatgggacatagggagtgaatcagacccgaaggtctgggggagataggaaaggatccatgctgccctaaaggaaataaactaatgtgacaacaagtgccacagaa

SEQ ID NO: 290221 - DNA, 2182 bp, Homo sapiens
tccccacacattcacacacccactcccaatatacagtatctcgcccaatgtttatcactccggatacattcctagaatccaaagatctggagcagggagaaaaagaaaaggcgcctaccagatgcctggaacagtctactaggcactacaagtacattagctctttcaatgctcacaacagcccagccagatgttatctcaatcttacggatgaataaatttaagacttctggctggacactagaggctggcgaagtacgtgacctttgatcagaatctcctggaggagtggggtccctgaccattgtaccttccagagaaccttaaaactgagatcccaggagacccctctcggatactctgcagaagtcagagtgacgatattagcaagcacaccgcagccatgcgaacccttcctggctcagctcccgacaaaagaaatcaagcccccagtcaaaatacaacaacaacggattaggcctacaaccctctcccccggcccccaaattctcaggagaaatcccctaagagtcaggtacggaggtcactgcagcgacttcagcgtgcagagaacgcggggacctaggaagaggacgctccagcccaactgagcgtctctgattggccgccagctcagcttggaacgctggggtgcgtggcgtcatatccgccgggcccgccatcttgttcccaggggcagttggcggaagagatcgagctccctggctgccggctcgccttctgcgtggagttctcgcggtctgggtttcgctgtctgctcttggcccggggtcattttgtcggcgtcgggtgccctctcttgcccagctggggcacagcgaggcggccccttctcccgacgacgttcgatggagtagggtcccagaccgttgtcccgaagagcgagatcgagcttggccccctcccccccctccttccctccctccttccttccgccgcaacatggctaacaacagccccgcgctgacaggcaactcgcagccgcagcaccaggcggctgcagctgcggctcagcaacagcagcagtgcggcggcggcggcgctaccaagccggcggtctccggcaagcagggcaatgtgctcccgctctggggcaacgagaagaccatgaacctcaaccccatgatcctgaccaacatcctgtcgtcgccttacttcaaagtacagctctacgagctcaagacctaccacgaggtggtggacgagatctactttaaggtcacgcacgttgaaccatgggagaaaggaagcaggaaaacagcgggccagacagggatgtgcggaggggttcgaggtgttggaacaggaggaattgtttctacagcattttgcctgttatacaaattatttaccctgaagttaactcgaaagcaagtgatgggtcttataacacacacagactctccatatattagagcgcttggatttatgtatataagatatacacagccccctacagatctgtgggactggtttgaatccttccttgatgatgaagaggtatgtcaacaagggtaataatttgttttcttctgattactctcatatttttattatcttttatttattggtggtttaatgtcttcaagaacttcctgtagttaaatttatttcagtgagatacttttggaattaatgtccttttactgagacctgatggcttttatgtattttagggtaaatttctgaagttttattttcttgttttaaaattgtttaaatgtgtttggtaactattggaaaattttctcttcttaattatgttctgtgtattgtattgatcctgaattgtatagttaatagtgacttttcaagatggggcatgctcaagatcgaacagataataaaagatatgcacatagaatactaattgtagcttttttttcttctggaacatttcagttcttcaccctctagcttcttccaaatatcagtattcccacttgcatagaagtgcagaattgaagagttgggtgttacataaataggctaagtgtttggatgacttgttcaaggtgacaaaattttaattccagttttctgactcctagtacaccacacacacctttaaaaaagaaattttttaaattgtaattcgagtctccctaatttgaaatctgaaatactaagttagatttaaatcgtgtatgcattggctggg

SEQ ID NO: 290222 - DNA, 4390 bp, Homo sapiens
tccccacacattcacacacccactcccaatatacagtatctcgcccaatgtttatcactccggatacattcctagaatccaaagatctggagcagggagaaaaagaaaaggcgcctaccagatgcctggaacagtctactaggcactacaagtacattagctctttcaatgctcacaacagcccagccagatgttatctcaatcttacggatgaataaatttaagacttctggctggacactagaggctggcgaagtacgtgacctttgatcagaatctcctggaggagtggggtccctgaccattgtaccttccagagaaccttaaaactgagatcccaggagacccctctcggatactctgcagaagtcagagtgacgatattagcaagcacaccgcagccatgcgaacccttcctggctcagctcccgacaaaagaaatcaagcccccagtcaaaatacaacaacaacggattaggcctacaaccctctcccccggcccccaaattctcaggagaaatcccctaagagtcaggtacggaggtcactgcagcgacttcagcgtgcagagaacgcggggacctaggaagaggacgctccagcccaactgagcgtctctgattggccgccagctcagcttggaacgctggggtgcgtggcgtcatatccgccgggcccgccatcttgttcccaggggcagttggcggaagagatcgagctccctggctgccggctcgccttctgcgtggagttctcgcggtctgggtttcgctgtctgctcttggcccggggtcattttgtcggcgtcgggtgccctctcttgcccagctggggcacagcgaggcggccccttctcccgacgacgttcgatggagtagggtcccagaccgttgtcccgaagagcgagatcgagcttggccccctcccccccctccttccctccctccttccttccgccgcaacatggctaacaacagccccgcgctgacaggcaactcgcagccgcagcaccaggcggctgcagctgcggctcagcaacagcagcagtgcggcggcggcggcgctaccaagccggcggtctccggcaagcagggcaatgtgctcccgctctggggcaacgagaagaccatgaacctcaaccccatgatcctgaccaacatcctgtcgtcgccttacttcaaagtacagctctacgagctcaagacctaccacgaggtggtggacgagatctactttaaggtcacgcacgttgaaccatgggagaaaggaagcaggaaaacagcgggccagacagggatgtgcggaggggttcgaggtgttggaacaggaggaattgtttctacagcattttgcctgttatacaaattatttaccctgaagttaactcgaaagcaagtgatgggtcttataacacacacagactctccatatattagagcgcttggatttatgtatataagatatacacagccccctacagatctgtgggactggtttgaatccttccttgatgatgaagaggacctagatgtgaaggctggtggaggctgtgtaatgaccattggagaaatgctacgatcttttctcacaaaactggagtggttttctaccttgtttccaagaattccagttccagttcaaaagaatattgatcaacagattaaaacccgacctagaaaaatcaagaaagatgggaaggaaggtgctgaggaaatagacagacatgttgaacgcagacgttcaaggtctccaaggagatctctgagtccacggaggtccccaagaaggtcaagaagtagaagtcatcatcgggagggccatgggtcttctagttttgacagagaattagaaagagagaaagaacgccagcgactagagcgtgaagccaaagaaagggagaaagaacggcgaagatcccgaagtattgaccgggggttagaacgcaggcgcagcagaagtagggaaaggcatagaagtcgcagtcgaagtcgtgataggaaaggggatagaagggacagggatcgagaaagagagaaagaaaatgagagaggtagaagacgagatcgtgactatgataaggaaagaggaaatgaacgagaaaaagagagagagcgatcaagagaaaggtccaaggaacagagaagtaggggagaggtagaagagaagaaacataaagaagacaaagatgataggcggcacagagatgacaaaagagattccaagaaagagaaaaaacacagtagaagcagaagcagagaaaggaaacacagaagtaggagtcgaagtagaaatgcagggaaacgaagtagaagtagaagcaaagagaaatcaagtaaacataaaaatgaaagtaaagaaaaatcaaataaacgaagtcgaagtggcagtcaaggaagaactgacagtgttgaaaaatcaaaaaaacgggaacatagtcccagcaaagaaaaatctagaaagcgtagtagaagcaaagaacgttcccacaaacgagatcacagtgatagtaaggaccagtcagacaaacatgatcgtcgaaggagccaaagtatagaacaagagagccaagaaaaacagcataaaaacaaagatgagactgtgtgaaaatattttgtaaaagtggatcacattgaatcctataaatgattaaatctgcttttttcccccacgttgagattgtgcagtagttcgcactcctcaagctctccctgtaggctgcattttcatttcctctttcgtgtagggaagtgcctttgtaattccatttattgcattggtgttttcacccaattgttaagtttgatacatgatgcacagattgttcttgcatttttattgtttgtttttgaaatgtacagtctgtacatatgtcctgaaaatgttttaattcctttggcatggttgccatgttggttaaatttgtataaggcaataaactgccactaatctatttttgttttgtaggtgtgggattatggtttgtgtactgaagttagcatggctgtgcttttcgtaatagaatgctaaagactttgagaatggatcttggatgtctattataggagaagtatgtgctgccaatgtacaagaaggcagcattgtaggattaacattcttgtctactgtatattatcttggaaggctcttgttaatatgttacacttaatattctccacagttacctttagagagaatttatgagaagttagtttctgatgcagaggtttttaggctgtgatttcatcaaaagtccttttagcattctacctcaaagggacacttagtatgcctaaaatttattcacttagttttccttttttatttgaaaaaatacatgacatgtaatctttttttcttgaattctttctcagattttaaagtactatattaaagaaaaaaattaatgtctaaagcctagcattcttgcagaaccctatactaacatgtaatggggagagggtggggcagatgagtagagaaacagattcaagcctcaagcttccaaagcatttttataaatggaaaatccttaaattatgaaacagcttgatatagtgtcctttttttaaaattcagaactttttttattgataatggagattgctgtttgagtttttaaacttaatctagaacagaggagtattaaaagtaatgctgtgctgcattatttaagactatcagcaaattatttgatagattgttcttacaacttgtattctgattacagaaccatcatgagtgtggaataaatactggattaaatcctttatcctgggtcttggcttttcccccatttgttaaatttttttagcatatttatattgtggaaattgatgaaacgtcagtagagtcacactttgtgtacagggatgtcttagtgcccagatgacaagtgaattttggagaaatgcatagactgggattgggcatgtggtaatcaataatctttattagaatacttgataatggcagttccctttgtcagtggttgttacatgtgtcatttgattactttgttccatgtcaaagacgtttattgggataccttttacttggacaatatgttagcattttttaaaatttggacttgaaattctttaagataattcacccaattctttttagaaaagaaaatagaggcccaaagtaatgatgtcagtgctagggctaaaactcagtattctgacagtgtagtgaacctggcacgcacattgaggtttgttttatctcactggttatactggccaactaatgcgcactcagaagccaccttgcaaaaatgttaaatggagcaaacgagtacacttgcaagagtcctccatatgtgggcttaacatatgtaccactccattttagaaaaatctcattaaatgaattcttctaaaaatga

SEQ ID NO: 290223 - DNA, 2590 bp, Homo sapiens
tggtcatctctaggagtcgagctgctaggagtgcaagctatgagactgagcgtcaataaagaacgccagcgactagagcgtgaagccaaagaaagggagaaagaacggcgaagatcccgaagtattgaccgggggttagaacgcaggcgcagcagaagtagggaaaggcatagaagtcgcagtcgaagtcgtgataggaaaggggatagaagggacagggatcgagaaagagagaaagaaaatgagagaggtagaagacgagatcgtgactatgataaggaaagaggaaatgaacgagaaaaagagagagagcgatcaagagaaaggtccaaggaacagagaagtaggggagaggtagaagagaagaaacataaagaagacaaagatgataggcggcacagagatgacaaaagagattccaagaaagagaaaaaacacagtagaagcagaagcagagaaaggaaacacagaagtaggagtcgaagtagaaatgcagggaaacgaagtagaagtagaagcaaagagaaatcaagtaaacataaaaatgaaagtaaagaaaaatcaaataaacgaagtcgaagtggcagtcaaggaagaactgacagtgttgaaaaatcaaaaaaacgggaacatagtcccagcaaagaaaaatctagaaagcgtagtagaagcaaagaacgttcccacaaacgagatcacagtgatagtaaggaccagtcagacaaacatgatcgtcgaaggagccaaagtatagaacaagagagccaagaaaaacagcataaaaacaaagatgagactgtgtgaaaatattttgtaaaagtggatcacattgaatcctataaatgattaaatctgcttttttcccccacgttgagattgtgcagtagttcgcactcctcaagctctccctgtaggctgcattttcatttcctctttcgtgtagggaagtgcctttgtaattccatttattgcattggtgttttcacccaattgttaagtttgatacatgatgcacagattgttcttgcatttttattgtttgtttttgaaatgtacagtctgtacatatgtcctgaaaatgttttaattcctttggcatggttgccatgttggttaaatttgtataaggcaataaactgccactaatctatttttgttttgtaggtgtgggattatggtttgtgtactgaagttagcatggctgtgcttttcgtaatagaatgctaaagactttgagaatggatcttggatgtctattataggagaagtatgtgctgccaatgtacaagaaggcagcattgtaggattaacattcttgtctactgtatattatcttggaaggctcttgttaatatgttacacttaatattctccacagttacctttagagagaatttatgagaagttagtttctgatgcagaggtttttaggctgtgatttcatcaaaagtccttttagcattctacctcaaagggacacttagtatgcctaaaatttattcacttagttttccttttttatttgaaaaaatacatgacatgtaatctttttttcttgaattctttctcagattttaaagtactatattaaagaaaaaaattaatgtctaaagcctagcattcttgcagaaccctatactaacatgtaatggggagagggtggggcagatgagtagagaaacagattcaagcctcaagcttccaaagcatttttataaatggaaaatccttaaattatgaaacagcttgatatagtgtcctttttttaaaattcagaactttttttattgataatggagattgctgtttgagtttttaaacttaatctagaacagaggagtattaaaagtaatgctgtgctgcattatttaagactatcagcaaattatttgatagattgttcttacaacttgtattctgattacagaaccatcatgagtgtggaataaatactggattaaatcctttatcctgggtcttggcttttcccccatttgttaaatttttttagcatatttatattgtggaaattgatgaaacgtcagtagagtcacactttgtgtacagggatgtcttagtgcccagatgacaagtgaattttggagaaatgcatagactgggattgggcatgtggtaatcaataatctttattagaatacttgataatggcagttccctttgtcagtggttgttacatgtgtcatttgattactttgttccatgtcaaagacgtttattgggataccttttacttggacaatatgttagcattttttaaaatttggacttgaaattctttaagataattcacccaattctttttagaaaagaaaatagaggcccaaagtaatgatgtcagtgctagggctaaaactcagtattctgacagtgtagtgaacctggcacgcacattgaggtttgttttatctcactggttatactggccaactaatgcgcactcagaagccaccttgcaaaaatgttaaatggagcaaacgagtacacttgcaagagtcctccatatgtgggcttaacatatgtaccactccattttagaaaaatctcattaaatgaattcttctaaaaatga

SEQ ID NO: 290224 - DNA, 2529 bp, Homo sapiens
tccccacacattcacacacccactcccaatatacagtatctcgcccaatgtttatcactccggatacattcctagaatccaaagatctggagcagggagaaaaagaaaaggcgcctaccagatgcctggaacagtctactaggcactacaagtacattagctctttcaatgctcacaacagcccagccagatgttatctcaatcttacggatgaataaatttaagacttctggctggacactagaggctggcgaagtacgtgacctttgatcagaatctcctggaggagtggggtccctgaccattgtaccttccagagaaccttaaaactgagatcccaggagacccctctcggatactctgcagaagtcagagtgacgatattagcaagcacaccgcagccatgcgaacccttcctggctcagctcccgacaaaagaaatcaagcccccagtcaaaatacaacaacaacggattaggcctacaaccctctcccccggcccccaaattctcaggagaaatcccctaagagtcaggtacggaggtcactgcagcgacttcagcgtgcagagaacgcggggacctaggaagaggacgctccagcccaactgagcgtctctgattggccgccagctcagcttggaacgctggggtgcgtggcgtcatatccgccgggcccgccatcttgttcccaggggcagttggcggaagagatcgagctccctggctgccggctcgccttctgcgtggagttctcgcggtctgggtttcgctgtctgctcttggcccggggtcattttgtcggcgtcgggtgccctctcttgcccagctggggcacagcgaggcggccccttctcccgacgacgttcgatggagtagggtcccagaccgttgtcccgaagagcgagatcgagcttggccccctcccccccctccttccctccctccttccttccgccgcaacatggctaacaacagccccgcgctgacaggcaactcgcagccgcagcaccaggcggctgcagctgcggctcagcaacagcagcagtgcggcggcggcggcgctaccaagccggcggtctccggcaagcagggcaatgtgctcccgctctggggcaacgagaagaccatgaacctcaaccccatgatcctgaccaacatcctgtcgtcgccttacttcaaagtacagctctacgagctcaagacctaccacgaggtggtggacgagatctactttaaggtcacgcacgttgaaccatgggagaaaggaagcaggaaaacagcgggccagacagggatgtgcggaggggttcgaggtgttggaacaggaggaattgtttctacagcattttgcctgttatacaaattatttaccctgaagttaactcgaaagcaagtgatgggtcttataacacacacagactctccatatattagagcgcttggatttatgtatataagatatacacagccccctacagatctgtgggactggtttgaatccttccttgatgatgaagaggacctagatgtgaaggctggtggaggctgtgtaatgaccattggagaaatgctacgatcttttctcacaaaactggagtggttttctaccttgtttccaagaattccagttccagttcaaaagaatattgatcaacagattaaaacccgacctagaaaaatcaagaaagatgggaaggaaggtgctgaggaaatagacagacatgttgaacgcagacgttcaaggtctccaaggagatctctgagtccacggaggtccccaagaaggtcaagaagtagaagtcatcatcgggagggccatgggtcttctagttttgacagagaattagaaagagagaaagaacgccagcgactagagcgtgaagccaaagaaagggagaaagaacggcgaagatcccgaagtattgaccgggggttagaacgcaggcgcagcagaagtagggaaaggcatagaagtcgcagtcgaagtcgtgataggaaaggggatagaagggacagggatcgagaaagagagaaagaaaatgagagaggtagaagacgagatcgtgactatgataaggaaagaggaaatgaacgagaaaaagagagagagcgatcaagagaaaggtccaaggaacagagaagtaggggagaggtagaagagaagaaacataaagaagacaaagatgataggcggcacagagatgacaaaagagattccaagaaagagaaaaaacacagtagaagcagaagcagagaaaggaaacacagaagtaggagtcgaagtagaaatgcagggaaacgaagtagaagtagaagcaaagagaaatcaagtaagatgggaaggaaggtgctgaggaaatagacagacatgttgaacgcagacgttcaaggtctccaaggagatctctgagtccacggaggtccccaagaaggtcaagaagtagaagtcatcatcgggagggccatgggtcttctagttttgacagagaattagaaagagagaaagaaaaaaaatgtcgcgcggccg

SEQ ID NO: 290225 - DNA, 1307 bp, Homo sapiens
  misc_feature (1282)..(1282): n is a, c, g, or t
tccccacacattcacacacccactcccaatatacagtatctcgcccaatgtttatcactccggatacattcctagaatccaaagatctggagcagggagaaaaagaaaaggcgcctaccagatgcctggaacagtctactaggcactacaagtacattagctctttcaatgctcacaacagcccagccagatgttatctcaatcttacggatgaataaatttaagacttctggctggacactagaggctggcgaagtacgtgacctttgatcagaatctcctggaggagtggggtccctgaccattgtaccttccagagaaccttaaaactgagatcccaggagacccctctcggatactctgcagaagtcagagtgacgatattagcaagcacaccgcagccatgcgaacccttcctggctcagctcccgacaaaagaaatcaagcccccagtcaaaatacaacaacaacggattaggcctacaaccctctcccccggcccccaaattctcaggagaaatcccctaagagtcaggtacggaggtcactgcagcgacttcagcgtgcagagaacgcggggacctaggaagaggacgctccagcccaactgagcgtctctgattggccgccagctcagcttggaacgctggggtgcgtggcgtcatatccgccgggcccgccatcttgttcccaggggcagttggcggaagagatcgagctccctggctgccggctcgccttctgcgtggagttctcgcggtctgggtttcgctgtctgctcttggcccggggtcattttgtcggcgtcgggtgccctctcttgcccagctggggcacagcgaggcggccccttctcccgacgacgttcgatggagtagggtcccagaccgttgtcccgaagagcgagatcgagcttggccccctcccccccctccttccctccctccttccttccgccgcaacatggctaacaacagccccgcgctgacaggcaactcgcagccgcagcaccaggcggctgcagctgcggctcagcaacagcagcagtgcggcggcggcggcgctaccaagccggcggtctccggcaagcagggcaatgtgctcccgctctggggcaacgagaagaccatgaacctcaaccccatgatcctgaccaacatcctgtcgtcgccttacttcaaagtacagctctacgagctcaagacctaccacgaggtggtggacgagatctactttaaggtcacgctacgtgaaccatgggagaaaggaagcagggaaatgntctacagcattttgcctggtataca

SEQ ID NO: 290226 - DNA, 2929 bp, Homo sapiens
aagctttacgctatggaaatactttttttgacggctagggtatcttttgtgtttctgtaggacctagatgtgaaggctggtggaggctgtgtaatgaccattggagaaatgctacgatcttttctcacaaaactggagtggttttctaccttgtttccaagaattccagttccagttcaaaagaatattgatcaacagattaaaacccgacctagaaaaatcaagaaagatgggaaggaaggtgctgaggaaatagacagacatgttgaacgcagacgttcaaggtctccaaggagatctctgagtccacggaggtccccaagaaggtcaagaagtagaagtcatcatcgggagggccatgggtcttctagttttgacagagaattagaaagagagaaagaacgccagcgactagagcgtgaagccaaagaaagggagaaagaacggcgaagatcccgaagtattgaccgggggttagaacgcaggcgcagcagaagtagggaaaggcatagaagtcgcagtcgaagtcgtgataggaaaggggatagaagggacagggatcgagaaagagagaaagaaaatgagagaggtagaagacgagatcgtgactatgataaggaaagaggaaatgaacgagaaaaagagagagagcgatcaagagaaaggtccaaggaacagagaagtaggggagaggtagaagagaagaaacataaagaagacaaagatgataggcggcacagagatgacaaaagagattccaagaaagagaaaaaacacagtagaagcagaagcagagaaaggaaacacagaagtaggagtcgaagtagaaatgcagggaaacgaagtagaagtagaagcaaagagaaatcaagtaaacataaaaatgaaagtaaagaaaaatcaaataaacgaagtcgaagtggcagtcaaggaagaactgacagtgttgaaaaatcaaaaaaacgggaacatagtcccagcaaagaaaaatctagaaagcgtagtagaagcaaagaacgttcccacaaacgagatcacagtgatagtaaggaccagtcagacaaacatgatcgtcgaaggagccaaagtatagaacaagagagccaagaaaaacagcataaaaacaaagatgagactgtgtgaaaatattttgtaaaagtggatcacattgaatcctataaatgattaaatctgcttttttcccccacgttgagattgtgcagtagttcgcactcctcaagctctccctgtaggctgcattttcatttcctctttcgtgtagggaagtgcctttgtaattccatttattgcattggtgttttcacccaattgttaagtttgatacatgatgcacagattgttcttgcatttttattgtttgtttttgaaatgtacagtctgtacatatgtcctgaaaatgttttaattcctttggcatggttgccatgttggttaaatttgtataaggcaataaactgccactaatctatttttgttttgtaggtgtgggattatggtttgtgtactgaagttagcatggctgtgcttttcgtaatagaatgctaaagactttgagaatggatcttggatgtctattataggagaagtatgtgctgccaatgtacaagaaggcagcattgtaggattaacattcttgtctactgtatattatcttggaaggctcttgttaatatgttacacttaatattctccacagttacctttagagagaatttatgagaagttagtttctgatgcagaggtttttaggctgtgatttcatcaaaagtccttttagcattctacctcaaagggacacttagtatgcctaaaatttattcacttagttttccttttttatttgaaaaaatacatgacatgtaatctttttttcttgaattctttctcagattttaaagtactatattaaagaaaaaaattaatgtctaaagcctagcattcttgcagaaccctatactaacatgtaatggggagagggtggggcagatgagtagagaaacagattcaagcctcaagcttccaaagcatttttataaatggaaaatccttaaattatgaaacagcttgatatagtgtcctttttttaaaattcagaactttttttattgataatggagattgctgtttgagtttttaaacttaatctagaacagaggagtattaaaagtaatgctgtgctgcattatttaagactatcagcaaattatttgatagattgttcttacaacttgtattctgattacagaaccatcatgagtgtggaataaatactggattaaatcctttatcctgggtcttggcttttcccccatttgttaaatttttttagcatatttatattgtggaaattgatgaaacgtcagtagagtcacactttgtgtacagggatgtcttagtgcccagatgacaagtgaattttggagaaatgcatagactgggattgggcatgtggtaatcaataatctttattagaatacttgataatggcagttccctttgtcagtggttgttacatgtgtcatttgattactttgttccatgtcaaagacgtttattgggataccttttacttggacaatatgttagcattttttaaaatttggacttgaaattctttaagataattcacccaattctttttagaaaagaaaatagaggcccaaagtaatgatgtcagtgctagggctaaaactcagtattctgacagtgtagtgaacctggcacgcacattgaggtttgttttatctcactggttatactggccaactaatgcgcactcagaagccaccttgcaaaaatgttaaatggagcaaacgagtacacttgcaagagtcctccatatgtgggcttaacatatgtaccactccattttagaaaaatctcattaaatgaattcttctaaaaatga

SEQ ID NO: 290227 - DNA, 2434 bp, Homo sapiens
agtcttcctaccttttcctcctgtcttttctacttcagttttcctgacacaaacttctcctttcttattgagtcctgctatttgtgcctatgaaacatctctccctctcagctggattattatgaaagaggaaatgaacgagaaaaagagagagagcgatcaagagaaaggtccaaggaacagagaagtaggggagaggtagaagagaagaaacataaagaagacaaagatgataggcggcacagagatgacaaaagagattccaagaaagagaaaaaacacagtagaagcagaagcagagaaaggaaacacagaagtaggagtcgaagtagaaatgcagggaaacgaagtagaagtagaagcaaagagaaatcaagtaaacataaaaatgaaagtaaagaaaaatcaaataaacgaagtcgaagtggcagtcaaggaagaactgacagtgttgaaaaatcaaaaaaacgggaacatagtcccagcaaagaaaaatctagaaagcgtagtagaagcaaagaacgttcccacaaacgagatcacagtgatagtaaggaccagtcagacaaacatgatcgtcgaaggagccaaagtatagaacaagagagccaagaaaaacagcataaaaacaaagatgagactgtgtgaaaatattttgtaaaagtggatcacattgaatcctataaatgattaaatctgcttttttcccccacgttgagattgtgcagtagttcgcactcctcaagctctccctgtaggctgcattttcatttcctctttcgtgtagggaagtgcctttgtaattccatttattgcattggtgttttcacccaattgttaagtttgatacatgatgcacagattgttcttgcatttttattgtttgtttttgaaatgtacagtctgtacatatgtcctgaaaatgttttaattcctttggcatggttgccatgttggttaaatttgtataaggcaataaactgccactaatctatttttgttttgtaggtgtgggattatggtttgtgtactgaagttagcatggctgtgcttttcgtaatagaatgctaaagactttgagaatggatcttggatgtctattataggagaagtatgtgctgccaatgtacaagaaggcagcattgtaggattaacattcttgtctactgtatattatcttggaaggctcttgttaatatgttacacttaatattctccacagttacctttagagagaatttatgagaagttagtttctgatgcagaggtttttaggctgtgatttcatcaaaagtccttttagcattctacctcaaagggacacttagtatgcctaaaatttattcacttagttttccttttttatttgaaaaaatacatgacatgtaatctttttttcttgaattctttctcagattttaaagtactatattaaagaaaaaaattaatgtctaaagcctagcattcttgcagaaccctatactaacatgtaatggggagagggtggggcagatgagtagagaaacagattcaagcctcaagcttccaaagcatttttataaatggaaaatccttaaattatgaaacagcttgatatagtgtcctttttttaaaattcagaactttttttattgataatggagattgctgtttgagtttttaaacttaatctagaacagaggagtattaaaagtaatgctgtgctgcattatttaagactatcagcaaattatttgatagattgttcttacaacttgtattctgattacagaaccatcatgagtgtggaataaatactggattaaatcctttatcctgggtcttggcttttcccccatttgttaaatttttttagcatatttatattgtggaaattgatgaaacgtcagtagagtcacactttgtgtacagggatgtcttagtgcccagatgacaagtgaattttggagaaatgcatagactgggattgggcatgtggtaatcaataatctttattagaatacttgataatggcagttccctttgtcagtggttgttacatgtgtcatttgattactttgttccatgtcaaagacgtttattgggataccttttacttggacaatatgttagcattttttaaaatttggacttgaaattctttaagataattcacccaattctttttagaaaagaaaatagaggcccaaagtaatgatgtcagtgctagggctaaaactcagtattctgacagtgtagtgaacctggcacgcacattgaggtttgttttatctcactggttatactggccaactaatgcgcactcagaagccaccttgcaaaaatgttaaatggagcaaacgagtacacttgcaagagtcctccatatgtgggcttaacatatgtaccactccattttagaaaaatctcattaaatgaattcttctaaaaatga

SEQ ID NO: 290228 - DNA, 2403 bp, Homo sapiens
atacccaccatcgcatttccagggagatgagagtggaaagaccctgggcgctggtaggactacaccctgggataccagtgcagaagccgtgtcctggtgcagaaaggattttggtagggagcagaggaggcagaagtctgggctctggaccagttacctgaaggcattgcgaagtttctctcccactgggtatgtccggtccttcttctcaaactcatcgtcgaagagggctggagtgcagtggtgcagtcacggatcactgcagcttggaactcctgggctcaagccatcctccggcctcaacctcctgagtagctgggactacagggatggtgatgaaggaccccagaagcgctgcctgtacacccccaaccaggctccagtgggtgccacttgtcccggcctgaagtcacagcctccagatgctgcctccctctgccaattcctatacctgctggggtggacactgagggccagtcccagacttgggagcagggtgggagtgggatgggggtggtgcgtagggaggacctctatgtggccctgattgttggctcagtttcctctgcctgggggatgggttgagatgtcccctggttgtgacagaacagaggctgcaggttctcagcccctgcaatccccaccctgcatttggaacattctgtcctggctcctgagtctgaagaaggtgcaaaatgtgtggtttggaactcctattgaatctgagcgtggctctgcctcttgcagactcagaatcttttccattctagcttcagtgtgtctgagactcattgtttgctaaggattgattccatgaatgagtgacctgccctcagtggggcccatccttgatcgtaggctctgttgttgctgtcttgaaactcaataatgtctgaacaagagacccggatctccattttgcaccgggttctgtaaattatgtagccagtctcagttcacttttagttgtctgccctttagtatctttttcatatcgaaccacgtagatgtatttttaaaaatataaaatctaagtcgcacaaaagataaaaacaaagaaggacacatttattatttgttgtgcacctttagaaatggtccacaggtccactgcagtgcacaagctgctgcatgcacaccgcacgtgacaatccagtctgcctgactcccaggacagcctgtgtgatatgcaaaatgccattcccatgagggcgcatcatgtttcccaggagctctgaaggacacagatagagcttgtgctctaggctgcccccctgttcccgtgctggctccatgctggtgtccagaatgagccagttcacactccagtgccacgtggggggagaagtggcccccaaactcccctgctgacctccccccggcccctaggtgtaccttccaagtcagatgacagtcataggctaacatccccagctttgcctggaactcaggaaaggatacttacgggtagacagaaagattctgcagtgggcatggacttggccattgaagaccctgagaggacatcttgtccaccctctccaggctaggccctgtctgtgctgcctggagccagaagaaaaagattccagccttggaatctgcagggagggagactccttgcagtgagctttcttgcatttcattctagtatttgccacagatgctgatttcttgcctgagtcatatatattgaagtttttgctcatttcttactaggcttaagaaattggaattctctgccttacaaatcccaaagggctaaacatgcctccaagcccatgaacaagctttgagcatctgaaggacaaaaccccagctcctaaaacgttcatgagcatccactttctgctcagcctggaagagaaggagcactgctgccctctggtggtcaggcagcagagcatctaggagccacccaagggagctgggtcccctttgctttgtctttgggacagcagctttgagtattaggtcaatggatgtcctttcactgttcctggaacatggcaagcttgtttttgcctcagggctttgggtcttgatgctccctctccctggaatgttctttctccagctctcaggtgacagctgctttcacattctctagccctcagaccagatgccacctcctcagggaagccctcctggaccacttcatctaaaatagcaactcatcccaccccctgtcactctatcccattaccctgtttccctttgtttatagcacttacctgctatttggaaatatctgtctagagtctgcgtctctccctcaccagatgtcggctccaggagggcagagtccctgtgttttgtttgtcactggacttcaatgcatcgtacatagtagatacgcaaaaataaacttgtcaaagaagtaaataaatgcatattgacaac

SEQ ID NO: 290229 - DNA, 1182 bp, Homo sapiens
gtggacatctgagcttgaaatataaagccaaatacaactgaagttcaaaggtggaattgaacccagataacccacctcttctctgactaataaaagagagctagtaccgcccaggagggcagagcagtgattttctgtaggcatgaaacgtgaactcatttactatccctgagataaaacagcccagccctgctcaacccacagaaaacagttgagagccctgcagaaacctggctgttgagcggcactgcaaatgaggtgagttttcatgtgtgtgtgctgaagccctcagaaatctcccagatccttattcctacaggagctgccactcctggagtaaccttgtataggttgttttcagtgtccttgtgccactcccccactccttaaagtggccacagcatgagtcccaatgaggaatcgggtgacctagtttcttgaccactaattctcccagtgatgtgtcccttcttctggccccagcctggtaggagaccatggcagagaaagctgatcccatctgcttcggggggacaatgctgccacaggtcccctccagcctctgaagacattgggtgcttttgtaaacagatgattagggtatgctctgatggggctttttaagcagcaaacccctttctttcatgcagcttcccatatgaagtaagcatgtcccacaagtggggacctggccatgggactctggtttgccattattaggacaaataggatcttagcgtgaccagagcagacactgttcaagcacgtcaaaacattaaaaaaaaaaattatccccacaaatgacttattaatgacagagaagaaaatgtacctgcaatggggcgatctggcagacacttcccaatcaagtcatcaaattcagcagcctccaaagtggggccaccagacatgatgtcctcggctcctgaagggaggcactggaagacacagcatcacttgagccatgtgctcccccaacatgcttcacctgaatctgctcctcaagagacaaccagacaagaaatccagaaagagaaactccacaacacaacagtcttggactctacaaaacattcattgtcactaattgactttctaaacgataagatgaaagagaaataacagccgggtgcagtggctcacacctgtaatcccagcactttgggaggccgaggcgggtgg

SEQ ID NO: 290230 - DNA, 790 bp, Homo sapiens
gtggacatctgagcttgaaatataaagccaaatacaactgaagttcaaaggtggaattgaacccagataacccacctcttctctgactaataaaagagagctagtaccgcccaggagggcagagcagtgattttctgtaggcatgaaacgtgaactcatttactatccctgagataaaacagcccagccctgctcaacccacagaaaacagttgagagccctgcagaaacctggctgttgagcggcactgcaaatgagcttcccatatgaagtaagcatgtcccacaagtggggacctggccatgggactctggtttgccattattaggacaaataggatcttagcgtgaccagagcagacactgttcaagcacgtcaaaacattaaaaaaaaaaattatccccacaaatgacttattaatgacagagaagaaaatgtacctgcaatggggcgatctggcagacacttcccaatcaagtcatcaaattcagcagcctccaaagtggggccaccagacatgatgtcctcggctcctgaagggaggcactggaagacacagcatcacttgagccatgtgctcccccaacatgcttcacctgaatctgctcctcaagagacaaccagacaagaaatccagaaagagaaactccacaacacaacagtcttggactctacaaaacattcattgtcactaattgactttctaaacgataagatgaaagagaaataacagccgggtgcagtggctcacacctgtaatcccagcactttgggaggccgaggcgggtgg

SEQ ID NO: 290231 - DNA, 639 bp, Homo sapiens
ggctggcacagggctcaggtacattctagatggctgtcaggtggcgggcgctttagtcacattgaatttgtcttggtggttgatttttgtccacgcccccatcagtttatcgtgttttttacctttgatcccagggcgagaaccccggctctcccctgccccacctcacccacccagagaagcacagaccccgccaggggcaggggcccaccgcacacccttgtcccgggcctgtctgggactggccttcccggctcagccagtgaggctcagaagggacacaaagagggatggaagaaaagaacaaagagaaactgttcctcccacccccttccctgatgccaggggcaccagactgattctgaggcacaaataaaagaggcttcataccggaggcttttgctacctaactttacttggggggaacgcctacggtgtgggttggggtccttctgaacctcagagtggagagagctctagggtaagaggctgcctgatggaccctgagcccaggagtgcatcgccaggtctcccaggagcctgggggtagcatttgcagaggctgggggtctcgttcccctcactcccacccatgcaggaggcacagactgaacgcttagtaaaatatttcattcagta

SEQ ID NO: 290232 - DNA, 3014 bp, Homo sapiens
cggcagatgcccggccccggcgggcagcgtggcctgcggccctggcctccgctgcagcgctcgcctggcccggaggcaatgtggacatcgagcagctggatccccgcggccggactcccctgcacctggccaccacgctggggcaccttgagtgtgcccgtgtgctcctggcgcacggcgcagacgtgggcagggagaatcgcagcggctggacaggtgggcagccctgctcaccccagccccacagccggggcctccccagcatcatagacctatggttggctgaagggtcctgccctgtgaccttgcctcgccctcccccagtgctccaggaggctgcccaggacttctacgtggagatgaaatgggagttcactagctgggtgcccctggtgtccaagatctgccctagtgacacctacaaagtgtggaagagcggccagaacctgagggtagacaccacactcctgggctttgaccacatgacctggcagcgagggaaccgcagctttgtcttcaggggccaagacacaagcgccgtggtcatggagattgaccacgaccgccgggtggtgtacacagagactctggcactggctgggcaggaccgggagctgctgctggctgctgctcagcccactgaggaacaggtgctgagccggcttaccgcgcccgtcgtcaccactcagcttgacaccaagaatatctcctttgagaggaacaagactggcatcctgggctggcgcagtgaaaagacggagatggtgaatgggtatgaagctaaggtgtatggggcatctaacgtggagctcatcacccgcacacggacagaacatctttcagaacagcacaagggcaaggtcaaaggctgtaagacacctttgcagtccttcctgggaatcgctgagcagcacgggggcccccaaaatgggaccctgatcactcagactctgagccaagccaaccccactgccatcactgcagaagaatacttcaaccccaactttgagctgggcaaccgtgatatgggccgccccatggaactgaccaccaagacacagaagttcaaggccaagctgtggctgtgtgaggagcatcccctgtccctgtgtgagcaggtggcccccatcattgacctcatggccgtcagcaatgcgctttttgccaagctccgggacttcatcaccctgcgtctgcctcctggcttcccagttaagattgaaatcccgatcttccacatcctcaacgcccgcatcaccttcgggaacctcaacggctgcgacgaaccggtgccatcggtgcgaggcagccccagcagcgagacgccttccccaggcagcgactcctccagcgtcagcagctccagctccacgacctcctgccgcggctgcgagatctccccagcgttgttcgaggccccgcgcggctacagcatgatgggcggccagcgggaggcggcgacccgggacgacgacgacgacctgctgcaattcgccatccagcagagcctgcttgaggcgggcagtgagtatgaccaggtcaccatctgggaggcgctaaccaacagcaagccaggcacccaccccatgtcctacgagggtcgccgacaggacaggagcgccccgcccacgccgcagcgccagcctgcgcccccggcgtcagtgcccagccctcggcccagctcagggccaggttccggcggccacgtgttccggagctacgacgagcagctgcggctggcgatggaactgtcggcgcaggagcaggaggagaggcggcggcgcgcgcgccaggaggaggaggagctggagcgcatcctgaggctctcactgaccgagcagtagcgccccctgccgggaccctcgccagcgccacgcgcgccacgcccagggccaggagccagacaaaccccggcctgcgcgcctgcagagcggcggctggagactggagccaccgcctcgcgggtgcagcagcacagcaggcacggttcggggagggattcggcatggccgcggggtaccttcccaggccagggccctggaggcaactggcacggcctggtccccctgctttgctgtattctgattccccaacccgctcccctgggctcagatctgtcctgtcctagggcggagccaggcggtcctgagggggagatgaatccttagaggagcgctgtccctatcccttgctccttctggccggtccgcatttctgttcactaaccccactccaggacactgcccctgaagcctttgcatctctgctcttcactcctggggggcagctgagctccccgcgtgctgtgtcactgctttgttccagacacaaaccagcacgtctagggcccagcccctcccccaccccggcatttcagcgtcaagtgcacttagcggggtacccggctcccccagcccccacacccgtcctgggtctcagggtggttccagcttctccttgggcagccagaagttggagtcccatcccccaaggcacattttttttttttttgtgatcagggagtgtgtccaacgtagccccctggcctgtgcaagccctgactccctcatggtgcctcggagagtggggagcatattgggctggggtaagcactagacccaagtagactggacacaaagggctcgcccagggccctggcgccacccccaccccttcccaccagctgctgctagcctctgtggttgtacatcccacttgcccccacacggagactgactctaaaacccttcatccaatggtgctaacccccggctctcccctgccccacctcacccacccagagaagcacagaccccgccaggggcaggggcccaccgcacacccttgtcccgggcctgtctgggactggccttcccggctcagccagtgaggctcagaagggacacaaagagggatggaagaaaagaacaaagagaaactgttcctcccacccccttccctgatgccaggggcaccagactgattctgaggcacaaataaaagaggcttcatac

SEQ ID NO: 290233 - DNA, 3263 bp, Homo sapiens
cggcagatgcccggccccggcgggcagcgtggcctgcggccctggcctccgctgcagcgctcgcctggcccggaggcaatgtggacatcgagcagctggatccccgcggccggactcccctgcacctggccaccacgctggggcaccttgagtgtgcccgtgtgctcctggcgcacggcgcagacgtgggcagggagaatcgcagcggctggacaggtgggcagccctgctcaccccagccccacagccggggcctccccagcatcatagacctatggttggctgaagggtcctgccctgtgaccttgcctcgccctcccccagtgctccaggaggctgcccaggacttctacgtggagatgaaatgggagttcactagctgggtgcccctggtgtccaagatctgccctagtgacacctacaaagtgtggaagagcggccagaacctgagggtagacaccacactcctgggctttgaccacatgacctggcagcgagggaaccgcagctttgtcttcaggggccaagacacaagcgccgtggtcatggagattgaccacgaccgccgggtggtgtacacagagactctggcactggctgggcaggaccgggagctgctgctggctgctgctcagcccactgaggaacaggtgctgagccggcttaccgcgcccgtcgtcaccactcagcttgacaccaagaatatctcctttgagaggaacaagactggcatcctgggctggcgcagtgaaaagacggagatggtgaatgggtatgaagctaaggtgtatggggcatctaacgtggagctcatcacccgcacacggacagaacatctttcagaacagcacaagggcaaggtcaaaggctgtaagacacctttgcagtccttcctgggaatcgctgagcagcacgggggcccccaaaatgggaccctgatcactcagactctgagccaagccaaccccactgccatcactgcagaagaatacttcaaccccaactttgagctgggcaaccgtgatatgggccgccccatggaactgaccaccaagacacagaagttcaaggccaagctgtggctgtgtgaggagcatcccctgtccctgtgtgagcaggtggcccccatcattgacctcatggccgtcagcaatgcgctttttgccaagctccgggacttcatcaccctgcgtctgcctcctggcttcccagttaagattgaaatcccgatcttccacatcctcaacgcccgcatcaccttcgggaacctcaacggctgcgacgaaccggtgccatcggtgcgaggcagccccagcagcgagacgccttccccaggcagcgactcctccagcgtcagcagctccagctccacgacctcctgccgcggctgcgagatctccccagcgttgttcgaggccccgcgcggctacagcatgatgggcggccagcgggaggcggcgacccgggacgacgacgacgacctgctgcaattcgccatccagcagagcctgcttgaggcgggcagtgagtatgaccaggtcaccatctgggaggcgctaaccaacagcaagccaggcacccaccccatgtcctacgagggtcgccgacaggacaggagcgccccgcccacgccgcagcgccagcctgcgcccccggcgtcagtgcccagccctcggcccagctcagggccaggttccggcggccacgtgttccggagctacgacgagcagctgcggctggcgatggaactgtcggcgcaggagcaggaggagaggcggcggcgcgcgcgccaggaggaggaggagctggagcgcatcctgaggctctcactgaccgagcagtagcgccccctgccgggaccctcgccagcgccacgcgcgccacgcccagggccaggagccagacaaaccccggcctgcgcgcctgcagagcggcggctggagactggagccaccgcctcgcgggtgcagcagcacagcaggcacggttcggggagggattcggcatggccgcggggtaccttcccaggccagggccctggaggcaactggcacggcctggtccccctgctttgctgtattctgattccccaacccgctcccctgggctcagatctgtcctgtcctagggcggagccaggcggtcctgagggggagatgaatccttagaggagcgctgtccctatcccttgctccttctggccggtccgcatttctgttcactaaccccactccaggacactgcccctgaagcctttgcatctctgctcttcactcctggggggcagctgagctccccgcgtgctgtgtcactgctttgttccagacacaaaccagcacgtctagggcccagcccctcccccaccccggcatttcagcgtcaagtgcacttagcggggtacccggctcccccagcccccacacccgtcctgggtctcagggtggttccagcttctccttgggcagccagaagttggagtcccatcccccaaggcacattttttttttttttgtgatcagggagtgtgtccaacgtagccccctggcctgtgcaagccctgactccctcatggtgcctcggagagtggggagcatattgggctggggtaagcactagacccaagtagactggacacaaagggctcgcccagggccctggcgccacccccaccccttcccaccagctgctgctagcctctgtggttgtacatcccacttgcccccacacggagactgactctaaaacccttcatccaatggtgctaacccccggctctcccctgccccacctcacccacccagagaagcacagaccccgccaggggcaggggcccaccgcacacccttgtcccgggcctgtctgggactggccttcccggctcagccagtgaggctcagaagggacacaaagagggatggaagaaaagaacaaagagaaactgttcctcccacccccttccctgatgccaggggcaccagactgattctgaggcacaaataaaagaggcttcataccggaggcttttgctacctaactttacttggggggaacgcctacggtgtgggttggggtccttctgaacctcagagtggagagagctctagggtaagaggctgcctgatggaccctgagcccaggagtgcatcgccaggtctcccaggagcctgggggtagcatttgcagaggctgggggtctcgttcccctcactcccacccatgcaggaggcacagactgaacgcttagtaaaatatttcattcagta

SEQ ID NO: 290234 - DNA, 2831 bp, Homo sapiens
tgcccgtcccgacctcaggttgctcttctgtgtgagtatggtctacactggccagggagggggttttggaggagaggctgctctctcttcagttccctcccctgttcctggccacacggatcccaaaccccatgccctgagctggtccaggccgtgtaggccagaccagtcaaagccacctccaacctccgcttccaccagtgcccctggtgtccaagatctgccctagtgacacctacaaagtgtggaagagcggccagaacctgagggtagacaccacactcctgggctttgaccacatgacctggcagcgagggaaccgcagctttgtcttcaggggccaagacacaagcgccgtggtcatggagattgaccacgaccgccgggtggtgtacacagagactctggcactggctgggcaggaccgggagctgctgctggctgctgctcagcccactgaggaacaggtgctgagccggcttaccgcgcccgtcgtcaccactcagcttgacaccaagaatatctcctttgagaggaacaagactggcatcctgggctggcgcagtgaaaagacggagatggtgaatgggtatgaagctaaggtgtatggggcatctaacgtggagctcatcacccgcacacggacagaacatctttcagaacagcacaagggcaaggtcaaaggctgtaagacacctttgcagtccttcctgggaatcgctgagcagcacgggggcccccaaaatgggaccctgatcactcagactctgagccaagccaaccccactgccatcactgcagaagaatacttcaaccccaactttgagctgggcaaccgtgatatgggccgccccatggaactgaccaccaagacacagaagttcaaggccaagctgtggctgtgtgaggagcatcccctgtccctgtgtgagcaggtggcccccatcattgacctcatggccgtcagcaatgcgctttttgccaagctccgggacttcatcaccctgcgtctgcctcctggcttcccagttaagattgaaatcccgatcttccacatcctcaacgcccgcatcaccttcgggaacctcaacggctgcgacgaaccggtgccatcggtgcgaggcagccccagcagcgagacgccttccccaggcagcgactcctccagcgtcagcagctccagctccacgacctcctgccgcggctgcgagatctccccagcgttgttcgaggccccgcgcggctacagcatgatgggcggccagcgggaggcggcgacccgggacgacgacgacgacctgctgcaattcgccatccagcagagcctgcttgaggcgggcagtgagtatgaccaggtcaccatctgggaggcgctaaccaacagcaagccaggcacccaccccatgtcctacgagggtcgccgacaggacaggagcgccccgcccacgccgcagcgccagcctgcgcccccggcgtcagtgcccagccctcggcccagctcagggccaggttccggcggccacgtgttccggagctacgacgagcagctgcggctggcgatggaactgtcggcgcaggagcaggaggagaggcggcggcgcgcgcgccaggaggaggaggagctggagcgcatcctgaggctctcactgaccgagcagtagcgccccctgccgggaccctcgccagcgccacgcgcgccacgcccagggccaggagccagacaaaccccggcctgcgcgcctgcagagcggcggctggagactggagccaccgcctcgcgggtgcagcagcacagcaggcacggttcggggagggattcggcatggccgcggggtaccttcccaggccagggccctggaggcaactggcacggcctggtccccctgctttgctgtattctgattccccaacccgctcccctgggctcagatctgtcctgtcctagggcggagccaggcggtcctgagggggagatgaatccttagaggagcgctgtccctatcccttgctccttctggccggtccgcatttctgttcactaaccccactccaggacactgcccctgaagcctttgcatctctgctcttcactcctggggggcagctgagctccccgcgtgctgtgtcactgctttgttccagacacaaaccagcacgtctagggcccagcccctcccccaccccggcatttcagcgtcaagtgcacttagcggggtacccggctcccccagcccccacacccgtcctgggtctcagggtggttccagcttctccttgggcagccagaagttggagtcccatcccccaaggcacattttttttttttttgtgatcagggagtgtgtccaacgtagccccctggcctgtgcaagccctgactccctcatggtgcctcggagagtggggagcatattgggctggggtaagcactagacccaagtagactggacacaaagggctcgcccagggccctggcgccacccccaccccttcccaccagctgctgctagcctctgtggttgtacatcccacttgcccccacacggagactgactctaaaacccttcatccaatggtgctaacccccggctctcccctgccccacctcacccacccagagaagcacagaccccgccaggggcaggggcccaccgcacacccttgtcccgggcctgtctgggactggccttcccggctcagccagtgaggctcagaagggacacaaagagggatggaagaaaagaacaaagagaaactgttcctcccacccccttccctgatgccaggggcaccagactgattctgaggcacaaataaaagaggcttcatac

SEQ ID NO: 290235 - DNA, 1602 bp, Homo sapiens
gactctccccaggcattgacggggagaacttggtagggtctgggctccgccacgaccaggtgggggccaggacgccgcgggactgaccgcctccactagagggtggtggccgcgggccgccctggagcctccacgccgtgtcccggccccggccggtgggtgggtgcgcccgggagcccgcgacattccttccccacccccaggagcgccccgcccacgccgcagcgccagcctgcgcccccggcgtcagtgcccagccctcggcccagctcagggccaggttccggcggccacgtgttccggagctacgacgagcagctgcggctggcgatggaactgtcggcgcaggagcaggaggagaggcggcggcgcgcgcgccaggaggaggaggagctggagcgcatcctgaggctctcactgaccgagcagtagcgccccctgccgggaccctcgccagcgccacgcgcgccacgcccagggccaggagccagacaaaccccggcctgcgcgcctgcagagcggcggctggagactggagccaccgcctcgcgggtgcagcagcacagcaggcacggttcggggagggattcggcatggccgcggggtaccttcccaggccagggccctggaggcaactggcacggcctggtccccctgctttgctgtattctgattccccaacccgctcccctgggctcagatctgtcctgtcctagggcggagccaggcggtcctgagggggagatgaatccttagaggagcgctgtccctatcccttgctccttctggccggtccgcatttctgttcactaaccccactccaggacactgcccctgaagcctttgcatctctgctcttcactcctggggggcagctgagctccccgcgtgctgtgtcactgctttgttccagacacaaaccagcacgtctagggcccagcccctcccccaccccggcatttcagcgtcaagtgcacttagcggggtacccggctcccccagcccccacacccgtcctgggtctcagggtggttccagcttctccttgggcagccagaagttggagtcccatcccccaaggcacattttttttttttttgtgatcagggagtgtgtccaacgtagccccctggcctgtgcaagccctgactccctcatggtgcctcggagagtggggagcatattgggctggggtaagcactagacccaagtagactggacacaaagggctcgcccagggccctggcgccacccccaccccttcccaccagctgctgctagcctctgtggttgtacatcccacttgcccccacacggagactgactctaaaacccttcatccaatggtgctaacccccggctctcccctgccccacctcacccacccagagaagcacagaccccgccaggggcaggggcccaccgcacacccttgtcccgggcctgtctgggactggccttcccggctcagccagtgaggctcagaagggacacaaagagggatggaagaaaagaacaaagagaaactgttcctcccacccccttccctgatgccaggggcaccagactgattctgaggcacaaataaaagaggcttcatac

SEQ ID NO: 290236 - DNA, 813 bp, Homo sapiens
ccaggaaggggacggcgtcctgaaagggacatttgaaaaacggaggcaacgcgtctattaattaggtggcggcgcctggggtcgcagcactccagaggctgagagtctcgcccttttgcctagtggaggagctcggctcactgcaagctccgcgccacaacccccctgccgccccaggttcaagagattctcctgcctcagtctcccgagtagactgggattacagaatgctggggtggaagagttcccagttttaaaggagaagtacaagaagacctgtaattgttagcaagatatacagaacacagtgcacacagcagcgcacttctcaagtcaggtcctccaagatgctcggcatgggctgaggcgcctcctcctcctccttactgcccagttcatcgcctgtgaggggtggccagaggggtcctcggacaactcaacaagggagatggtcagaacgatcaagcgacctctccaaggcggggactgaagcgtcaggtctcacctgctccaacatctcctgcatcctctgccacacgcggcatgctctccatggagatactcagcgtactcgtctctccatttgtagatactgcagccactccatcacctgcgagaattgacacagaagttaggaagggctgtcactggtcctcacatactcctggccacctggggtcatcttccttccacgtccctccctctgcaaagcctcacgtgccccaggtatgcttccagctgtgcccgctcctccatggcctgctgtaactgctggttagcatccagggctttgcagcatctagacaactggat

SEQ ID NO: 290237 - DNA, 736 bp, Homo sapiens
  misc_feature (1)..(1): n is a, c, g, or t
naatcttcggctaggtacgaggcctgggtgtcgctgagtcatctttgcctgctcccaggcgcagcagctggaatgggtgaagagccgctaccctggcctgtactcccgcatccaggagtttgcgtgccgtgggcagtttgtgcctgtggggggcacctgggtggagatggatgggaacctgcccagtggagaggccatggtgaggcagtttttgcagggccagaacttctttctgcaggagtttgggaagatgtgctctgagttctggctgccggacacctttggctactcagcacagctcccccagatcatgcacggctgtggcatcaggcgctttctcacccagaaattgagctggaatttggtgaactccttcccacaccatacatttttctgggagggcctggatggctcccgtgtactggtccacttcccacctggcgactcctatgggatgcagggcagcgtggaggaggtgctgaagaccgtggccaacaaccgggacaaggggcgggccaaccacagtgccttcctctttggctttggggatgggggtggtggccccacccagaccatgctggaccgcctgaagcgcctgagcaatacggatgggctgccagggtgcagctatcttctcccaagacagctcttctcagcactggggagtgactccagagcagtgtgcccgttggttgggggggcctcttggggctggccatggggattccccctttca

SEQ ID NO: 290238 - DNA, 7474 bp, Homo sapiens
  misc_feature (108)..(108): n is a, c, g, or t
  misc_feature (118)..(118): n is a, c, g, or t
  misc_feature (126)..(126): n is a, c, g, or t
  misc_feature (129)..(129): n is a, c, g, or t
  misc_feature (132)..(135): n is a, c, g, or t
tataagataaaacaaatcatgcatcattttattccagattgctcttgcccaaagaggtgatctctcagatgtggaggaagaggaagaagaagagatggatgtagatgnagccacaggngcagttangangcnnnntggtgttgggggcagtccccctaagtccaagttactgtttagtaacacagcagctcaaaaattaagaggaatggatgaagtatacaacctcttctatgtcaacaacaactggtatatttttatgcgactgcaccagattctctgcctgaggctgctacggatttgttcccaagccgaacggcaaattgaagaagaaaaccgagagagagaatgggaacgggaagtgctgggcataaagcgagacaagagtgacagccctgccattcagctacgtctcaaagaacctatggatgttgatgtagaagattattacccagctttcctggacatggtgcggagcctgctggatggcaacatagactcatcacagtatgaagattcactgagagagatgttcaccattcatgcctacattgcctttaccatggacaaactgatccagagcattgtcagacagctgcagcatatcgtgagtgatgagatctgtgtgcaggtgactgacctttacctggcagaaaataataatggggccaccggaggccagctgaacacacagaactcaaggagcctcctggagtcaacgtatcagcggaaagctgagcagctaatgtcagatgagaattgctttaagcttatgtttattcagagccaaggccaggtccagctgactattgagcttctggacacagaagaggagaattcggatgaccctgtggaagcagagcgctggtcagactacgtggagcgatacatgaattcagatactacctcgcctgagcttcgtgaacatctagcacagaaaccagtatttctccccaggaatctacggcggatccggaagtgtcaacgtggtcgagagcagcaggaaaaggaagggaaggaaggaaacagcaagaagaccatggagaatgtggatagtctggataagctggagtgtagattcaagctgaattcctacaagatggtgtatgtgatcaaatcagaggactatatgtatcggaggaccgccctgctccgggctcatcagtcccatgagcgtgtaagcaagcgtctacatcagagattccaggcctgggtagataaatggaccaaggagcatgtgccccgtgaaatggcagcagagaccagcaagtggctcatgggtgaggggctggagggcctggtgccctgtaccaccacctgtgatacagagaccctgcattttgtgagcattaacaagtatcgtgtcaaatacggcacagtattcaaagccccttaactgcaaagccagagcagataacttggggtgtgtgtggggatgtgtgtgtgggcctatgcactcacacactgaagaaacaaggaagatgcctttcaagcctcactgggcctctctgggacatggccacctgacctgtgtgtggctggtgcagcctggcaccaagtgggctacctgttaggaacatgaataccttacaaagctgaagctggaacttttcccaaagggttttgggtatagcctgccctggaggggaaggaagtccatgcaagcaaagacatgcagtttgcttgcacacaccagcagagctaagactggagtctcctgtggcctaactttcaatgagggaaccggatgctgttcacactttgactggatggagatgcatttacaaaacagactggagaaggacttaatactcagatggattggaactatcatggtcactgctcctctcccctccccacaaaaggaaaaaaaagctggatttgattttttttttctggtcactcgagcacatctaagatcacccattaggttttatctgggacctgcagtttggctttgggattgatcatcttgtggattttattcctgacgattcccttgctgcctacccttttctctcctctggttctcaacctcaacgagttcaaatcagttgtcctttttagctcccgtggaactgttttgtatctgcctctttactagtctaccttagtgccatccaccagctttactctctgacacacacacgcacacacacacacaattttaacttgtttttttgtacataatgtacatactgtcaattttttattaaaagaaatatgctttgatgtgctagcataactgctctagcttcttgtgtaccatagtactgtggcttcagatttagtacctatgaacagatgtacaagacatttattacactttttaccaaagggagttaccattgtagtacttttgtgtaaaacttgtcttcccctttgcccccaactttttttttttttttttgtaaataaataaagcttggttcttacttaaggaataaactctcaacccacgtcccttgtcctcaccagaaaatactgtgaagcagggattttgacttcagttccttatccagggtagaaacaggattttgcttaaaatacttgttacttgtcccaaatcaaaatattccaaaatcttagaatacttaagtcttttagtacgtgtttttttcccttgttcaaataatctgaaaatattttatatttgggtaagttgtcaagctatgtagtttgtatttctatatattttttcttattcacattggtgatggatgggggtgagcaacttaaataccaaaccagtgtttgaaaaaaaagtgtgcataaggcatgtggtataccttataaatggagttgggagggagagaatttgaaatgggatacctatttttttaattacataaatttaaactagcagacatttaaacatgaatgattaggatttttctatgtggttaacctggactttctgaacaaagaccaactgagcccctcccagtactctggtggatttttcttcagcaaccattacgcaagtcttagttgtaaccagcaatgttctgtgtgttttatgtttgctttttagttaaaaatcaccaccaccaccaaaaagaaaaacaaaattttttggctcctggattttcaaaacacatggtagacctctctgattttaggcttttattgtttaaagacagtgtctcgctttatgacccacactggagtgcagtgccacgatcatagctcactgcaggcttgacctcccaggctcaagcagtcctcccacctcggcctcctgagtagctgcatgccaccacgcccagctaattttttaactttttgtagagacagggtcttgctatgctgcccaggttggtctcaaactcctggcctcaagctgtcctcccacctcggcctcgcaaagtgctgagattacaggtgtgagccaccctggcctgattttaggctttttttgtactggggagaagagactgtgagccaaagtgtagggtgccaaaaagagctttgtgggatgagattttagggcaaagctggggcagtgtctgacttggcggtggtcatgtgtactgatttaggggaaagatcttgaggttttctcaaataattcacctatccccgtgttccctcaagaaaggtcatgttgacctggaaccataggggaaattggtggggtgtgatcagggtcagccccagctgttgctgcccctgcagtgttttgtccagagcacttgcctgcaggtcaggataggatttcaaggccagttcaggagaaagtcccaacccaccagtgcaaccaacaaaagagtaagttttacctacagcctgggttttcacaagtagcatttttattcctcctgctgtctgacatctgagctccaagctctaaacccaacctgtattatatgcagcagcaggttatctttgttttaaatcacatttgttattctgtacttagtcacctttccgtgtgatctgcatttgaaatgttgtaaacttggtcagtatttccattaaaatatcagggctaatcttgtgtatttttttttgttcctaatgattttatagacaaagactcttggcaaccccaggagaaaaaaaataaagctgtcagtggagtactagggatgagaatgaaactggaggtctgtttctggtattatggcttcccgggactctacagtcctgtatggtgaaatacatttttccattgggatcgtcaatgccatgactgttctgccacctcaaactccagagtttctggtgatgtgcaagagttagcaatatacattcagtaaagcgtgtaatcgagtaagtcgtagtaacttgggcgtaaagctctaccaccctgctcactaacaccctgatctccgtccggtatgaaaacacctattccgggtagtctggctccacgttaagcaaacaccactttccgtgttcaccgacagctagagccagaggtctcccggttgctgcttctgaggctgggtctgcagcagctgaggctcccgcctgtcttgccgaatggcctaagtctctgtcttgagactttcgagagttctaatcgtcaaatttcccattttattttgagattttccctgcggcccactatttcggacaacataggagagcctcaaaaacagtttctagcttccaactcggctcaaagttcagacagcagctgggcttccgagagccgccggtgttccaagaaaagctgcccgggactgggaggcgccctctggacgccggaacctttggtttcctgccgtggagcggaacggtagcgccaggggccttccggaaagaggagcgagagcccggcgatggcggctgcgccggccttgaagcactggcgcaccacgctggagcgggtggagaagttcgtgtcgccgctctactttaccgactgtaacctccgcggcaggtgtggcccctggtcccccgcagccggccgaccgcaaccgtgcgcctcaagctttccttccggggagaaacctaagctgcagccacccgggccgcgggacaaagtgcccgccgcgggcagggcaggggccggggaggagggggtagggaatggactgtgccgcggagcggccaggcagccctcttggcggaggatccagggaaagtgcggccccaccggccagctggcccccaggcggaaacggggcggcctccagcatgtgcccaccggcccgtcccacgcaggctttttggggccagctgccctgtggctgtgctctccagcttcctgacgccggagagacttccctaccaggaggcagtccagcgggacttccgccccgcgcaggtcggcgacagcttcggacccacatggtggacctgctggttccgggtggagctgaccatcccagaggcatgggtgggccaggaagttcacctttgctgggaaagtgatggagaaggtctggtgtggcgtgatggagaacctgtccagggtttaaccaaagagggtgagaagaccagctatgtcctgactgacaggctgggggaaagagacccccgaaggctggagtgcaatggcacgatctcggctcactgcgaccgccgcctcccaggttcaagcaattctcctgcctcagcctccctactagctgagattacagcctcactctctatgtggaagtagcctgcaatgggctcctgggggccgggaagggaagcatgattgcagcccctgaccctgagaagatgttccagctgagccgggctgagctagctgtgttccaccgggatgtccacatgctcctggtggatctggagctgctgctgggcatagccaagggcctcgggaaggacaaccagcgcagcttccaggccctgtacacagccaatcagatggtgaacgtgtgtgaccctgcccagcccgagaccttcccagtggcccaggccctggcctccaggttctttggccaacatgggggtgaaagccaacacaccattcatgccacagggcactgccacattgatacagcctggctttggcccttcaaagagactgtgaggaaatgtgcccggagctgggtgaccgccctgcagctcatggagcggaaccctgagttcatctttgcctgctcccaggcgcagcagctggaatgggtgaagagccgctaccctggcctgtactcccgcatccaggagtttgcgtgccgtgggcagtttgtgcctgtggggggcacctgggtggagatggatgggaacctgcccagtggagaggccatggtgaggcagtttttgcagggccagaacttctttctgcaggagtttgggaagatgtgctctgagttctgggctgccggaacctttggtacttcggacagtccccccgatctggccggtgttggcttgggggttttcaccagaatgggcggattggggagtcttcccgccgacttttttgggaggccggtgtccggtttggccaccccggcaacaaagcacagcacgagagcggttagaacggcaaacgaaagggggccaggcacttatgggggggcccaagcagctcatacgacgctatttcttctttgttgctactcccttgttgcttctctaataacaacaagactaaatacaagacaacgaacagtaaagcacacaaaaaaaaagacaccagaagcaactaactaagacaacaaaacgacaaacaaacacaggcaaggcgacgagaccagacccacaaaaacaggacagacaggcagcgaggacagcagcgcaagaactgaaggcgacaggcagaagggcagcgcgagctaaccgaggaagcgcgcgaggccaccggcagagcgaggggagagacaggaggagatgcgcgcacagcagaaaagaacacgcgcgagaagagcggcctgacagacagaagcagaagggagagagaagacgaaaggacagcagggtagacagagagacgaagcagaacaacagggcaccgcagacaacggaaggggagcaagagacgagtaacgagggaggagacgcagagggagggcgaggcagacagacccaggcgggacgaagcgcgcgaagggaggcgcgagaggagccagaggaaagcagagggagcgaacgggcgaagcaagagagcaaggcaggacaggcgcgggacagggcgcggcagggcagcaagaagagaagagcgacagggaggcagcgacagagcacggaggcaacagcagcgaagcagagcaggaggagtgaaacgcaaggcaaagagacgaagagggaggccgagcaacgtaggcaggagagagcggcgggacactggagggaggagagagagacgggggcggagaaggagcagagagggagaggggagcgagaagagaggacagacgaagcgggcccaggaagaacgagaggcaacagacagaagggagagcagaagagccgagacacgagggcagaggaaaggagcacgcaagcgcgggagagaggcgagagagccgagaacaggagaaggcaggcacgagagaagcaagaggaggaagag

SEQ ID NO: 290239 - DNA, 7043 bp, Homo sapiens
  misc_feature (108)..(108): n is a, c, g, or t
  misc_feature (118)..(118): n is a, c, g, or t
  misc_feature (126)..(126): n is a, c, g, or t
  misc_feature (129)..(129): n is a, c, g, or t
  misc_feature (132)..(135): n is a, c, g, or t
tataagataaaacaaatcatgcatcattttattccagattgctcttgcccaaagaggtgatctctcagatgtggaggaagaggaagaagaagagatggatgtagatgnagccacaggngcagttangangcnnnntggtgttgggggcagtccccctaagtccaagttactgtttagtaacacagcagctcaaaaattaagaggaatggatgaagtatacaacctcttctatgtcaacaacaactggtatatttttatgcgactgcaccagattctctgcctgaggctgctacggatttgttcccaagccgaacggcaaattgaagaagaaaaccgagagagagaatgggaacgggaagtgctgggcataaagcgagacaagagtgacagccctgccattcagctacgtctcaaagaacctatggatgttgatgtagaagattattacccagctttcctggacatggtgcggagcctgctggatggcaacatagactcatcacagtatgaagattcactgagagagatgttcaccattcatgcctacattgcctttaccatggacaaactgatccagagcattgtcagacagctgcagcatatcgtgagtgatgagatctgtgtgcaggtgactgacctttacctggcagaaaataataatggggccaccggaggccagctgaacacacagaactcaaggagcctcctggagtcaacgtatcagcggaaagctgagcagctaatgtcagatgagaattgctttaagcttatgtttattcagagccaaggccaggtccagctgactattgagcttctggacacagaagaggagaattcggatgaccctgtggaagcagagcgctggtcagactacgtggagcgatacatgaattcagatactacctcgcctgagcttcgtgaacatctagcacagaaaccagtatttctccccaggaatctacggcggatccggaagtgtcaacgtggtcgagagcagcaggaaaaggaagggaaggaaggaaacagcaagaagaccatggagaatgtggatagtctggataagctggagtgtagattcaagctgaattcctacaagatggtgtatgtgatcaaatcagaggactatatgtatcggaggaccgccctgctccgggctcatcagtcccatgagcgtgtaagcaagcgtctacatcagagattccaggcctgggtagataaatggaccaaggagcatgtgccccgtgaaatggcagcagagaccagcaagtggctcatgggtgaggggctggagggcctggtgccctgtaccaccacctgtgatacagagaccctgcattttgtgagcattaacaagtatcgtgtcaaatacggcacagtattcaaagccccttaactgcaaagccagagcagataacttggggtgtgtgtggggatgtgtgtgtgggcctatgcactcacacactgaagaaacaaggaagatgcctttcaagcctcactgggcctctctgggacatggccacctgacctgtgtgtggctggtgcagcctggcaccaagtgggctacctgttaggaacatgaataccttacaaagctgaagctggaacttttcccaaagggttttgggtatagcctgccctggaggggaaggaagtccatgcaagcaaagacatgcagtttgcttgcacacaccagcagagctaagactggagtctcctgtggcctaactttcaatgagggaaccggatgctgttcacactttgactggatggagatgcatttacaaaacagactggagaaggacttaatactcagatggattggaactatcatggtcactgctcctctcccctccccacaaaaggaaaaaaaagctggatttgattttttttttctggtcactcgagcacatctaagatcacccattaggttttatctgggacctgcagtttggctttgggattgatcatcttgtggattttattcctgacgattcccttgctgcctacccttttctctcctctggttctcaacctcaacgagttcaaatcagttgtcctttttagctcccgtggaactgttttgtatctgcctctttactagtctaccttagtgccatccaccagctttactctctgacacacacacgcacacacacacacaattttaacttgtttttttgtacataatgtacatactgtcaattttttattaaaagaaatatgctttgatgtgctagcataactgctctagcttcttgtgtaccatagtactgtggcttcagatttagtacctatgaacagatgtacaagacatttattacactttttaccaaagggagttaccattgtagtacttttgtgtaaaacttgtcttcccctttgcccccaactttttttttttttttttgtaaataaataaagcttggttcttacttaaggaataaactctcaacccacgtcccttgtcctcaccagaaaatactgtgaagcagggattttgacttcagttccttatccagggtagaaacaggattttgcttaaaatacttgttacttgtcccaaatcaaaatattccaaaatcttagaatacttaagtcttttagtacgtgtttttttcccttgttcaaataatctgaaaatattttatatttgggtaagttgtcaagctatgtagtttgtatttctatatattttttcttattcacattggtgatggatgggggtgagcaacttaaataccaaaccagtgtttgaaaaaaaagtgtgcataaggcatgtggtataccttataaatggagttgggagggagagaatttgaaatgggatacctatttttttaattacataaatttaaactagcagacatttaaacatgaatgattaggatttttctatgtggttaacctggactttctgaacaaagaccaactgagcccctcccagtactctggtggatttttcttcagcaaccattacgcaagtcttagttgtaaccagcaatgttctgtgtgttttatgtttgctttttagttaaaaatcaccaccaccaccaaaaagaaaaacaaaattttttggctcctggattttcaaaacacatggtagacctctctgattttaggcttttattgtttaaagacagtgtctcgctttatgacccacactggagtgcagtgccacgatcatagctcactgcaggcttgacctcccaggctcaagcagtcctcccacctcggcctcctgagtagctgcatgccaccacgcccagctaattttttaactttttgtagagacagggtcttgctatgctgcccaggttggtctcaaactcctggcctcaagctgtcctcccacctcggcctcgcaaagtgctgagattacaggtgtgagccaccctggcctgattttaggctttttttgtactggggagaagagactgtgagccaaagtgtagggtgccaaaaagagctttgtgggatgagattttagggcaaagctggggcagtgtctgacttggcggtggtcatgtgtactgatttaggggaaagatcttgaggttttctcaaataattcacctatccccgtgttccctcaagaaaggtcatgttgacctggaaccataggggaaattggtggggtgtgatcagggtcagccccagctgttgctgcccctgcagtgttttgtccagagcacttgcctgcaggtcaggataggatttcaaggccagttcaggagaaagtcccaacccaccagtgcaaccaacaaaagagtaagttttacctacagcctgggttttcacaagtagcatttttattcctcctgctgtctgacatctgagctccaagctctaaacccaacctgtattatatgcagcagcaggttatctttgttttaaatcacatttgttattctgtacttagtcacctttccgtgtgatctgcatttgaaatgttgtaaacttggtcagtatttccattaaaatatcagggctaatcttgtgtatttttttttgttcctaatgattttatagacaaagactcttggcaaccccaggagaaaaaaaataaagctgtcagtggagtactagggatgagaatgaaactggaggtctgtttctggtattatggcttcccgggactctacagtcctgtatggtgaaatacatttttccattgggatcgtcaatgccatgactgttctgccacctcaaactccagagtttctggtgatgtgcaagagttagcaatatacattcagtaaagcgtgtaatcgagtaagtcgtagtaacttgggcgtaaagctctaccaccctgctcactaacaccctgatctccgtccggtatgaaaacacctattccgggtagtctggctccacgttaagcaaacaccactttccgtgttcaccgacagctagagccagaggtctcccggttgctgcttctgaggctgggtctgcagcagctgaggctcccgcctgtcttgccgaatggcctaagtctctgtcttgagactttcgagagttctaatcgtcaaatttcccattttattttgagattttccctgcggcccactatttcggacaacataggagagcctcaaaaacagtttctagcttccaactcggctcaaagttcagacagcagctgggcttccgagagccgccggtgttccaagaaaagctgcccgggactgggaggcgccctctggacgccggaacctttggtttcctgccgtggagcggaacggtagcgccaggggccttccggaaagaggagcgagagcccggcgatggcggctgcgccggccttgaagcactggcgcaccacgctggagcgggtggagaagttcgtgtcgccgctctactttaccgactgtaacctccgcggcaggtgtggcccctggtcccccgcagccggccgaccgcaaccgtgcgcctcaagctttccttccggggagaaacctaagctgcagccacccgggccgcgggacaaagtgcccgccgcgggcagggcaggggccggggaggagggggtagggaatggactgtgccgcggagcggccaggcagccctcttggcggaggatccagggaaagtgcggccccaccggccagctggcccccaggcggaaacggggcggcctccagcatgtgcccaccggcccgtcccacgcaggctttttggggccagctgccctgtggctgtgctctccagcttcctgacgccggagagacttccctaccaggaggcagtccagcgggacttccgccccgcgcaggtcggcgacagcttcggacccacatggtggacctgctggttccgggtggagctgaccatcccagaggcatgggtgggccaggaagttcacctttgctgggaaagtgatggagaaggtctggtgtggcgtgatggagaacctgtccagggtttaaccaaagagggtgagaagaccagctatgtcctgactgacaggctgggggaaagagacccccgaaggctggagtgcaatggcacgatctcggctcactgcgaccgccgcctcccaggttcaagcaattctcctgcctcagcctccctactagctgagattacagcctcactctctatgtggaagtagcctgcaatgggctcctgggggccgggaagggaagcatgattgcagcccctgaccctgagaagatgttccagctgagccgggctgagctagctgtgttccaccgggatgtccacatgctcctggtggatctggagctgctgctgggcatagccaagggcctcgggaaggacaaccagcgcagcttccaggccctgtacacagccaatcagatggtgaacgtgtgtgaccctgcccagcccgagaccttcccagtggcccaggccctggcctccaggttctttggccaacatgggggtgaaagccaacacaccattcatgccacagggcactgccacattgatacagcctggctttggcccttcaaagagactgtgaggaaatgtgcccggagctgggtgaccgccctgcagctcatggagcggaaccctgagttcatctttgcctgctcccaggcgcagcagctggaatgggtgaagagccgctaccctggcctgtactcccgcatccaggagtttgcgtgccgtgggcagtttgtgcctgtggggggcacctgggtggagatggatgggaacctgcccagtggagaggccatggtgaggcagtttttgcagggccagaacttctttctgcaggagtttgggaagatgtgctctgagttctggctgccggacacctttggctactcagcacagctcccccagatcatgcacggctgtggcatcaggcgctttctcacccagaaattgagctggaatttggtgaactccttcccacaccatacatttttctgggagggcctggatggctcccgtgtactggtccacttcccacctggcgactcctatgggatgcagggcagcgtggaggaggtgctgaagaccgtggccaacaaccgggacaaggggcgggccaaccacagtgccttcctctttggctttggggatgggggtggtggccccacccagaccatgctggaccgcctgaagcgcctgagcaatacggatgggctgcccagatcaagaaggggaaccgggaatgtgagcggatcctgcacgacgtggagctgctcagtagcctggccctggccgcagtgcccagttcctatacccagcagcccagctgcagcacctctggaggctccttcttctgaaccagttccatgatgtggtgactggaagctgcatccagatggtggcaagaggaagcccatgttgccattattgaagacatccgttccacattggcaatacaactgtcaggcgctggaggccgcagcctgtgttgcctggggaggccagtcctgaagggcctcctcatcggtcaaaacaactggcccttgggagcggatcgaaattgattgggcgcttggcccaaacgggggggggggcccacaaagcttaagaaagcctgtgtggggccggcaggggcc

SEQ ID NO: 290240 - DNA, 7190 bp, Homo sapiens
  misc_feature (108)..(108): n is a, c, g, or t
  misc_feature (118)..(118): n is a, c, g, or t
  misc_feature (126)..(126): n is a, c, g, or t
  misc_feature (129)..(129): n is a, c, g, or t
  misc_feature (132)..(135): n is a, c, g, or t
tataagataaaacaaatcatgcatcattttattccagattgctcttgcccaaagaggtgatctctcagatgtggaggaagaggaagaagaagagatggatgtagatgnagccacaggngcagttangangcnnnntggtgttgggggcagtccccctaagtccaagttactgtttagtaacacagcagctcaaaaattaagaggaatggatgaagtatacaacctcttctatgtcaacaacaactggtatatttttatgcgactgcaccagattctctgcctgaggctgctacggatttgttcccaagccgaacggcaaattgaagaagaaaaccgagagagagaatgggaacgggaagtgctgggcataaagcgagacaagagtgacagccctgccattcagctacgtctcaaagaacctatggatgttgatgtagaagattattacccagctttcctggacatggtgcggagcctgctggatggcaacatagactcatcacagtatgaagattcactgagagagatgttcaccattcatgcctacattgcctttaccatggacaaactgatccagagcattgtcagacagctgcagcatatcgtgagtgatgagatctgtgtgcaggtgactgacctttacctggcagaaaataataatggggccaccggaggccagctgaacacacagaactcaaggagcctcctggagtcaacgtatcagcggaaagctgagcagctaatgtcagatgagaattgctttaagcttatgtttattcagagccaaggccaggtccagctgactattgagcttctggacacagaagaggagaattcggatgaccctgtggaagcagagcgctggtcagactacgtggagcgatacatgaattcagatactacctcgcctgagcttcgtgaacatctagcacagaaaccagtatttctccccaggaatctacggcggatccggaagtgtcaacgtggtcgagagcagcaggaaaaggaagggaaggaaggaaacagcaagaagaccatggagaatgtggatagtctggataagctggagtgtagattcaagctgaattcctacaagatggtgtatgtgatcaaatcagaggactatatgtatcggaggaccgccctgctccgggctcatcagtcccatgagcgtgtaagcaagcgtctacatcagagattccaggcctgggtagataaatggaccaaggagcatgtgccccgtgaaatggcagcagagaccagcaagtggctcatgggtgaggggctggagggcctggtgccctgtaccaccacctgtgatacagagaccctgcattttgtgagcattaacaagtatcgtgtcaaatacggcacagtattcaaagccccttaactgcaaagccagagcagataacttggggtgtgtgtggggatgtgtgtgtgggcctatgcactcacacactgaagaaacaaggaagatgcctttcaagcctcactgggcctctctgggacatggccacctgacctgtgtgtggctggtgcagcctggcaccaagtgggctacctgttaggaacatgaataccttacaaagctgaagctggaacttttcccaaagggttttgggtatagcctgccctggaggggaaggaagtccatgcaagcaaagacatgcagtttgcttgcacacaccagcagagctaagactggagtctcctgtggcctaactttcaatgagggaaccggatgctgttcacactttgactggatggagatgcatttacaaaacagactggagaaggacttaatactcagatggattggaactatcatggtcactgctcctctcccctccccacaaaaggaaaaaaaagctggatttgattttttttttctggtcactcgagcacatctaagatcacccattaggttttatctgggacctgcagtttggctttgggattgatcatcttgtggattttattcctgacgattcccttgctgcctacccttttctctcctctggttctcaacctcaacgagttcaaatcagttgtcctttttagctcccgtggaactgttttgtatctgcctctttactagtctaccttagtgccatccaccagctttactctctgacacacacacgcacacacacacacaattttaacttgtttttttgtacataatgtacatactgtcaattttttattaaaagaaatatgctttgatgtgctagcataactgctctagcttcttgtgtaccatagtactgtggcttcagatttagtacctatgaacagatgtacaagacatttattacactttttaccaaagggagttaccattgtagtacttttgtgtaaaacttgtcttcccctttgcccccaactttttttttttttttttgtaaataaataaagcttggttcttacttaaggaataaactctcaacccacgtcccttgtcctcaccagaaaatactgtgaagcagggattttgacttcagttccttatccagggtagaaacaggattttgcttaaaatacttgttacttgtcccaaatcaaaatattccaaaatcttagaatacttaagtcttttagtacgtgtttttttcccttgttcaaataatctgaaaatattttatatttgggtaagttgtcaagctatgtagtttgtatttctatatattttttcttattcacattggtgatggatgggggtgagcaacttaaataccaaaccagtgtttgaaaaaaaagtgtgcataaggcatgtggtataccttataaatggagttgggagggagagaatttgaaatgggatacctatttttttaattacataaatttaaactagcagacatttaaacatgaatgattaggatttttctatgtggttaacctggactttctgaacaaagaccaactgagcccctcccagtactctggtggatttttcttcagcaaccattacgcaagtcttagttgtaaccagcaatgttctgtgtgttttatgtttgctttttagttaaaaatcaccaccaccaccaaaaagaaaaacaaaattttttggctcctggattttcaaaacacatggtagacctctctgattttaggcttttattgtttaaagacagtgtctcgctttatgacccacactggagtgcagtgccacgatcatagctcactgcaggcttgacctcccaggctcaagcagtcctcccacctcggcctcctgagtagctgcatgccaccacgcccagctaattttttaactttttgtagagacagggtcttgctatgctgcccaggttggtctcaaactcctggcctcaagctgtcctcccacctcggcctcgcaaagtgctgagattacaggtgtgagccaccctggcctgattttaggctttttttgtactggggagaagagactgtgagccaaagtgtagggtgccaaaaagagctttgtgggatgagattttagggcaaagctggggcagtgtctgacttggcggtggtcatgtgtactgatttaggggaaagatcttgaggttttctcaaataattcacctatccccgtgttccctcaagaaaggtcatgttgacctggaaccataggggaaattggtggggtgtgatcagggtcagccccagctgttgctgcccctgcagtgttttgtccagagcacttgcctgcaggtcaggataggatttcaaggccagttcaggagaaagtcccaacccaccagtgcaaccaacaaaagagtaagttttacctacagcctgggttttcacaagtagcatttttattcctcctgctgtctgacatctgagctccaagctctaaacccaacctgtattatatgcagcagcaggttatctttgttttaaatcacatttgttattctgtacttagtcacctttccgtgtgatctgcatttgaaatgttgtaaacttggtcagtatttccattaaaatatcagggctaatcttgtgtatttttttttgttcctaatgattttatagacaaagactcttggcaaccccaggagaaaaaaaataaagctgtcagtggagtactagggatgagaatgaaactggaggtctgtttctggtattatggcttcccgggactctacagtcctgtatggtgaaatacatttttccattgggatcgtcaatgccatgactgttctgccacctcaaactccagagtttctggtgatgtgcaagagttagcaatatacattcagtaaagcgtgtaatcgagtaagtcgtagtaacttgggcgtaaagctctaccaccctgctcactaacaccctgatctccgtccggtatgaaaacacctattccgggtagtctggctccacgttaagcaaacaccactttccgtgttcaccgacagctagagccagaggtctcccggttgctgcttctgaggctgggtctgcagcagctgaggctcccgcctgtcttgccgaatggcctaagtctctgtcttgagactttcgagagttctaatcgtcaaatttcccattttattttgagattttccctgcggcccactatttcggacaacataggagagcctcaaaaacagtttctagcttccaactcggctcaaagttcagacagcagctgggcttccgagagccgccggtgttccaagaaaagctgcccgggactgggaggcgccctctggacgccggaacctttggtttcctgccgtggagcggaacggtagcgccaggggccttccggaaagaggagcgagagcccggcgatggcggctgcgccggccttgaagcactggcgcaccacgctggagcgggtggagaagttcgtgtcgccgctctactttaccgactgtaacctccgcggcaggctttttggggccagctgccctgtggctgtgctctccagcttcctgacgccggagagacttccctaccaggaggcagtccagcgggacttccgccccgcgcaggtcggcgacagcttcggacccacatggtggacctgctggttccgggtggagctgaccatcccagaggcatgggtgggccaggaagttcacctttgctgggaaagtgatggagaaggtctggtgtggcgtgatggagaacctgtccagggtttaaccaaagagggtgagaagaccagctatgtcctgactgacaggctgggggaaagagacccccgaaggctggagtgcaatggcacgatctcggctcactgcgaccgccgcctcccaggttcaagcaattctcctgcctcagcctccctactagctgagattacagcctcactctctatgtggaagtagcctgcaatgggctcctgggggccgggaagggaagcatgattgcagcccctgaccctgagaagatgttccagctgagccgggctgagctagctgtgttccaccgggatgtccacatgctcctggtggatctggagctgctgctgggcatagccaagggcctcgggaaggacaaccagcgcagcttccaggccctgtacacagccaatcagatggtgaacgtgtgtgaccctgcccagcccgagaccttcccagtggcccaggccctggcctccaggttctttggccaacatgggggtgaaagccaacacaccattcatgccacagggcactgccacattgatacagcctggctttggcccttcaaagagactgtgaggaaatgtgcccggagctgggtgaccgccctgcagctcatggagcggaaccctgagttcatctttgcctgctcccaggcgcagcagctggaatgggtgaagagccgctaccctggcctgtactcccgcatccaggagtttgcgtgccgtgggcagtttgtgcctgtggggggcacctgggtggagatggatgggaacctgcccagtggagaggccatggtgaggcagtttttgcagggccagaacttctttctgcaggagtttgggaagatgtgctctgagttctgggctgccggaacctttggtacttcggacagtccccccgatctggccggtgttggcttgggggttttcaccagaatgggcggattggggagtcttcccgccgacttttttgggaggccggtgtccggtttggccaccccggcaacaaagcacagcacgagagcggttagaacggcaaacgaaagggggccaggcacttatgggggggcccaagcagctcatacgacgctatttcttctttgttgctactcccttgttgcttctctaataacaacaagactaaatacaagacaacgaacagtaaagcacacaaaaaaaaagacaccagaagcaactaactaagacaacaaaacgacaaacaaacacaggcaaggcgacgagaccagacccacaaaaacaggacagacaggcagcgaggacagcagcgcaagaactgaaggcgacaggcagaagggcagcgcgagctaaccgaggaagcgcgcgaggccaccggcagagcgaggggagagacaggaggagatgcgcgcacagcagaaaagaacacgcgcgagaagagcggcctgacagacagaagcagaagggagagagaagacgaaaggacagcagggtagacagagagacgaagcagaacaacagggcaccgcagacaacggaaggggagcaagagacgagtaacgagggaggagacgcagagggagggcgaggcagacagacccaggcgggacgaagcgcgcgaagggaggcgcgagaggagccagaggaaagcagagggagcgaacgggcgaagcaagagagcaaggcaggacaggcgcgggacagggcgcggcagggcagcaagaagagaagagcgacagggaggcagcgacagagcacggaggcaacagcagcgaagcagagcaggaggagtgaaacgcaaggcaaagagacgaagagggaggccgagcaacgtaggcaggagagagcggcgggacactggagggaggagagagagacgggggcggagaaggagcagagagggagaggggagcgagaagagaggacagacgaagcgggcccaggaagaacgagaggcaacagacagaagggagagcagaagagccgagacacgagggcagaggaaaggagcacgcaagcgcgggagagaggcgagagagccgagaacaggagaaggcaggcacgagagaagcaagaggaggaagag

SEQ ID NO: 290241 - DNA, 5274 bp, Homo sapiens
  misc_feature (108)..(108): n is a, c, g, or t
  misc_feature (118)..(118): n is a, c, g, or t
  misc_feature (126)..(126): n is a, c, g, or t
  misc_feature (129)..(129): n is a, c, g, or t
  misc_feature (132)..(135): n is a, c, g, or t
tataagataaaacaaatcatgcatcattttattccagattgctcttgcccaaagaggtgatctctcagatgtggaggaagaggaagaagaagagatggatgtagatgnagccacaggngcagttangangcnnnntggtgttgggggcagtccccctaagtccaagttactgtttagtaacacagcagctcaaaaattaagaggaatggatgaagtatacaacctcttctatgtcaacaacaactggtatatttttatgcgactgcaccagattctctgcctgaggctgctacggatttgttcccaagccgaacggcaaattgaagaagaaaaccgagagagagaatgggaacgggaagtgctgggcataaagcgagacaagagtgacagccctgccattcagctacgtctcaaagaacctatggatgttgatgtagaagattattacccagctttcctggacatggtgcggagcctgctggatggcaacatagactcatcacagtatgaagattcactgagagagatgttcaccattcatgcctacattgcctttaccatggacaaactgatccagagcattgtcagacagctgcagcatatcgtgagtgatgagatctgtgtgcaggtgactgacctttacctggcagaaaataataatggggccaccggaggccagctgaacacacagaactcaaggagcctcctggagtcaacgtatcagcggaaagctgagcagctaatgtcagatgagaattgctttaagcttatgtttattcagagccaaggccaggtccagctgactattgagcttctggacacagaagaggagaattcggatgaccctgtggaagcagagcgctggtcagactacgtggagcgatacatgaattcagatactacctcgcctgagcttcgtgaacatctagcacagaaaccagtatttctccccaggaatctacggcggatccggaagtgtcaacgtggtcgagagcagcaggaaaaggaagggaaggaaggaaacagcaagaagaccatggagaatgtggatagtctggataagctggagtgtagattcaagctgaattcctacaagatggtgtatgtgatcaaatcagaggactatatgtatcggaggaccgccctgctccgggctcatcagtcccatgagcgtgtaagcaagcgtctacatcagagattccaggcctgggtagataaatggaccaaggagcatgtgccccgtgaaatggcagcagagaccagcaagtggctcatgggtgaggggctggagggcctggtgccctgtaccaccacctgtgatacagagaccctgcattttgtgagcattaacaagtatcgtgtcaaatacggcacagtattcaaagccccttaactgcaaagccagagcagataacttggggtgtgtgtggggatgtgtgtgtgggcctatgcactcacacactgaagaaacaaggaagatgcctttcaagcctcactgggcctctctgggacatggccacctgacctgtgtgtggctggtgcagcctggcaccaagtgggctacctgttaggaacatgaataccttacaaagctgaagctggaacttttcccaaagggttttgggtatagcctgccctggaggggaaggaagtccatgcaagcaaagacatgcagtttgcttgcacacaccagcagagctaagactggagtctcctgtggcctaactttcaatgagggaaccggatgctgttcacactttgactggatggagatgcatttacaaaacagactggagaaggacttaatactcagatggattggaactatcatggtcactgctcctctcccctccccacaaaaggaaaaaaaagctggatttgattttttttttctggtcactcgagcacatctaagatcacccattaggttttatctgggacctgcagtttggctttgggattgatcatcttgtggattttattcctgacgattcccttgctgcctacccttttctctcctctggttctcaacctcaacgagttcaaatcagttgtcctttttagctcccgtggaactgttttgtatctgcctctttactagtctaccttagtgccatccaccagctttactctctgacacacacacgcacacacacacacaattttaacttgtttttttgtacataatgtacatactgtcaattttttattaaaagaaatatgctttgatgtgctagcataactgctctagcttcttgtgtaccatagtactgtggcttcagatttagtacctatgaacagatgtacaagacatttattacactttttaccaaagggagttaccattgtagtacttttgtgtaaaacttgtcttcccctttgcccccaactttttttttttttttttgtaaataaataaagcttggttcttacttaaggaataaactctcaacccacgtcccttgtcctcaccagaaaatactgtgaagcagggattttgacttcagttccttatccagggtagaaacaggattttgcttaaaatacttgttacttgtcccaaatcaaaatattccaaaatcttagaatacttaagtcttttagtacgtgtttttttcccttgttcaaataatctgaaaatattttatatttgggtaagttgtcaagctatgtagtttgtatttctatatattttttcttattcacattggtgatggatgggggtgagcaacttaaataccaaaccagtgtttgaaaaaaaagtgtgcataaggcatgtggtataccttataaatggagttgggagggagagaatttgaaatgggatacctatttttttaattacataaatttaaactagcagacatttaaacatgaatgattaggatttttctatgtggttaacctggactttctgaacaaagaccaactgagcccctcccagtactctggtggatttttcttcagcaaccattacgcaagtcttagttgtaaccagcaatgttctgtgtgttttatgtttgctttttagttaaaaatcaccaccaccaccaaaaagaaaaacaaaattttttggctcctggattttcaaaacacatggtagacctctctgattttaggcttttattgtttaaagacagtgtctcgctttatgacccacactggagtgcagtgccacgatcatagctcactgcaggcttgacctcccaggctcaagcagtcctcccacctcggcctcctgagtagctgcatgccaccacgcccagctaattttttaactttttgtagagacagggtcttgctatgctgcccaggttggtctcaaactcctggcctcaagctgtcctcccacctcggcctcgcaaagtgctgagattacaggtgtgagccaccctggcctgattttaggctttttttgtactggggagaagagactgtgagccaaagtgtagggtgccaaaaagagctttgtgggatgagattttagggcaaagctggggcagtgtctgacttggcggtggtcatgtgtactgatttaggggaaagatcttgaggttttctcaaataattcacctatccccgtgttccctcaagaaaggtcatgttgacctggaaccataggggaaattggtggggtgtgatcagggtcagccccagctgttgctgcccctgcagtgttttgtccagagcacttgcctgcaggtcaggataggatttcaaggccagttcaggagaaagtcccaacccaccagtgcaaccaacaaaagagtaagttttacctacagcctgggttttcacaagtagcatttttattcctcctgctgtctgacatctgagctccaagctctaaacccaacctgtattatatgcagcagcaggttatctttgttttaaatcacatttgttattctgtacttagtcacctttccgtgtgatctgcatttgaaatgttgtaaacttggtcagtatttccattaaaatatcagggctaatcttgtgtatttttttttgttcctaatgattttatagacaaagactcttggcaaccccaggagaaaaaaaataaagctgtcagtggagtactagggatgagaatgaaactggaggtctgtttctggtattatggcttcccgggactctacagtcctgtatggtgaaatacatttttccattgggatcgtcaatgccatgactgttctgccacctcaaactccagagtttctggtgatgtgcaagagttagcaatatacattcagtaaagcgtgtaatcgagtaagtcgtagtaacttgggcgtaaagctctaccaccctgctcactaacaccctgatctccgtccggtatgaaaacacctattccgggtagtctggctccacgttaagcaaacaccactttccgtgttcaccgacagctagagccagaggtctcccggttgctgcttctgaggctgggtctgcagcagctgaggctcccgcctgtcttgccgaatggcctaagtctctgtcttgagactttcgagagttctaatcgtcaaatttcccattttattttgagattttccctgcggcccactatttcggacaacataggagagcctcaaaaacagtttctagcttccaactcggctcaaagttcagacagcagctgggcttccgagagccgccggtgttccaagaaaagctgcccgggactgggaggcgccctctggacgccggaacctttggtttcctgccgtggagcggaacggtagcgccaggggccttccggaaagaggagcgagagcccggcgatggcggctgcgccggccttgaagcactggcgcaccacgctggagcgggtggagaagttcgtgtcgccgctctactttaccgactgtaacctccgcggcaggtgtggcccctggtcccccgcagccggccgaccgcaaccgtgcgcctcaagctttccttccggggagaaacctaagctgcagccacccgggccgcgggacaaagtgcccgccgcgggcagggcaggggccggggaggagggggtagggaatggactgtgccgcggagcggccaggcagcccttcgggacaaccgcctgaagctcaccttttctcccttccaagtgctgtccctgttgctcgtgcttcagcctccgccacactgagtccctggggctggggttttgtttgtagaaggctctggggactcctaatttctgcttccccagcctaaagcagggatcagtcttttcttgtggaataaatccttggatcgggaaaaaaaaaa

SEQ ID NO: 290242 - DNA, 3693 bp, Homo sapiens
  misc_feature (108)..(108): n is a, c, g, or t
  misc_feature (118)..(118): n is a, c, g, or t
  misc_feature (126)..(126): n is a, c, g, or t
  misc_feature (129)..(129): n is a, c, g, or t
  misc_feature (132)..(135): n is a, c, g, or t
tataagataaaacaaatcatgcatcattttattccagattgctcttgcccaaagaggtgatctctcagatgtggaggaagaggaagaagaagagatggatgtagatgnagccacaggngcagttangangcnnnntggtgttgggggcagtccccctaagtccaagttactgtttagtaacacagcagctcaaaaattaagaggaatggatgaagtatacaacctcttctatgtcaacaacaactggtatatttttatgcgactgcaccagattctctgcctgaggctgctacggatttgttcccaagccgaacggcaaattgaagaagaaaaccgagagagagaatgggaacgggaagtgctgggcataaagcgagacaagagtgacagccctgccattcagctacgtctcaaagaacctatggatgttgatgtagaagattattacccagctttcctggacatggtgcggagcctgctggatggcaacatagactcatcacagtatgaagattcactgagagagatgttcaccattcatgcctacattgcctttaccatggacaaactgatccagagcattgtcagacagctgcagcatatcgtgagtgatgagatctgtgtgcaggtgactgacctttacctggcagaaaataataatggggccaccggaggccagctgaacacacagaactcaaggagcctcctggagtcaacgtatcagcggaaagctgagcagctaatgtcagatgagaattgctttaagcttatgtttattcagagccaaggccaggtccagctgactattgagcttctggacacagaagaggagaattcggatgaccctgtggaagcagagcgctggtcagactacgtggagcgatacatgaattcagatactacctcgcctgagcttcgtgaacatctagcacagaaaccagtatttctccccaggaatctacggcggatccggaagtgtcaacgtggtcgagagcagcaggaaaaggaagggaaggaaggaaacagcaagaagaccatggagaatgtggatagtctggataagctggagtgtagattcaagctgaattcctacaagatggtgtatgtgatcaaatcagaggactatatgtatcggaggaccgccctgctccgggctcatcagtcccatgagcgtgtaagcaagcgtctacatcagagattccaggcctgggtagataaatggaccaaggagcatgtgccccgtgaaatggcagcagagaccagcaagtggctcatgggtgaggggctggagggcctggtgccctgtaccaccacctgtgatacagagaccctgcattttgtgagcattaacaagtatcgtgtcaaatacggcacagtattcaaagccccttaactgcaaagccagagcagataacttggggtgtgtgtggggatgtgtgtgtgggcctatgcactcacacactgaagaaacaaggaagatgcctttcaagcctcactgggcctctctgggacatggccacctgacctgtgtgtggctggtgcagcctggcaccaagtgggctacctgttaggaacatgaataccttacaaagctgaagctggaacttttcccaaagggttttgggtatagcctgccctggaggggaaggaagtccatgcaagcaaagacatgcagtttgcttgcacacaccagcagagctaagactggagtctcctgtggcctaactttcaatgagggaaccggatgctgttcacactttgactggatggagatgcatttacaaaacagactggagaaggacttaatactcagatggattggaactatcatggtcactgctcctctcccctccccacaaaaggaaaaaaaagctggatttgattttttttttctggtcactcgagcacatctaagatcacccattaggttttatctgggacctgcagtttggctttgggattgatcatcttgtggattttattcctgacgattcccttgctgcctacccttttctctcctctggttctcaacctcaacgagttcaaatcagttgtcctttttagctcccgtggaactgttttgtatctgcctctttactagtctaccttagtgccatccaccagctttactctctgacacacacacgcacacacacacacaattttaacttgtttttttgtacataatgtacatactgtcaattttttattaaaagaaatatgctttgatgtgctagcataactgctctagcttcttgtgtaccatagtactgtggcttcagatttagtacctatgaacagatgtacaagacatttattacactttttaccaaagggagttaccattgtagtacttttgtgtaaaacttgtcttcccctttgcccccaactttttttttttttttttgtaaataaataaagcttggttcttacttaaggaataaactctcaacccacgtcccttgtcctcaccagaaaatactgtgaagcagggattttgacttcagttccttatccagggtagaaacaggattttgcttaaaatacttgttacttgtcccaaatcaaaatattccaaaatcttagaatacttaagtcttttagtacgtgtttttttcccttgttcaaataatctgaaaatattttatatttgggtaagttgtcaagctatgtagtttgtatttctatatattttttcttattcacattggtgatggatgggggtgagcaacttaaataccaaaccagtgtttgaaaaaaaagtgtgcataaggcatgtggtataccttataaatggagttgggagggagagaatttgaaatgggatacctatttttttaattacataaatttaaactagcagacatttaaacatgaatgattaggatttttctatgtggttaacctggactttctgaacaaagaccaactgagcccctcccagtactctggtggatttttcttcagcaaccattacgcaagtcttagttgtaaccagcaatgttctgtgtgttttatgtttgctttttagttaaaaatcaccaccaccaccaaaaagaaaaacaaaattttttggctcctggattttcaaaacacatggtagacctctctgattttaggcttttattgtttaaagacagtgtctcgctttatgacccacactggagtgcagtgccacgatcatagctcactgcaggcttgacctcccaggctcaagcagtcctcccacctcggcctcctgagtagctgcatgccaccacgcccagctaattttttaactttttgtagagacagggtcttgctatgctgcccaggttggtctcaaactcctggcctcaagctgtcctcccacctcggcctcgcaaagtgctgagattacaggtgtgagccaccctggcctgattttaggctttttttgtactggggagaagagactgtgagccaaagtgtagggtgccaaaaagagctttgtgggatgagattttagggcaaagctggggcagtgtctgacttggcggtggtcatgtgtactgatttaggggaaagatcttgaggttttctcaaataattcacctatccccgtgttccctcaagaaaggtcatgttgacctggaaccataggggaaattggtggggtgtgatcagggtctaactctggacctactgtaaccatccgatgtttcgtacaggacc

SEQ ID NO: 290243 - DNA, 7134 bp, Homo sapiens
  misc_feature (108)..(108): n is a, c, g, or t
  misc_feature (118)..(118): n is a, c, g, or t
  misc_feature (126)..(126): n is a, c, g, or t
  misc_feature (129)..(129): n is a, c, g, or t
  misc_feature (132)..(135): n is a, c, g, or t
tataagataaaacaaatcatgcatcattttattccagattgctcttgcccaaagaggtgatctctcagatgtggaggaagaggaagaagaagagatggatgtagatgnagccacaggngcagttangangcnnnntggtgttgggggcagtccccctaagtccaagttactgtttagtaacacagcagctcaaaaattcatgcctacattgcctttaccatggacaaactgatccagagcattgtcagacagctgcagcatatcgtgagtgatgagatctgtgtgcaggtgactgacctttacctggcagaaaataataatggggccaccggaggccagctgaacacacagaactcaaggagcctcctggagtcaacgtatcagcggaaagctgagcagctaatgtcagatgagaattgctttaagcttatgtttattcagagccaaggccaggtccagctgactattgagcttctggacacagaagaggagaattcggatgaccctgtggaagcagagcgctggtcagactacgtggagcgatacatgaattcagatactacctcgcctgagcttcgtgaacatctagcacagaaaccagtatttctccccaggaatctacggcggatccggaagtgtcaacgtggtcgagagcagcaggaaaaggaagggaaggaaggaaacagcaagaagaccatggagaatgtggatagtctggataagctggagtgtagattcaagctgaattcctacaagatggtgtatgtgatcaaatcagaggactatatgtatcggaggaccgccctgctccgggctcatcagtcccatgagcgtgtaagcaagcgtctacatcagagattccaggcctgggtagataaatggaccaaggagcatgtgccccgtgaaatggcagcagagaccagcaagtggctcatgggtgaggggctggagggcctggtgccctgtaccaccacctgtgatacagagaccctgcattttgtgagcattaacaagtatcgtgtcaaatacggcacagtattcaaagccccttaactgcaaagccagagcagataacttggggtgtgtgtggggatgtgtgtgtgggcctatgcactcacacactgaagaaacaaggaagatgcctttcaagcctcactgggcctctctgggacatggccacctgacctgtgtgtggctggtgcagcctggcaccaagtgggctacctgttaggaacatgaataccttacaaagctgaagctggaacttttcccaaagggttttgggtatagcctgccctggaggggaaggaagtccatgcaagcaaagacatgcagtttgcttgcacacaccagcagagctaagactggagtctcctgtggcctaactttcaatgagggaaccggatgctgttcacactttgactggatggagatgcatttacaaaacagactggagaaggacttaatactcagatggattggaactatcatggtcactgctcctctcccctccccacaaaaggaaaaaaaagctggatttgattttttttttctggtcactcgagcacatctaagatcacccattaggttttatctgggacctgcagtttggctttgggattgatcatcttgtggattttattcctgacgattcccttgctgcctacccttttctctcctctggttctcaacctcaacgagttcaaatcagttgtcctttttagctcccgtggaactgttttgtatctgcctctttactagtctaccttagtgccatccaccagctttactctctgacacacacacgcacacacacacacaattttaacttgtttttttgtacataatgtacatactgtcaattttttattaaaagaaatatgctttgatgtgctagcataactgctctagcttcttgtgtaccatagtactgtggcttcagatttagtacctatgaacagatgtacaagacatttattacactttttaccaaagggagttaccattgtagtacttttgtgtaaaacttgtcttcccctttgcccccaactttttttttttttttttgtaaataaataaagcttggttcttacttaaggaataaactctcaacccacgtcccttgtcctcaccagaaaatactgtgaagcagggattttgacttcagttccttatccagggtagaaacaggattttgcttaaaatacttgttacttgtcccaaatcaaaatattccaaaatcttagaatacttaagtcttttagtacgtgtttttttcccttgttcaaataatctgaaaatattttatatttgggtaagttgtcaagctatgtagtttgtatttctatatattttttcttattcacattggtgatggatgggggtgagcaacttaaataccaaaccagtgtttgaaaaaaaagtgtgcataaggcatgtggtataccttataaatggagttgggagggagagaatttgaaatgggatacctatttttttaattacataaatttaaactagcagacatttaaacatgaatgattaggatttttctatgtggttaacctggactttctgaacaaagaccaactgagcccctcccagtactctggtggatttttcttcagcaaccattacgcaagtcttagttgtaaccagcaatgttctgtgtgttttatgtttgctttttagttaaaaatcaccaccaccaccaaaaagaaaaacaaaattttttggctcctggattttcaaaacacatggtagacctctctgattttaggcttttattgtttaaagacagtgtctcgctttatgacccacactggagtgcagtgccacgatcatagctcactgcaggcttgacctcccaggctcaagcagtcctcccacctcggcctcctgagtagctgcatgccaccacgcccagctaattttttaactttttgtagagacagggtcttgctatgctgcccaggttggtctcaaactcctggcctcaagctgtcctcccacctcggcctcgcaaagtgctgagattacaggtgtgagccaccctggcctgattttaggctttttttgtactggggagaagagactgtgagccaaagtgtagggtgccaaaaagagctttgtgggatgagattttagggcaaagctggggcagtgtctgacttggcggtggtcatgtgtactgatttaggggaaagatcttgaggttttctcaaataattcacctatccccgtgttccctcaagaaaggtcatgttgacctggaaccataggggaaattggtggggtgtgatcagggtcagccccagctgttgctgcccctgcagtgttttgtccagagcacttgcctgcaggtcaggataggatttcaaggccagttcaggagaaagtcccaacccaccagtgcaaccaacaaaagagtaagttttacctacagcctgggttttcacaagtagcatttttattcctcctgctgtctgacatctgagctccaagctctaaacccaacctgtattatatgcagcagcaggttatctttgttttaaatcacatttgttattctgtacttagtcacctttccgtgtgatctgcatttgaaatgttgtaaacttggtcagtatttccattaaaatatcagggctaatcttgtgtatttttttttgttcctaatgattttatagacaaagactcttggcaaccccaggagaaaaaaaataaagctgtcagtggagtactagggatgagaatgaaactggaggtctgtttctggtattatggcttcccgggactctacagtcctgtatggtgaaatacatttttccattgggatcgtcaatgccatgactgttctgccacctcaaactccagagtttctggtgatgtgcaagagttagcaatatacattcagtaaagcgtgtaatcgagtaagtcgtagtaacttgggcgtaaagctctaccaccctgctcactaacaccctgatctccgtccggtatgaaaacacctattccgggtagtctggctccacgttaagcaaacaccactttccgtgttcaccgacagctagagccagaggtctcccggttgctgcttctgaggctgggtctgcagcagctgaggctcccgcctgtcttgccgaatggcctaagtctctgtcttgagactttcgagagttctaatcgtcaaatttcccattttattttgagattttccctgcggcccactatttcggacaacataggagagcctcaaaaacagtttctagcttccaactcggctcaaagttcagacagcagctgggcttccgagagccgccggtgttccaagaaaagctgcccgggactgggaggcgccctctggacgccggaacctttggtttcctgccgtggagcggaacggtagcgccaggggccttccggaaagaggagcgagagcccggcgatggcggctgcgccggccttgaagcactggcgcaccacgctggagcgggtggagaagttcgtgtcgccgctctactttaccgactgtaacctccgcggcaggtgtggcccctggtcccccgcagccggccgaccgcaaccgtgcgcctcaagctttccttccggggagaaacctaagctgcagccacccgggccgcgggacaaagtgcccgccgcgggcagggcaggggccggggaggagggggtagggaatggactgtgccgcggagcggccaggcagccctcttggcggaggatccagggaaagtgcggccccaccggccagctggcccccaggcggaaacggggcggcctccagcatgtgcccaccggcccgtcccacgcaggctttttggggccagctgccctgtggctgtgctctccagcttcctgacgccggagagacttccctaccaggaggcagtccagcgggacttccgccccgcgcaggtcggcgacagcttcggacccacatggtggacctgctggttccgggtggagctgaccatcccagaggcatgggtgggccaggaagttcacctttgctgggaaagtgatggagaaggtctggtgtggcgtgatggagaacctgtccagggtttaaccaaagagggtgagaagaccagctatgtcctgactgacaggctgggggaaagagacccccgaaggctggagtgcaatggcacgatctcggctcactgcgaccgccgcctcccaggttcaagcaattctcctgcctcagcctccctactagctgagattacagcctcactctctatgtggaagtagcctgcaatgggctcctgggggccgggaagggaagcatgattgcagcccctgaccctgagaagatgttccagctgagccgggctgagctagctgtgttccaccgggatgtccacatgctcctggtggatctggagctgctgctgggcatagccaagggcctcgggaaggacaaccagcgcagcttccaggccctgtacacagccaatcagatggtgaacgtgtgtgaccctgcccagcccgagaccttcccagtggcccaggccctggcctccaggttctttggccaacatgggggtgaaagccaacacaccattcatgccacagggcactgccacattgatacagcctggctttggcccttcaaagagactgtgaggaaatgtgcccggagctgggtgaccgccctgcagctcatggagcggaaccctgagttcatctttgcctgctcccaggcgcagcagctggaatgggtgaagagccgctaccctggcctgtactcccgcatccaggagtttgcgtgccgtgggcagtttgtgcctgtggggggcacctgggtggagatggatgggaacctgcccagtggagaggccatggtgaggcagtttttgcagggccagaacttctttctgcaggagtttgggaagatgtgctctgagttctgggctgccggaacctttggtacttcggacagtccccccgatctggccggtgttggcttgggggttttcaccagaatgggcggattggggagtcttcccgccgacttttttgggaggccggtgtccggtttggccaccccggcaacaaagcacagcacgagagcggttagaacggcaaacgaaagggggccaggcacttatgggggggcccaagcagctcatacgacgctatttcttctttgttgctactcccttgttgcttctctaataacaacaagactaaatacaagacaacgaacagtaaagcacacaaaaaaaaagacaccagaagcaactaactaagacaacaaaacgacaaacaaacacaggcaaggcgacgagaccagacccacaaaaacaggacagacaggcagcgaggacagcagcgcaagaactgaaggcgacaggcagaagggcagcgcgagctaaccgaggaagcgcgcgaggccaccggcagagcgaggggagagacaggaggagatgcgcgcacagcagaaaagaacacgcgcgagaagagcggcctgacagacagaagcagaagggagagagaagacgaaaggacagcagggtagacagagagacgaagcagaacaacagggcaccgcagacaacggaaggggagcaagagacgagtaacgagggaggagacgcagagggagggcgaggcagacagacccaggcgggacgaagcgcgcgaagggaggcgcgagaggagccagaggaaagcagagggagcgaacgggcgaagcaagagagcaaggcaggacaggcgcgggacagggcgcggcagggcagcaagaagagaagagcgacagggaggcagcgacagagcacggaggcaacagcagcgaagcagagcaggaggagtgaaacgcaaggcaaagagacgaagagggaggccgagcaacgtaggcaggagagagcggcgggacactggagggaggagagagagacgggggcggagaaggagcagagagggagaggggagcgagaagagaggacagacgaagcgggcccaggaagaacgagaggcaacagacagaagggagagcagaagagccgagacacgagggcagaggaaaggagcacgcaagcgcgggagagaggcgagagagccgagaacaggagaaggcaggcacgagagaagcaagaggaggaagag

SEQ ID NO: 290244 - DNA, 2440 bp, Homo sapiens
  misc_feature (108)..(108): n is a, c, g, or t
  misc_feature (118)..(118): n is a, c, g, or t
  misc_feature (126)..(126): n is a, c, g, or t
  misc_feature (129)..(129): n is a, c, g, or t
  misc_feature (132)..(135): n is a, c, g, or t
tataagataaaacaaatcatgcatcattttattccagattgctcttgcccaaagaggtgatctctcagatgtggaggaagaggaagaagaagagatggatgtagatgnagccacaggngcagttangangcnnnntggtgttgggggcagtccccctaagtccaagttactgtttagtaacacagcagctcaaaaattaagaggaatggatgaagtatacaacctcttctatgtcaacaacaactggtatatttttatgcgactgcaccagattctctgcctgaggctgctacggatttgttcccaagccgaacggcaaattgaagaagaaaaccgagagagagaatgggaacgggaagtgctgggcataaagcgagacaagagtgacagccctgccattcagctacgtctcaaagaacctatggatgttgatgtagaagattattacccagctttcctggacatggtgcggagcctgctggatggcaacatagactcatcacagtatgaagattcactgagagagatgttcaccattcatgcctacattgcctttaccatggacaaactgatccagagcattgtcagacagctgcagcatatcgtgagtgatgagatctgtgtgcaggtgactgacctttacctggcagaaaataataatggggccaccggaggccagctgaacacacagaactcaaggagcctcctggagtcaacgtatcagcggaaagctgagcagctaatgtcagatgagaattgctttaagcttatgtttattcagagccaaggccaggtccagctgactattgagcttctggacacagaagaggagaattcggatgaccctgtggaagcagagcgctggtcagactacgtggagcgatacatgaattcagatactacctcgcctgagcttcgtgaacatctagcacagaaaccagtatttctccccaggaatctacggcggatccggaagtgtcaacgtggtcgagagcagcaggaaaaggaagggaaggaaggaaacagcaagaagaccatggagaatgtggatagtctggataagctggagtgtagattcaagctgaattcctacaagatggtgtatgtgatcaaatcagaggactatatgtatcggaggaccgccctgctccgggctcatcagtcccatgagcgtgtaagcaagcgtctacatcagagattccaggcctgggtagataaatggaccaaggagcatgtgccccgtgaaatggcagcagagaccagcaagtggctcatgggtgaggggctggagggcctggtgccctgtaccaccacctgtgatacagagaccctgcattttgtgagcattaacaagtatcgtgtcaaatacggcacagtattcaaagccccttaactgcaaagccagagcagataacttggggtgtgtgtggggatgtgtgtgtgggcctatgcactcacacactgaagaaacaaggaagatgcctttcaagcctcactgggcctctctgggacatggccacctgacctgtgtgtggctggtgcagcctggcaccaagtgggctacctgttaggaacatgaataccttacaaagctgaagctggaacttttcccaaagggttttgggtatagcctgccctggaggggaaggaagtccatgcaagcaaagacatgcagtttgcttgcacacaccagcagagctaagactggagtctcctgtggcctaactttcaatgagggaaccggatgctgttcacactttgactggatggagatgcatttacaaaacagactggagaaggacttaatactcagatggattggaactatcatggtcactgctcctctcccctccccacaaaaggaaaaaaaagctggatttgattttttttttctggtcactcgagcacatctaagatcacccattaggttttatctgggacctgcagtttggctttgggattgatcatcttgtggattttattcctgacgattcccttgctgcctacccttttctctcctctggttctcaacctcaacgagttcaaatcagttgtcctttttagctcccgtggaactgttttgtatctgcctctttactagtctaccttagtgccatccaccagctttactctctgacacacacacgcacacacacacacaattttaacttgtttttttgtacataatgtacatactgtcaattttttattaaaagaaatatgctttgatgtgctagcataactgctctagcttcttgtgtaccatagtactgtggcttcagatttagtacctatgaacagatgtacaagacatttattacactttttaccaaagggagttaccattgtagtacttttgtgtaaaacttgtcttcccctttgcccccaactttttttttttttttttgtaaataaataaagcttggttcttacttaagga

SEQ ID NO: 290245 - DNA, 6698 bp, Homo sapiens
cctgggtgttgaatcggccgaggctgactattgagcttctggacacagaagaggagaattcggatgaccctgtggaagcagagcgctggtcagactacgtggagcgatacatgaattcagatactacctcgcctgagcttcgtgaacatctagcacagaaaccagtatttctccccaggaatctacggcggatccggaagtgtcaacgtggtcgagagcagcaggaaaaggaagggaaggaaggaaacagcaagaagaccatggagaatgtggatagtctggataagctggagtgtagattcaagctgaattcctacaagatggtgtatgtgatcaaatcagaggactatatgtatcggaggaccgccctgctccgggctcatcagtcccatgagcgtgtaagcaagcgtctacatcagagattccaggcctgggtagataaatggaccaaggagcatgtgccccgtgaaatggcagcagagaccagcaagtggctcatgggtgaggggctggagggcctggtgccctgtaccaccacctgtgatacagagaccctgcattttgtgagcattaacaagtatcgtgtcaaatacggcacagtattcaaagccccttaactgcaaagccagagcagataacttggggtgtgtgtggggatgtgtgtgtgggcctatgcactcacacactgaagaaacaaggaagatgcctttcaagcctcactgggcctctctgggacatggccacctgacctgtgtgtggctggtgcagcctggcaccaagtgggctacctgttaggaacatgaataccttacaaagctgaagctggaacttttcccaaagggttttgggtatagcctgccctggaggggaaggaagtccatgcaagcaaagacatgcagtttgcttgcacacaccagcagagctaagactggagtctcctgtggcctaactttcaatgagggaaccggatgctgttcacactttgactggatggagatgcatttacaaaacagactggagaaggacttaatactcagatggattggaactatcatggtcactgctcctctcccctccccacaaaaggaaaaaaaagctggatttgattttttttttctggtcactcgagcacatctaagatcacccattaggttttatctgggacctgcagtttggctttgggattgatcatcttgtggattttattcctgacgattcccttgctgcctacccttttctctcctctggttctcaacctcaacgagttcaaatcagttgtcctttttagctcccgtggaactgttttgtatctgcctctttactagtctaccttagtgccatccaccagctttactctctgacacacacacgcacacacacacacaattttaacttgtttttttgtacataatgtacatactgtcaattttttattaaaagaaatatgctttgatgtgctagcataactgctctagcttcttgtgtaccatagtactgtggcttcagatttagtacctatgaacagatgtacaagacatttattacactttttaccaaagggagttaccattgtagtacttttgtgtaaaacttgtcttcccctttgcccccaactttttttttttttttttgtaaataaataaagcttggttcttacttaaggaataaactctcaacccacgtcccttgtcctcaccagaaaatactgtgaagcagggattttgacttcagttccttatccagggtagaaacaggattttgcttaaaatacttgttacttgtcccaaatcaaaatattccaaaatcttagaatacttaagtcttttagtacgtgtttttttcccttgttcaaataatctgaaaatattttatatttgggtaagttgtcaagctatgtagtttgtatttctatatattttttcttattcacattggtgatggatgggggtgagcaacttaaataccaaaccagtgtttgaaaaaaaagtgtgcataaggcatgtggtataccttataaatggagttgggagggagagaatttgaaatgggatacctatttttttaattacataaatttaaactagcagacatttaaacatgaatgattaggatttttctatgtggttaacctggactttctgaacaaagaccaactgagcccctcccagtactctggtggatttttcttcagcaaccattacgcaagtcttagttgtaaccagcaatgttctgtgtgttttatgtttgctttttagttaaaaatcaccaccaccaccaaaaagaaaaacaaaattttttggctcctggattttcaaaacacatggtagacctctctgattttaggcttttattgtttaaagacagtgtctcgctttatgacccacactggagtgcagtgccacgatcatagctcactgcaggcttgacctcccaggctcaagcagtcctcccacctcggcctcctgagtagctgcatgccaccacgcccagctaattttttaactttttgtagagacagggtcttgctatgctgcccaggttggtctcaaactcctggcctcaagctgtcctcccacctcggcctcgcaaagtgctgagattacaggtgtgagccaccctggcctgattttaggctttttttgtactggggagaagagactgtgagccaaagtgtagggtgccaaaaagagctttgtgggatgagattttagggcaaagctggggcagtgtctgacttggcggtggtcatgtgtactgatttaggggaaagatcttgaggttttctcaaataattcacctatccccgtgttccctcaagaaaggtcatgttgacctggaaccataggggaaattggtggggtgtgatcagggtcagccccagctgttgctgcccctgcagtgttttgtccagagcacttgcctgcaggtcaggataggatttcaaggccagttcaggagaaagtcccaacccaccagtgcaaccaacaaaagagtaagttttacctacagcctgggttttcacaagtagcatttttattcctcctgctgtctgacatctgagctccaagctctaaacccaacctgtattatatgcagcagcaggttatctttgttttaaatcacatttgttattctgtacttagtcacctttccgtgtgatctgcatttgaaatgttgtaaacttggtcagtatttccattaaaatatcagggctaatcttgtgtatttttttttgttcctaatgattttatagacaaagactcttggcaaccccaggagaaaaaaaataaagctgtcagtggagtactagggatgagaatgaaactggaggtctgtttctggtattatggcttcccgggactctacagtcctgtatggtgaaatacatttttccattgggatcgtcaatgccatgactgttctgccacctcaaactccagagtttctggtgatgtgcaagagttagcaatatacattcagtaaagcgtgtaatcgagtaagtcgtagtaacttgggcgtaaagctctaccaccctgctcactaacaccctgatctccgtccggtatgaaaacacctattccgggtagtctggctccacgttaagcaaacaccactttccgtgttcaccgacagctagagccagaggtctcccggttgctgcttctgaggctgggtctgcagcagctgaggctcccgcctgtcttgccgaatggcctaagtctctgtcttgagactttcgagagttctaatcgtcaaatttcccattttattttgagattttccctgcggcccactatttcggacaacataggagagcctcaaaaacagtttctagcttccaactcggctcaaagttcagacagcagctgggcttccgagagccgccggtgttccaagaaaagctgcccgggactgggaggcgccctctggacgccggaacctttggtttcctgccgtggagcggaacggtagcgccaggggccttccggaaagaggagcgagagcccggcgatggcggctgcgccggccttgaagcactggcgcaccacgctggagcgggtggagaagttcgtgtcgccgctctactttaccgactgtaacctccgcggcaggtgtggcccctggtcccccgcagccggccgaccgcaaccgtgcgcctcaagctttccttccggggagaaacctaagctgcagccacccgggccgcgggacaaagtgcccgccgcgggcagggcaggggccggggaggagggggtagggaatggactgtgccgcggagcggccaggcagccctcttggcggaggatccagggaaagtgcggccccaccggccagctggcccccaggcggaaacggggcggcctccagcatgtgcccaccggcccgtcccacgcaggctttttggggccagctgccctgtggctgtgctctccagcttcctgacgccggagagacttccctaccaggaggcagtccagcgggacttccgccccgcgcaggtcggcgacagcttcggacccacatggtggacctgctggttccgggtggagctgaccatcccagaggcatgggtgggccaggaagttcacctttgctgggaaagtgatggagaaggtctggtgtggcgtgatggagaacctgtccagggtttaaccaaagagggtgagaagaccagctatgtcctgactgacaggctgggggaaagagacccccgaaggctggagtgcaatggcacgatctcggctcactgcgaccgccgcctcccaggttcaagcaattctcctgcctcagcctccctactagctgagattacagcctcactctctatgtggaagtagcctgcaatgggctcctgggggccgggaagggaagcatgattgcagcccctgaccctgagaagatgttccagctgagccgggctgagctagctgtgttccaccgggatgtccacatgctcctggtggatctggagctgctgctgggcatagccaagggcctcgggaaggacaaccagcgcagcttccaggccctgtacacagccaatcagatggtgaacgtgtgtgaccctgcccagcccgagaccttcccagtggcccaggccctggcctccaggttctttggccaacatgggggtgaaagccaacacaccattcatgccacagggcactgccacattgatacagcctggctttggcccttcaaagagactgtgaggaaatgtgcccggagctgggtgaccgccctgcagctcatggagcggaaccctgagttcatctttgcctgctcccaggcgcagcagctggaatgggtgaagagccgctaccctggcctgtactcccgcatccaggagtttgcgtgccgtgggcagtttgtgcctgtggggggcacctgggtggagatggatgggaacctgcccagtggagaggccatggtgaggcagtttttgcagggccagaacttctttctgcaggagtttgggaagatgtgctctgagttctgggctgccggaacctttggtacttcggacagtccccccgatctggccggtgttggcttgggggttttcaccagaatgggcggattggggagtcttcccgccgacttttttgggaggccggtgtccggtttggccaccccggcaacaaagcacagcacgagagcggttagaacggcaaacgaaagggggccaggcacttatgggggggcccaagcagctcatacgacgctatttcttctttgttgctactcccttgttgcttctctaataacaacaagactaaatacaagacaacgaacagtaaagcacacaaaaaaaaagacaccagaagcaactaactaagacaacaaaacgacaaacaaacacaggcaaggcgacgagaccagacccacaaaaacaggacagacaggcagcgaggacagcagcgcaagaactgaaggcgacaggcagaagggcagcgcgagctaaccgaggaagcgcgcgaggccaccggcagagcgaggggagagacaggaggagatgcgcgcacagcagaaaagaacacgcgcgagaagagcggcctgacagacagaagcagaagggagagagaagacgaaaggacagcagggtagacagagagacgaagcagaacaacagggcaccgcagacaacggaaggggagcaagagacgagtaacgagggaggagacgcagagggagggcgaggcagacagacccaggcgggacgaagcgcgcgaagggaggcgcgagaggagccagaggaaagcagagggagcgaacgggcgaagcaagagagcaaggcaggacaggcgcgggacagggcgcggcagggcagcaagaagagaagagcgacagggaggcagcgacagagcacggaggcaacagcagcgaagcagagcaggaggagtgaaacgcaaggcaaagagacgaagagggaggccgagcaacgtaggcaggagagagcggcgggacactggagggaggagagagagacgggggcggagaaggagcagagagggagaggggagcgagaagagaggacagacgaagcgggcccaggaagaacgagaggcaacagacagaagggagagcagaagagccgagacacgagggcagaggaaaggagcacgcaagcgcgggagagaggcgagagagccgagaacaggagaaggcaggcacgagagaagcaagaggaggaagag

SEQ ID NO: 290246 - DNA, 2575 bp, Homo sapiens
  misc_feature (108)..(108): n is a, c, g, or t
  misc_feature (118)..(118): n is a, c, g, or t
  misc_feature (126)..(126): n is a, c, g, or t
  misc_feature (129)..(129): n is a, c, g, or t
  misc_feature (132)..(135): n is a, c, g, or t
tataagataaaacaaatcatgcatcattttattccagattgctcttgcccaaagaggtgatctctcagatgtggaggaagaggaagaagaagagatggatgtagatgnagccacaggngcagttangangcnnnntggtgttgggggcagtccccctaagtccaagttactgtttagtaacacagcagctcaaaaattaagaggaatggatgaagtatacaacctcttctatgtcaacaacaactggtatatttttatgcgactgcaccagattctctgcctgaggctgctacggatttgttcccaagccgaacggcaaattgaagaagaaaaccgagagagagaatgggaacgggaagtgctgggcataaagcgagacaagagtgacagccctgccattcagctacgtctcaaagaacctatggatgttgatgtagaagattattacccagctttcctggacatggtgcggagcctgctggatggcaacatagactcatcacagtatgaagattcactgagagagatgttcaccattcatgcctacattgcctttaccatggacaaactgatccagagcattgtcagacagctgcagcatatcgtgagtgatgagatctgtgtgcaggtgactgacctttacctggcagaaaataataatggggccaccggaggccagctgaacacacagaactcaaggagcctcctggagtcaacgtatcagcggaaagctgagcagctaatgtcagatgagaattgctttaagcttatgtttattcagagccaaggccaggtccagctgactattgagcttctggacacagaagaggagaattcggatgaccctgtggaagcagagcgctggtcagactacgtggagcgatacatgaattcagatactacctcgcctgagcttcgtgaacatctagcacagaaaccagtatttctccccaggaatctacggcggatccggaagtgtcaacgtggtcgagagcagcaggaaaaggaagggaaggaaggaaacagcaagaagaccatggagaatgtggatagtctggataagctggagtgtagattcaagctgaattcctacaagatggtgtatgtgatcaaatcagaggactatatgtatcggaggaccgccctgctccgggctcatcagtcccatgagcgtgtaagcaagcgtctacatcagagattccaggcctgggtagataaatggaccaaggagcatgtgccccgtgaaatggcagcagagaccagcaagtggctcatgggtgaggggctggagggcctggtgccctgtaccaccacctgtgatacagagaccctgcattttgtgagcattaacaagtatcgtgtcaaatacggcacagtattcaaagccccttaactgcaaagccagagcagataacttggggtgtgtgtggggatgtgtgtgtgggcctatgcactcacacactgaagaaacaaggaagatgcctttcaagcctcactgggcctctctgggacatggccacctgacctgtgtgtggctggtgcagcctggcaccaagtgggctacctgttaggaacatgaataccttacaaagctgaagctggaacttttcccaaagggttttgggtatagcctgccctggaggggaaggaagtccatgcaagcaaagacatgcagtttgcttgcacacaccagcagagctaagactggagtctcctgtggcctaactttcaatgagggaaccggatgctgttcacactttgactggatggagatgcatttacaaaacagactggagaaggacttaatactcagatggattggaactatcatggtcactgctcctctcccctccccacaaaaggaaaaaaaagctggatttgattttttttttctggtcactcgagcacatctaagatcacccattaggttttatctgggacctgcagtttggctttgggattgatcatcttgtggattttattcctgacgattcccttgctgcctacccttttctctcctctggttctcaacctcaacgagttcaaatcagttgtcctttttagctcccgtggaactgttttgtatctgcctctttactagtctaccttagtgccatccaccagctttactctctgacacacacacgcacacacacacacaattttaacttgtttttttgtacataatgtacatactgtcaattttttattaaaagaaatatgctttgatgtgctagcataactgctctagcttcttgtgtaccatagtactgtggcttcagatttagtacctatgaacagatgtacaagacatttattacactttttaccaaagggagttaccattgtagtacttttgtgtaaaacttgtcttcccctttgcccccaacagtcttatcatcttttgtgcatgacatacgcttggatcttacttaaaaaactcaaaggacctggcggagctttatatacctctagaggagcccgatcagccttcggggggccccggtcaccctatcacccttaggtgagcctattaccagcatcttgaccggactcttatgaaggctacactgag

SEQ ID NO: 290247 - DNA, 6251 bp, Homo sapiens
gcgccgatgccatggtagctgaaaccagtaagtgcatcatgtggtaaagcactagtagggcctgttgccgcatgtaccatcatcctgtaatacatacaccctgcattgcgtgatctttagactctatcgtgtcatctccgaactatgattcgcagccctttacctgtcaatccagaccagattacatatgaccatgtgtgtgcgtcgatctgtttctgggccttctgtccatcagtcactgaagaaacaaggaagatgcctttcaagcctcactgggcctctctgggacatggccacctgacctgtgtgtggctggtgcagcctggcaccaagtgggctacctgttaggaacatgaataccttacaaagctgaagctggaacttttcccaaagggttttgggtatagcctgccctggaggggaaggaagtccatgcaagcaaagacatgcagtttgcttgcacacaccagcagagctaagactggagtctcctgtggcctaactttcaatgagggaaccggatgctgttcacactttgactggatggagatgcatttacaaaacagactggagaaggacttaatactcagatggattggaactatcatggtcactgctcctctcccctccccacaaaaggaaaaaaaagctggatttgattttttttttctggtcactcgagcacatctaagatcacccattaggttttatctgggacctgcagtttggctttgggattgatcatcttgtggattttattcctgacgattcccttgctgcctacccttttctctcctctggttctcaacctcaacgagttcaaatcagttgtcctttttagctcccgtggaactgttttgtatctgcctctttactagtctaccttagtgccatccaccagctttactctctgacacacacacgcacacacacacacaattttaacttgtttttttgtacataatgtacatactgtcaattttttattaaaagaaatatgctttgatgtgctagcataactgctctagcttcttgtgtaccatagtactgtggcttcagatttagtacctatgaacagatgtacaagacatttattacactttttaccaaagggagttaccattgtagtacttttgtgtaaaacttgtcttcccctttgcccccaactttttttttttttttttgtaaataaataaagcttggttcttacttaaggaataaactctcaacccacgtcccttgtcctcaccagaaaatactgtgaagcagggattttgacttcagttccttatccagggtagaaacaggattttgcttaaaatacttgttacttgtcccaaatcaaaatattccaaaatcttagaatacttaagtcttttagtacgtgtttttttcccttgttcaaataatctgaaaatattttatatttgggtaagttgtcaagctatgtagtttgtatttctatatattttttcttattcacattggtgatggatgggggtgagcaacttaaataccaaaccagtgtttgaaaaaaaagtgtgcataaggcatgtggtataccttataaatggagttgggagggagagaatttgaaatgggatacctatttttttaattacataaatttaaactagcagacatttaaacatgaatgattaggatttttctatgtggttaacctggactttctgaacaaagaccaactgagcccctcccagtactctggtggatttttcttcagcaaccattacgcaagtcttagttgtaaccagcaatgttctgtgtgttttatgtttgctttttagttaaaaatcaccaccaccaccaaaaagaaaaacaaaattttttggctcctggattttcaaaacacatggtagacctctctgattttaggcttttattgtttaaagacagtgtctcgctttatgacccacactggagtgcagtgccacgatcatagctcactgcaggcttgacctcccaggctcaagcagtcctcccacctcggcctcctgagtagctgcatgccaccacgcccagctaattttttaactttttgtagagacagggtcttgctatgctgcccaggttggtctcaaactcctggcctcaagctgtcctcccacctcggcctcgcaaagtgctgagattacaggtgtgagccaccctggcctgattttaggctttttttgtactggggagaagagactgtgagccaaagtgtagggtgccaaaaagagctttgtgggatgagattttagggcaaagctggggcagtgtctgacttggcggtggtcatgtgtactgatttaggggaaagatcttgaggttttctcaaataattcacctatccccgtgttccctcaagaaaggtcatgttgacctggaaccataggggaaattggtggggtgtgatcagggtcagccccagctgttgctgcccctgcagtgttttgtccagagcacttgcctgcaggtcaggataggatttcaaggccagttcaggagaaagtcccaacccaccagtgcaaccaacaaaagagtaagttttacctacagcctgggttttcacaagtagcatttttattcctcctgctgtctgacatctgagctccaagctctaaacccaacctgtattatatgcagcagcaggttatctttgttttaaatcacatttgttattctgtacttagtcacctttccgtgtgatctgcatttgaaatgttgtaaacttggtcagtatttccattaaaatatcagggctaatcttgtgtatttttttttgttcctaatgattttatagacaaagactcttggcaaccccaggagaaaaaaaataaagctgtcagtggagtactagggatgagaatgaaactggaggtctgtttctggtattatggcttcccgggactctacagtcctgtatggtgaaatacatttttccattgggatcgtcaatgccatgactgttctgccacctcaaactccagagtttctggtgatgtgcaagagttagcaatatacattcagtaaagcgtgtaatcgagtaagtcgtagtaacttgggcgtaaagctctaccaccctgctcactaacaccctgatctccgtccggtatgaaaacacctattccgggtagtctggctccacgttaagcaaacaccactttccgtgttcaccgacagctagagccagaggtctcccggttgctgcttctgaggctgggtctgcagcagctgaggctcccgcctgtcttgccgaatggcctaagtctctgtcttgagactttcgagagttctaatcgtcaaatttcccattttattttgagattttccctgcggcccactatttcggacaacataggagagcctcaaaaacagtttctagcttccaactcggctcaaagttcagacagcagctgggcttccgagagccgccggtgttccaagaaaagctgcccgggactgggaggcgccctctggacgccggaacctttggtttcctgccgtggagcggaacggtagcgccaggggccttccggaaagaggagcgagagcccggcgatggcggctgcgccggccttgaagcactggcgcaccacgctggagcgggtggagaagttcgtgtcgccgctctactttaccgactgtaacctccgcggcaggtgtggcccctggtcccccgcagccggccgaccgcaaccgtgcgcctcaagctttccttccggggagaaacctaagctgcagccacccgggccgcgggacaaagtgcccgccgcgggcagggcaggggccggggaggagggggtagggaatggactgtgccgcggagcggccaggcagccctcttggcggaggatccagggaaagtgcggccccaccggccagctggcccccaggcggaaacggggcggcctccagcatgtgcccaccggcccgtcccacgcaggctttttggggccagctgccctgtggctgtgctctccagcttcctgacgccggagagacttccctaccaggaggcagtccagcgggacttccgccccgcgcaggtcggcgacagcttcggacccacatggtggacctgctggttccgggtggagctgaccatcccagaggcatgggtgggccaggaagttcacctttgctgggaaagtgatggagaaggtctggtgtggcgtgatggagaacctgtccagggtttaaccaaagagggtgagaagaccagctatgtcctgactgacaggctgggggaaagagacccccgaaggctggagtgcaatggcacgatctcggctcactgcgaccgccgcctcccaggttcaagcaattctcctgcctcagcctccctactagctgagattacagcctcactctctatgtggaagtagcctgcaatgggctcctgggggccgggaagggaagcatgattgcagcccctgaccctgagaagatgttccagctgagccgggctgagctagctgtgttccaccgggatgtccacatgctcctggtggatctggagctgctgctgggcatagccaagggcctcgggaaggacaaccagcgcagcttccaggccctgtacacagccaatcagatggtgaacgtgtgtgaccctgcccagcccgagaccttcccagtggcccaggccctggcctccaggttctttggccaacatgggggtgaaagccaacacaccattcatgccacagggcactgccacattgatacagcctggctttggcccttcaaagagactgtgaggaaatgtgcccggagctgggtgaccgccctgcagctcatggagcggaaccctgagttcatctttgcctgctcccaggcgcagcagctggaatgggtgaagagccgctaccctggcctgtactcccgcatccaggagtttgcgtgccgtgggcagtttgtgcctgtggggggcacctgggtggagatggatgggaacctgcccagtggagaggccatggtgaggcagtttttgcagggccagaacttctttctgcaggagtttgggaagatgtgctctgagttctgggctgccggaacctttggtacttcggacagtccccccgatctggccggtgttggcttgggggttttcaccagaatgggcggattggggagtcttcccgccgacttttttgggaggccggtgtccggtttggccaccccggcaacaaagcacagcacgagagcggttagaacggcaaacgaaagggggccaggcacttatgggggggcccaagcagctcatacgacgctatttcttctttgttgctactcccttgttgcttctctaataacaacaagactaaatacaagacaacgaacagtaaagcacacaaaaaaaaagacaccagaagcaactaactaagacaacaaaacgacaaacaaacacaggcaaggcgacgagaccagacccacaaaaacaggacagacaggcagcgaggacagcagcgcaagaactgaaggcgacaggcagaagggcagcgcgagctaaccgaggaagcgcgcgaggccaccggcagagcgaggggagagacaggaggagatgcgcgcacagcagaaaagaacacgcgcgagaagagcggcctgacagacagaagcagaagggagagagaagacgaaaggacagcagggtagacagagagacgaagcagaacaacagggcaccgcagacaacggaaggggagcaagagacgagtaacgagggaggagacgcagagggagggcgaggcagacagacccaggcgggacgaagcgcgcgaagggaggcgcgagaggagccagaggaaagcagagggagcgaacgggcgaagcaagagagcaaggcaggacaggcgcgggacagggcgcggcagggcagcaagaagagaagagcgacagggaggcagcgacagagcacggaggcaacagcagcgaagcagagcaggaggagtgaaacgcaaggcaaagagacgaagagggaggccgagcaacgtaggcaggagagagcggcgggacactggagggaggagagagagacgggggcggagaaggagcagagagggagaggggagcgagaagagaggacagacgaagcgggcccaggaagaacgagaggcaacagacagaagggagagcagaagagccgagacacgagggcagaggaaaggagcacgcaagcgcgggagagaggcgagagagccgagaacaggagaaggcaggcacgagagaagcaagaggaggaagag

SEQ ID NO: 290248 - DNA, 1561 bp, Homo sapiens
  misc_feature (108)..(108): n is a, c, g, or t
  misc_feature (118)..(118): n is a, c, g, or t
  misc_feature (126)..(126): n is a, c, g, or t
  misc_feature (129)..(129): n is a, c, g, or t
  misc_feature (132)..(135): n is a, c, g, or t
tataagataaaacaaatcatgcatcattttattccagattgctcttgcccaaagaggtgatctctcagatgtggaggaagaggaagaagaagagatggatgtagatgnagccacaggngcagttangangcnnnntggtgttgggggcagtccccctaagtccaagttactgtttagtaacacagcagctcaaaaattaagaggaatggatgaagtatacaacctcttctatgtcaacaacaactggtatatttttatgcgactgcaccagattctctgcctgaggctgctacggatttgttcccaagccgaacggcaaattgaagaagaaaaccgagagagagaatgggaacgggaagtgctgggcataaagcgagacaagagtgacagccctgccattcagctacgtctcaaagaacctatggatgttgatgtagaagattattacccagctttcctggacatggtgcggagcctgctggatggcaacatagactcatcacagtatgaagattcactgagagagatgttcaccattcatgcctacattgcctttaccatggacaaactgatccagagcattgtcagacagctgcagcatatcgtgagtgatgagatctgtgtgcaggtgactgacctttacctggcagaaaataataatggggccaccggaggccagctgaacacacagaactcaaggagcctcctggagtcaacgtatcagcggaaagctgagcagctaatgtcagatgagaattgctttaagcttatgtttattcagagccaaggccaggtccagctgactattgagcttctggacacagaagaggagaattcggatgaccctgtggaagcagagcgctggtcagactacgtggagcgatacatgaattcagatactacctcgcctgagcttcgtgaacatctagcacagaaaccagtatttctccccaggaatctacggcggatccggaagtgtcaacgtggtcgagagcagcaggaaaaggaagggaaggaaggaaacagcaagaagaccatggagaatgtggatagtctggataagctggagtgtagattcaagctgaattcctacaagatggtgtatgtgatcaaatcagaggactatatgtatcggaggaccgccctgctccgggctcatcagtcccatgagcgtgtaagcaagcgtctacatcagagattccaggcctgggtagataaatggaccaaggagcatgtgccccgtgaaatggcagcagagaccagcaagtggctcatgggtgaggggctggagggcctggtgccctgtaccaccacctgtgatacagagaccctgcattttgtgagcattaacaagtatcgtgtcaaatacggcacagtattcaaagccccttaactgcaaagccagagcagataacttggggtgtgtgtggggatgtgtatcctaactaattcattgccatatccgttaacacaagtatcgatctgaggttttgcttgatattattgttgtctggaatgtttaagctatgggtattgtttggagacttgttcagtgaaaatt

SEQ ID NO: 290249 - DNA, 937 bp, Homo sapiens
  misc_feature (108)..(108): n is a, c, g, or t
  misc_feature (118)..(118): n is a, c, g, or t
  misc_feature (126)..(126): n is a, c, g, or t
  misc_feature (129)..(129): n is a, c, g, or t
  misc_feature (132)..(135): n is a, c, g, or t
  misc_feature (902)..(902): n is a, c, g, or t
tataagataaaacaaatcatgcatcattttattccagattgctcttgcccaaagaggtgatctctcagatgtggaggaagaggaagaagaagagatggatgtagatgnagccacaggngcagttangangcnnnntggtgttgggggcagtccccctaagtccaagttactgtttagtaacacagcagctcaaaaattaagaggaatggatgaagtatacaacctcttctatgtcaacaacaactggtatatttttatgcgactgcaccagattctctgcctgaggctgctacggatttgttcccaagccgaacggcaaattgaagaagaaaaccgagagagagaatgggaacgggaagtgctgggcataaagcgagacaagagtgacagccctgccattcagctacgtctcaaagaacctatggatgttgatgtagaagattattacccagctttcctggacatggtgcggagcctgctggatggcaacatagactcatcacagtatgaagattcactgagagagatgttcaccattcatgcctacattgcctttaccatggacaaactgatccagagcattgtcagacagctgcagcatatcgtgagtgatgagatctgtgtgcaggtgactgacctttacctggcagaaaataataatggggccaccggaggccagctgaacacacagaactcaaggagcctcctggagtcaacgtatcagcggaaagctgagcagctaatgtcagatgagaattgctttaagcactccagaggatatatgctgataaagcagctgacatcattgatggtctgagaaagaatccctccattgctgttccaattgtccttaaaaggttgaagatgaaagaggaagaatggcgagaagctcagagaggctntaacaaagtatggcgagaacaaaatgagaaatact

SEQ ID NO: 290250 - DNA, 5554 bp, Homo sapiens
  misc_feature (108)..(108): n is a, c, g, or t
  misc_feature (118)..(118): n is a, c, g, or t
  misc_feature (126)..(126): n is a, c, g, or t
  misc_feature (129)..(129): n is a, c, g, or t
  misc_feature (132)..(135): n is a, c, g, or t
tataagataaaacaaatcatgcatcattttattccagattgctcttgcccaaagaggtgatctctcagatgtggaggaagaggaagaagaagagatggatgtagatgnagccacaggngcagttangangcnnnntggtgttgggggcagtccccctaagtccaagttactgtttagtaacacagcagctcaaaaattaagaggaatggatgaagtatacaacctcttctatgtcaacaacaactggtatatttttatgcgactgcaccagattctctgcctgaggctgctacggatttgttcccaagccgaacggcaaattgaagaagaaaaccgagagagagaatgggaacgggaagtgctgggcataaagcgagacaagagtgacagccctgccattcagctacgtctcaaagaacctatggatgttgatgtagaagattattacccagctttcctggacatggtgcggagcctgctggatggcaacatagactcatcacagtatgaagattcactgagagagatgttcaccattcatgcctacattgcctttaccatggacaaactgatccagagcattgtcagacagctgcagcatatcgtgagtgatgagatctgtgtgcaggtgactgacctttacctggcagaaaataataatggggccaccggaggccagctgaacacacagaactcaaggagcctcctggagtcaacgtatcagcggaaagctgagcagctaatgtcagatgagaattgctttaagcttatgtttattcagagccaaggccaggtccagctgactattgagcttctggacacagaagaggagaattcggatgaccctgtggaagcagagcgctggtcagactacgtggagcgatacatgaattcagatactacctcgcctgagcttcgtgaacatctagcacagaaaccagtatttctccccaggaatctacggcggatccggaagtgtcaacgtggtcgagagcagcaggaaaaggaagggaaggaaggaaacagcaagaagaccatggagaatgtggatagtctggataagctggagtgtagattcaagctgaattcctacaagatggtgtatgtgatcaaatcagaggactatatgtatcggaggaccgccctgctccgggctcatcagtcccatgagcgtgtaagcaagcgtctacatcagagattccaggcctgggtagataaatggaccaaggagcatgtgccccgtgaaatggcagcagagaccagcaagtggctcatgggtgaggggctggagggcctggtgccctgtaccaccacctgtgatacagagaccctgcattttgtgagcattaacaagtatcgtgtcaaatacggcacagtattcaaagccccttaactgcaaagccagagcagataacttggggtgtgtgtggggatgtgtgtgtgggcctatgcactcacacactgaagaaacaaggaagatgcctttcaagcctcactgggcctctctgggacatggccacctgacctgtgtgtggctggtgcagcctggcaccaagtgggctacctgttaggaacatgaataccttacaaagctgaagctggaacttttcccaaagggttttgggtatagcctgccctggaggggaaggaagtccatgcaagcaaagacatgcagtttgcttgcacacaccagcagagctaagactggagtctcctgtggcctaactttcaatgagggaaccggatgctgttcacactttgactggatggagatgcatttacaaaacagactggagaaggacttaatactcagatggattggaactatcatggtcactgctcctctcccctccccacaaaaggaaaaaaaagctggatttgattttttttttctggtcactcgagcacatctaagatcacccattaggttttatctgggacctgcagtttggctttgggattgatcatcttgtggattttattcctgacgattcccttgctgcctacccttttctctcctctggttctcaacctcaacgagttcaaatcagttgtcctttttagctcccgtggaactgttttgtatctgcctctttactagtctaccttagtgccatccaccagctttactctctgacacacacacgcacacacacacacaattttaacttgtttttttgtacataatgtacatactgtcaattttttattaaaagaaatatgctttgatgtgctagcataactgctctagcttcttgtgtaccatagtactgtggcttcagatttagtacctatgaacagatgtacaagacatttattacactttttaccaaagggagttaccattgtagtacttttgtgtaaaacttgtcttcccctttgcccccaactttttttttttttttttgtaaataaataaagcttggttcttacttaaggaataaactctcaacccacgtcccttgtcctcaccagaaaatactgtgaagcagggattttgacttcagttccttatccagggtagaaacaggattttgcttaaaatacttgttacttgtcccaaatcaaaatattccaaaatcttagaatacttaagtcttttagtacgtgtttttttcccttgttcaaataatctgaaaatattttatatttgggtaagttgtcaagctatgtagtttgtatttctatatattttttcttattcacattggtgatggatgggggtgagcaacttaaataccaaaccagtgtttgaaaaaaaagtgtgcataaggcatgtggtataccttataaatggagttgggagggagagaatttgaaatgggatacctatttttttaattacataaatttaaactagcagacatttaaacatgaatgattaggatttttctatgtggttaacctggactttctgaacaaagaccaactgagcccctcccagtactctggtggatttttcttcagcaaccattacgcaagtcttagttgtaaccagcaatgttctgtgtgttttatgtttgctttttagttaaaaatcaccaccaccaccaaaaagaaaaacaaaattttttggctcctggattttcaaaacacatggtagacctctctgattttaggcttttattgtttaaagacagtgtctcgctttatgacccacactggagtgcagtgccacgatcatagctcactgcaggcttgacctcccaggctcaagcagtcctcccacctcggcctcctgagtagctgcatgccaccacgcccagctaattttttaactttttgtagagacagggtcttgctatgctgcccaggttggtctcaaactcctggcctcaagctgtcctcccacctcggcctcgcaaagtgctgagattacaggtgtgagccaccctggcctgattttaggctttttttgtactggggagaagagactgtgagccaaagtgtagggtgccaaaaagagctttgtgggatgagattttagggcaaagctggggcagtgtctgacttggcggtggtcatgtgtactgatttaggggaaagatcttgaggttttctcaaataattcacctatccccgtgttccctcaagaaaggtcatgttgacctggaaccataggggaaattggtggggtgtgatcagggtcagccccagctgttgctgcccctgcagtgttttgtccagagcacttgcctgcaggtcaggataggatttcaaggccagttcaggagaaagtcccaacccaccagtgcaaccaacaaaagagtaagttttacctacagcctgggttttcacaagtagcatttttattcctcctgctgtctgacatctgagctccaagctctaaacccaacctgtattatatgcagcagcaggttatctttgttttaaatcacatttgttattctgtacttagtcacctttccgtgtgatctgcatttgaaatgttgtaaacttggtcagtatttccattaaaatatcagggctaatcttgtgtatttttttttgttcctaatgattttatagacaaagactcttggcaaccccaggagaaaaaaaataaagctgtcagtggagtactagggatgagaatgaaactggaggtctgtttctggtattatggcttcccgggactctacagtcctgtatggtgaaatacatttttccattgggatcgtcaatgccatgactgttctgccacctcaaactccagagtttctggtgatgtgcaagagttagcaatatacattcagtaaagcgtgtaatcgagtaagtcgtagtaacttgggcgtaaagctctaccaccctgctcactaacaccctgatctccgtccggtatgaaaacacctattccgggtagtctggctccacgttaagcaaacaccactttccgtgttcaccgacagctagagccagaggtctcccggttgctgcttctgaggctgggtctgcagcagctgaggctcccgcctgtcttgccgaatggcctaagtctctgtcttgagactttcgagagttctaatcgtcaaatttcccattttattttgagattttccctgcggcccactatttcggacaacataggagagcctcaaaaacagtttctagcttccaactcggctcaaagttcagacagcagctgggcttccgagagccgccggtgttccaagaaaagctgcccgggactgggaggcgccctctggacgccggaacctttggtttcctgccgtggagcggaacggtagcgccaggggccttccggaaagaggagcgagagcccggcgatggcggctgcgccggccttgaagcactggcgcaccacgctggagcgggtggagaagttcgtgtcgccgctctactttaccgactgtaacctccgcggcaggtgtggcccctggtcccccgcagccggccgaccgcaaccgtgcgcctcaagctttccttccggggagaaacctaagctgcagccacccgggccgcgggacaaagtgcccgccgcgggcagggcaggggccggggaggagggggtagggaatggactgtgccgcggagcggccaggcagccctcttggcggaggatccagggaaagtgcggccccaccggccagctggcccccaggcggaaacggggcggcctccagcatgtgcccaccggcccgtcccacgcaggctttttggggccagctgccctgtggctgtgctctccagcttcctgacgccggagagacttccctaccaggaggcagtccagcgggacttccgccccgcgcaggtcggcgacagcttcggacccacgtaggtaacgcccagcgggtgggcggggccacaggcctaggggaagtcccaacccagctcccagccacaccttcgttgtctgccctctgccgtagacaactacgtgggatcgagcagcaccctctgctgggagcagcaccctctgctgggaacagctctctggtccctgggtcttcaggggatggttttcattcccacgtggccgcctctggacatcccttaggaagggcaccctagggatcacgaacctttgacg

SEQ ID NO: 290251 - DNA, 5543 bp, Homo sapiens
  misc_feature (108)..(108): n is a, c, g, or t
  misc_feature (118)..(118): n is a, c, g, or t
  misc_feature (126)..(126): n is a, c, g, or t
  misc_feature (129)..(129): n is a, c, g, or t
  misc_feature (132)..(135): n is a, c, g, or t
tataagataaaacaaatcatgcatcattttattccagattgctcttgcccaaagaggtgatctctcagatgtggaggaagaggaagaagaagagatggatgtagatgnagccacaggngcagttangangcnnnntggtgttgggggcagtccccctaagtccaagttactgtttagtaacacagcagctcaaaaattaagaggaatggatgaagtatacaacctcttctatgtcaacaacaactggtatatttttatgcgactgcaccagattctctgcctgaggctgctacggatttgttcccaagccgaacggcaaattgaagaagaaaaccgagagagagaatgggaacgggaagtgctgggcataaagcgagacaagagtgacagccctgccattcagctacgtctcaaagaacctatggatgttgatgtagaagattattacccagctttcctggacatggtgcggagcctgctggatggcaacatagactcatcacagtatgaagattcactgagagagatgttcaccattcatgcctacattgcctttaccatggacaaactgatccagagcattgtcagacagctgcagcatatcgtgagtgatgagatctgtgtgcaggtgactgacctttacctggcagaaaataataatggggccaccggaggccagctgaacacacagaactcaaggagcctcctggagtcaacgtatcagcggaaagctgagcagctaatgtcagatgagaattgctttaagcttatgtttattcagagccaaggccaggtccagctgactattgagcttctggacacagaagaggagaattcggatgaccctgtggaagcagagcgctggtcagactacgtggagcgatacatgaattcagatactacctcgcctgagcttcgtgaacatctagcacagaaaccagtatttctccccaggaatctacggcggatccggaagtgtcaacgtggtcgagagcagcaggaaaaggaagggaaggaaggaaacagcaagaagaccatggagaatgtggatagtctggataagctggagtgtagattcaagctgaattcctacaagatggtgtatgtgatcaaatcagaggactatatgtatcggaggaccgccctgctccgggctcatcagtcccatgagcgtgtaagcaagcgtctacatcagagattccaggcctgggtagataaatggaccaaggagcatgtgccccgtgaaatggcagcagagaccagcaagtggctcatgggtgaggggctggagggcctggtgccctgtaccaccacctgtgatacagagaccctgcattttgtgagcattaacaagtatcgtgtcaaatacggcacagtattcaaagccccttaactgcaaagccagagcagataacttggggtgtgtgtggggatgtgtgtgtgggcctatgcactcacacactgaagaaacaaggaagatgcctttcaagcctcactgggcctctctgggacatggccacctgacctgtgtgtggctggtgcagcctggcaccaagtgggctacctgttaggaacatgaataccttacaaagctgaagctggaacttttcccaaagggttttgggtatagcctgccctggaggggaaggaagtccatgcaagcaaagacatgcagtttgcttgcacacaccagcagagctaagactggagtctcctgtggcctaactttcaatgagggaaccggatgctgttcacactttgactggatggagatgcatttacaaaacagactggagaaggacttaatactcagatggattggaactatcatggtcactgctcctctcccctccccacaaaaggaaaaaaaagctggatttgattttttttttctggtcactcgagcacatctaagatcacccattaggttttatctgggacctgcagtttggctttgggattgatcatcttgtggattttattcctgacgattcccttgctgcctacccttttctctcctctggttctcaacctcaacgagttcaaatcagttgtcctttttagctcccgtggaactgttttgtatctgcctctttactagtctaccttagtgccatccaccagctttactctctgacacacacacgcacacacacacacaattttaacttgtttttttgtacataatgtacatactgtcaattttttattaaaagaaatatgctttgatgtgctagcataactgctctagcttcttgtgtaccatagtactgtggcttcagatttagtacctatgaacagatgtacaagacatttattacactttttaccaaagggagttaccattgtagtacttttgtgtaaaacttgtcttcccctttgcccccaactttttttttttttttttgtaaataaataaagcttggttcttacttaaggaataaactctcaacccacgtcccttgtcctcaccagaaaatactgtgaagcagggattttgacttcagttccttatccagggtagaaacaggattttgcttaaaatacttgttacttgtcccaaatcaaaatattccaaaatcttagaatacttaagtcttttagtacgtgtttttttcccttgttcaaataatctgaaaatattttatatttgggtaagttgtcaagctatgtagtttgtatttctatatattttttcttattcacattggtgatggatgggggtgagcaacttaaataccaaaccagtgtttgaaaaaaaagtgtgcataaggcatgtggtataccttataaatggagttgggagggagagaatttgaaatgggatacctatttttttaattacataaatttaaactagcagacatttaaacatgaatgattaggatttttctatgtggttaacctggactttctgaacaaagaccaactgagcccctcccagtactctggtggatttttcttcagcaaccattacgcaagtcttagttgtaaccagcaatgttctgtgtgttttatgtttgctttttagttaaaaatcaccaccaccaccaaaaagaaaaacaaaattttttggctcctggattttcaaaacacatggtagacctctctgattttaggcttttattgtttaaagacagtgtctcgctttatgacccacactggagtgcagtgccacgatcatagctcactgcaggcttgacctcccaggctcaagcagtcctcccacctcggcctcctgagtagctgcatgccaccacgcccagctaattttttaactttttgtagagacagggtcttgctatgctgcccaggttggtctcaaactcctggcctcaagctgtcctcccacctcggcctcgcaaagtgctgagattacaggtgtgagccaccctggcctgattttaggctttttttgtactggggagaagagactgtgagccaaagtgtagggtgccaaaaagagctttgtgggatgagattttagggcaaagctggggcagtgtctgacttggcggtggtcatgtgtactgatttaggggaaagatcttgaggttttctcaaataattcacctatccccgtgttccctcaagaaaggtcatgttgacctggaaccataggggaaattggtggggtgtgatcagggtcagccccagctgttgctgcccctgcagtgttttgtccagagcacttgcctgcaggtcaggataggatttcaaggccagttcaggagaaagtcccaacccaccagtgcaaccaacaaaagagtaagttttacctacagcctgggttttcacaagtagcatttttattcctcctgctgtctgacatctgagctccaagctctaaacccaacctgtattatatgcagcagcaggttatctttgttttaaatcacatttgttattctgtacttagtcacctttccgtgtgatctgcatttgaaatgttgtaaacttggtcagtatttccattaaaatatcagggctaatcttgtgtatttttttttgttcctaatgattttatagacaaagactcttggcaaccccaggagaaaaaaaataaagctgtcagtggagtactagggatgagaatgaaactggaggtctgtttctggtattatggcttcccgggactctacagtcctgtatggtgaaatacatttttccattgggatcgtcaatgccatgactgttctgccacctcaaactccagagtttctggtgatgtgcaagagttagcaatatacattcagtaaagcgtgtaatcgagtaagtcgtagtaacttgggcgtaaagctctaccaccctgctcactaacaccctgatctccgtccggtatgaaaacacctattccgggtagtctggctccacgttaagcaaacaccactttccgtgttcaccgacagctagagccagaggtctcccggttgctgcttctgaggctgggtctgcagcagctgaggctcccgcctgtcttgccgaatggcctaagtctctgtcttgagactttcgagagttctaatcgtcaaatttcccattttattttgagattttccctgcggcccactatttcggacaacataggagagcctcaaaaacagtttctagcttccaactcggctcaaagttcagacagcagctgggcttccgagagccgccggtgttccaagaaaagctgcccgggactgggaggcgccctctggacgccggaacctttggtttcctgccgtggagcggaacggtagcgccaggggccttccggaaagaggagcgagagcccggcgatggcggctgcgccggccttgaagcactggcgcaccacgctggagcgggtggagaagttcgtgtcgccgctctactttaccgactgtaacctccgcggcaggctttttggggccagctgccctgtggctgtgctctccagcttcctgacgccggagagacttccctaccaggaggcagtccagcgggacttccgccccgcgcaggtcggcgacagcttcggacccacatggtggacctgctggttccgggtggagctgaccatcccagaggcatgggtgggccaggaagttcacctttgctgggaaagtgatggagaaggtctggtgtggcgtgatggagaacctgtccagggtttaaccaaagagggtgagaagaccagctatgtcctgactgacaggctgggggaaagagacccccgaagcctcactctactatttttcaaccaaatcaacaacaacctatccagctgttccccaaacatttacctccgaccccactaacaaccccacctcctaatactcactacctgaatccataccctcacaatcatggcaagccaacgccaacttatccagttgaaccactatcacgacaaaacactctacctctctatactaatctccctacaaatctccttcaactcataacacttcacaggcacagacactaatcatactcccatactctacttcaaaaacaaaaattatccccaccatagcgctactcatcaccctgatgaggccaccagcccacaa

SEQ ID NO: 290252 - DNA, 3297 bp, Homo sapiens
  misc_feature (108)..(108): n is a, c, g, or t
  misc_feature (118)..(118): n is a, c, g, or t
  misc_feature (126)..(126): n is a, c, g, or t
  misc_feature (129)..(129): n is a, c, g, or t
  misc_feature (132)..(135): n is a, c, g, or t
tataagataaaacaaatcatgcatcattttattccagattgctcttgcccaaagaggtgatctctcagatgtggaggaagaggaagaagaagagatggatgtagatgnagccacaggngcagttangangcnnnntggtgttgggggcagtccccctaagtccaagttactgtttagtaacacagcagctcaaaaattaagaggaatggatgaagtatacaacctcttctatgtcaacaacaactggtatatttttatgcgactgcaccagattctctgcctgaggctgctacggatttgttcccaagccgaacggcaaattgaagaagaaaaccgagagagagaatgggaacgggaagtgctgggcataaagcgagacaagagtgacagccctgccattcagctacgtctcaaagaacctatggatgttgatgtagaagattattacccagctttcctggacatggtgcggagcctgctggatggcaacatagactcatcacagtatgaagattcactgagagagatgttcaccattcatgcctacattgcctttaccatggacaaactgatccagagcattgtcagacagctgcagcatatcgtgagtgatgagatctgtgtgcaggtgactgacctttacctggcagaaaataataatggggccaccggaggccagctgaacacacagaactcaaggagcctcctggagtcaacgtatcagcggaaagctgagcagctaatgtcagatgagaattgctttaagcttatgtttattcagagccaaggccaggtccagctgactattgagcttctggacacagaagaggagaattcggatgaccctgtggaagcagagcgctggtcagactacgtggagcgatacatgaattcagatactacctcgcctgagcttcgtgaacatctagcacagaaaccagtatttctccccaggaatctacggcggatccggaagtgtcaacgtggtcgagagcagcaggaaaaggaagggaaggaaggaaacagcaagaagaccatggagaatgtggatagtctggataagctggagtgtagattcaagctgaattcctacaagatggtgtatgtgatcaaatcagaggactatatgtatcggaggaccgccctgctccgggctcatcagtcccatgagcgtgtaagcaagcgtctacatcagagattccaggcctgggtagataaatggaccaaggagcatgtgccccgtgaaatggcagcagagaccagcaagtggctcatgggtgaggggctggagggcctggtgccctgtaccaccacctgtgatacagagaccctgcattttgtgagcattaacaagtatcgtgtcaaatacggcacagtattcaaagccccttaactgcaaagccagagcagataacttggggtgtgtgtggggatgtgtgtgtgggcctatgcactcacacactgaagaaacaaggaagatgcctttcaagcctcactgggcctctctgggacatggccacctgacctgtgtgtggctggtgcagcctggcaccaagtgggctacctgttaggaacatgaataccttacaaagctgaagctggaacttttcccaaagggttttgggtatagcctgccctggaggggaaggaagtccatgcaagcaaagacatgcagtttgcttgcacacaccagcagagctaagactggagtctcctgtggcctaactttcaatgagggaaccggatgctgttcacactttgactggatggagatgcatttacaaaacagactggagaaggacttaatactcagatggattggaactatcatggtcactgctcctctcccctccccacaaaaggaaaaaaaagctggatttgattttttttttctggtcactcgagcacatctaagatcacccattaggttttatctgggacctgcagtttggctttgggattgatcatcttgtggattttattcctgacgattcccttgctgcctacccttttctctcctctggttctcaacctcaacgagttcaaatcagttgtcctttttagctcccgtggaactgttttgtatctgcctctttactagtctaccttagtgccatccaccagctttactctctgacacacacacgcacacacacacacaattttaacttgtttttttgtacataatgtacatactgtcaattttttattaaaagaaatatgctttgatgtgctagcataactgctctagcttcttgtgtaccatagtactgtggcttcagatttagtacctatgaacagatgtacaagacatttattacactttttaccaaagggagttaccattgtagtacttttgtgtaaaacttgtcttcccctttgcccccaactttttttttttttttttgtaaataaataaagcttggttcttacttaaggaataaactctcaacccacgtcccttgtcctcaccagaaaatactgtgaagcagggattttgacttcagttccttatccagggtagaaacaggattttgcttaaaatacttgttacttgtcccaaatcaaaatattccaaaatcttagaatacttaagtcttttagtacgtgtttttttcccttgttcaaataatctgaaaatattttatatttgggtaagttgtcaagctatgtagtttgtatttctatatattttttcttattcacattggtgatggatgggggtgagcaacttaaataccaaaccagtgtttgaaaaaaaagtgtgcataaggcatgtggtataccttataaatggagttgggagggagagaatttgaaatgggatacctatttttttaattacataaatttaaactagcagacatttaaacatgaatgattaggatttttctatgtggttaacctggactttctgaacaaagaccaactgagcccctcccagtactctggtggatttttcttcagcaaccattacgcaagtcttagttgtaaccagcaatgttctgtgtgttttatgtttgctttttagttaaaaatcaccaccaccaccaaaaagaaaaacaaaattttttggctcctggattttcaaaacacatggtagacctctctgattttaggcttttattgtttaaagacagtgtctcgctttatgacccacactggagtgcagtgccacgatcatagctcactgcaggcttgacctcccaggctcaagcagtcctcccacctcggcctcctgagtagctgcatgccagtgtgggtcataaagcgagacactgtctttaaacaaaaaaa

SEQ ID NO: 290253 - DNA, 2239 bp, Homo sapiens
  misc_feature (108)..(108): n is a, c, g, or t
  misc_feature (118)..(118): n is a, c, g, or t
  misc_feature (126)..(126): n is a, c, g, or t
  misc_feature (129)..(129): n is a, c, g, or t
  misc_feature (132)..(135): n is a, c, g, or t
tataagataaaacaaatcatgcatcattttattccagattgctcttgcccaaagaggtgatctctcagatgtggaggaagaggaagaagaagagatggatgtagatgnagccacaggngcagttangangcnnnntggtgttgggggcagtccccctaagtccaagttactgtttagtaacacagcagctcaaaaattaagaggaatggatgaagtatacaacctcttctatgtcaacaacaactggtatatttttatgcgactgcaccagattctctgcctgaggctgctacggatttgttcccaagccgaacggcaaattgaagaagaaaaccgagagagagaatgggaacgggaagtgctgggcataaagcgagacaagagtgacagccctgccattcagctacgtctcaaagaacctatggatgttgatgtagaagattattacccagctttcctggacatggtgcggagcctgctggatggcaacatagactcatcacagtatgaagattcactgagagagatgttcaccattcatgcctacattgcctttaccatggacaaactgatccagagcattgtcagacagctgcagcatatcgtgagtgatgagatctgtgtgcaggtgactgacctttacctggcagaaaataataatggggccaccggaggccagctgaacacacagaactcaaggagcctcctggagtcaacgtatcagcggaaagctgagcagctaatgtcagatgagaattgctttaagcttatgtttattcagagccaaggccaggtccagctgactattgagcttctggacacagaagaggagaattcggatgaccctgtggaagcagagcgctggtcagactacgtggagcgatacatgaattcagatactacctcgcctgagcttcgtgaacatctagcacagaaaccagtatttctccccaggaatctacggcggatccggaagtgtcaacgtggtcgagagcagcaggaaaaggaagggaaggaaggaaacagcaagaagaccatggagaatgtggatagtctggataagctggagtgtagattcaagctgaattcctacaagatggtgtatgtgatcaaatcagaggactatatgtatcggaggaccgccctgctccgggctcatcagtcccatgagcgtgtaagcaagcgtctacatcagagattccaggcctgggtagataaatggaccaaggagcatgtgccccgtgaaatggcagcagagaccagcaagtggctcatgggtgaggggctggagggcctggtgccctgtaccaccacctgtgatacagagaccctgcattttgtgagcattaacaagtatcgtgtcaaatacggcacagtattcaaagccccttaactgcaaagccagagcagataacttggggtgtgtgtggggatgtgtgtgtgggcctatgcactcacacactgaagaaacaaggaagatgcctttcaagcctcactgggcctctctgggacatggccacctgacctgtgtgtggctggtgcagcctggcaccaagtgggctacctgttaggaacatgaataccttacaaagctgaagctggaacttttcccaaagggttttgggtatagcctgccctggaggggaaggaagtccatgcaagcaaagacatgcagtttgcttgcacacaccagcagagctaagactggagtctcctgtggcctaactttcaatgagggaaccggatgctgttcacactttgactggatggagatgcatttacaaaacagactggagaaggacttaatactcagatggattggaactatcatggtcactgctcctctcccctccccacaaaaggaaaaaaaagctggatttgattttttttttctggtcactcgagcacatctaagatcacccattaggttttatctgggacctgcagtttggctttgggattgatcatcttgtggattttattcctgacgattcccttgctgcctacccttttctctcctctggttctcaacctcaacgagttcaaatcagttgtcctttttagctcccgtggaactgttttgtatctgcctctttactagtctaccttagtgccatccaccagctttactctctgacacacacacgcacacacacacacaattttaacttgtttttttgtacataatgtacatactgtcaattttttattaaaagaaatatgctttgatgtgctagca

SEQ ID NO: 290254 - DNA, 5822 bp, Homo sapiens
acaggaaacagcaaagaccaaagaagacagaaatcgagctcggaacccccaggtagacataacctggatcgatgacctcagggcggaaccggatgctgttcacactttgactggatggagatgcatttacaaaacagactggagaaggacttaatactcagatggattggaactatcatggtcactgctcctctcccctccccacaaaaggaaaaaaaagctggatttgattttttttttctggtcactcgagcacatctaagatcacccattaggttttatctgggacctgcagtttggctttgggattgatcatcttgtggattttattcctgacgattcccttgctgcctacccttttctctcctctggttctcaacctcaacgagttcaaatcagttgtcctttttagctcccgtggaactgttttgtatctgcctctttactagtctaccttagtgccatccaccagctttactctctgacacacacacgcacacacacacacaattttaacttgtttttttgtacataatgtacatactgtcaattttttattaaaagaaatatgctttgatgtgctagcataactgctctagcttcttgtgtaccatagtactgtggcttcagatttagtacctatgaacagatgtacaagacatttattacactttttaccaaagggagttaccattgtagtacttttgtgtaaaacttgtcttcccctttgcccccaactttttttttttttttttgtaaataaataaagcttggttcttacttaaggaataaactctcaacccacgtcccttgtcctcaccagaaaatactgtgaagcagggattttgacttcagttccttatccagggtagaaacaggattttgcttaaaatacttgttacttgtcccaaatcaaaatattccaaaatcttagaatacttaagtcttttagtacgtgtttttttcccttgttcaaataatctgaaaatattttatatttgggtaagttgtcaagctatgtagtttgtatttctatatattttttcttattcacattggtgatggatgggggtgagcaacttaaataccaaaccagtgtttgaaaaaaaagtgtgcataaggcatgtggtataccttataaatggagttgggagggagagaatttgaaatgggatacctatttttttaattacataaatttaaactagcagacatttaaacatgaatgattaggatttttctatgtggttaacctggactttctgaacaaagaccaactgagcccctcccagtactctggtggatttttcttcagcaaccattacgcaagtcttagttgtaaccagcaatgttctgtgtgttttatgtttgctttttagttaaaaatcaccaccaccaccaaaaagaaaaacaaaattttttggctcctggattttcaaaacacatggtagacctctctgattttaggcttttattgtttaaagacagtgtctcgctttatgacccacactggagtgcagtgccacgatcatagctcactgcaggcttgacctcccaggctcaagcagtcctcccacctcggcctcctgagtagctgcatgccaccacgcccagctaattttttaactttttgtagagacagggtcttgctatgctgcccaggttggtctcaaactcctggcctcaagctgtcctcccacctcggcctcgcaaagtgctgagattacaggtgtgagccaccctggcctgattttaggctttttttgtactggggagaagagactgtgagccaaagtgtagggtgccaaaaagagctttgtgggatgagattttagggcaaagctggggcagtgtctgacttggcggtggtcatgtgtactgatttaggggaaagatcttgaggttttctcaaataattcacctatccccgtgttccctcaagaaaggtcatgttgacctggaaccataggggaaattggtggggtgtgatcagggtcagccccagctgttgctgcccctgcagtgttttgtccagagcacttgcctgcaggtcaggataggatttcaaggccagttcaggagaaagtcccaacccaccagtgcaaccaacaaaagagtaagttttacctacagcctgggttttcacaagtagcatttttattcctcctgctgtctgacatctgagctccaagctctaaacccaacctgtattatatgcagcagcaggttatctttgttttaaatcacatttgttattctgtacttagtcacctttccgtgtgatctgcatttgaaatgttgtaaacttggtcagtatttccattaaaatatcagggctaatcttgtgtatttttttttgttcctaatgattttatagacaaagactcttggcaaccccaggagaaaaaaaataaagctgtcagtggagtactagggatgagaatgaaactggaggtctgtttctggtattatggcttcccgggactctacagtcctgtatggtgaaatacatttttccattgggatcgtcaatgccatgactgttctgccacctcaaactccagagtttctggtgatgtgcaagagttagcaatatacattcagtaaagcgtgtaatcgagtaagtcgtagtaacttgggcgtaaagctctaccaccctgctcactaacaccctgatctccgtccggtatgaaaacacctattccgggtagtctggctccacgttaagcaaacaccactttccgtgttcaccgacagctagagccagaggtctcccggttgctgcttctgaggctgggtctgcagcagctgaggctcccgcctgtcttgccgaatggcctaagtctctgtcttgagactttcgagagttctaatcgtcaaatttcccattttattttgagattttccctgcggcccactatttcggacaacataggagagcctcaaaaacagtttctagcttccaactcggctcaaagttcagacagcagctgggcttccgagagccgccggtgttccaagaaaagctgcccgggactgggaggcgccctctggacgccggaacctttggtttcctgccgtggagcggaacggtagcgccaggggccttccggaaagaggagcgagagcccggcgatggcggctgcgccggccttgaagcactggcgcaccacgctggagcgggtggagaagttcgtgtcgccgctctactttaccgactgtaacctccgcggcaggtgtggcccctggtcccccgcagccggccgaccgcaaccgtgcgcctcaagctttccttccggggagaaacctaagctgcagccacccgggccgcgggacaaagtgcccgccgcgggcagggcaggggccggggaggagggggtagggaatggactgtgccgcggagcggccaggcagccctcttggcggaggatccagggaaagtgcggccccaccggccagctggcccccaggcggaaacggggcggcctccagcatgtgcccaccggcccgtcccacgcaggctttttggggccagctgccctgtggctgtgctctccagcttcctgacgccggagagacttccctaccaggaggcagtccagcgggacttccgccccgcgcaggtcggcgacagcttcggacccacatggtggacctgctggttccgggtggagctgaccatcccagaggcatgggtgggccaggaagttcacctttgctgggaaagtgatggagaaggtctggtgtggcgtgatggagaacctgtccagggtttaaccaaagagggtgagaagaccagctatgtcctgactgacaggctgggggaaagagacccccgaaggctggagtgcaatggcacgatctcggctcactgcgaccgccgcctcccaggttcaagcaattctcctgcctcagcctccctactagctgagattacagcctcactctctatgtggaagtagcctgcaatgggctcctgggggccgggaagggaagcatgattgcagcccctgaccctgagaagatgttccagctgagccgggctgagctagctgtgttccaccgggatgtccacatgctcctggtggatctggagctgctgctgggcatagccaagggcctcgggaaggacaaccagcgcagcttccaggccctgtacacagccaatcagatggtgaacgtgtgtgaccctgcccagcccgagaccttcccagtggcccaggccctggcctccaggttctttggccaacatgggggtgaaagccaacacaccattcatgccacagggcactgccacattgatacagcctggctttggcccttcaaagagactgtgaggaaatgtgcccggagctgggtgaccgccctgcagctcatggagcggaaccctgagttcatctttgcctgctcccaggcgcagcagctggaatgggtgaagagccgctaccctggcctgtactcccgcatccaggagtttgcgtgccgtgggcagtttgtgcctgtggggggcacctgggtggagatggatgggaacctgcccagtggagaggccatggtgaggcagtttttgcagggccagaacttctttctgcaggagtttgggaagatgtgctctgagttctgggctgccggaacctttggtacttcggacagtccccccgatctggccggtgttggcttgggggttttcaccagaatgggcggattggggagtcttcccgccgacttttttgggaggccggtgtccggtttggccaccccggcaacaaagcacagcacgagagcggttagaacggcaaacgaaagggggccaggcacttatgggggggcccaagcagctcatacgacgctatttcttctttgttgctactcccttgttgcttctctaataacaacaagactaaatacaagacaacgaacagtaaagcacacaaaaaaaaagacaccagaagcaactaactaagacaacaaaacgacaaacaaacacaggcaaggcgacgagaccagacccacaaaaacaggacagacaggcagcgaggacagcagcgcaagaactgaaggcgacaggcagaagggcagcgcgagctaaccgaggaagcgcgcgaggccaccggcagagcgaggggagagacaggaggagatgcgcgcacagcagaaaagaacacgcgcgagaagagcggcctgacagacagaagcagaagggagagagaagacgaaaggacagcagggtagacagagagacgaagcagaacaacagggcaccgcagacaacggaaggggagcaagagacgagtaacgagggaggagacgcagagggagggcgaggcagacagacccaggcgggacgaagcgcgcgaagggaggcgcgagaggagccagaggaaagcagagggagcgaacgggcgaagcaagagagcaaggcaggacaggcgcgggacagggcgcggcagggcagcaagaagagaagagcgacagggaggcagcgacagagcacggaggcaacagcagcgaagcagagcaggaggagtgaaacgcaaggcaaagagacgaagagggaggccgagcaacgtaggcaggagagagcggcgggacactggagggaggagagagagacgggggcggagaaggagcagagagggagaggggagcgagaagagaggacagacgaagcgggcccaggaagaacgagaggcaacagacagaagggagagcagaagagccgagacacgagggcagaggaaaggagcacgcaagcgcgggagagaggcgagagagccgagaacaggagaaggcaggcacgagagaagcaagaggaggaagag

SEQ ID NO: 290255 - DNA, 1674 bp, Homo sapiens
  misc_feature (108)..(108): n is a, c, g, or t
  misc_feature (118)..(118): n is a, c, g, or t
  misc_feature (126)..(126): n is a, c, g, or t
  misc_feature (129)..(129): n is a, c, g, or t
  misc_feature (132)..(135): n is a, c, g, or t
tataagataaaacaaatcatgcatcattttattccagattgctcttgcccaaagaggtgatctctcagatgtggaggaagaggaagaagaagagatggatgtagatgnagccacaggngcagttangangcnnnntggtgttgggggcagtccccctaagtccaagttactgtttagtaacacagcagctcaaaaattaagaggaatggatgaagtatacaacctcttctatgtcaacaacaactggtatatttttatgcgactgcaccagattctctgcctgaggctgctacggatttgttcccaagccgaacggcaaattgaagaagaaaaccgagagagagaatgggaacgggaagtgctgggcataaagcgagacaagagtgacagccctgccattcagctacgtctcaaagaacctatggatgttgatgtagaagattattacccagctttcctggacatggtgcggagcctgctggatggcaacatagactcatcacagtatgaagattcactgagagagatgttcaccattcatgcctacattgcctttaccatggacaaactgatccagagcattgtcagacagctgcagcatatcgtgagtgatgagatctgtgtgcaggtgactgacctttacctggcagaaaataataatggggccaccggaggccagctgaacacacagaactcaaggagcctcctggagtcaacgtatcagcggaaagctgagcagctaatgtcagatgagaattgctttaagcttatgtttattcagagccaaggccaggtccagctgactattgagcttctggacacagaagaggagaattcggatgaccctgtggaagcagagcgctggtcagactacgtggagcgatacatgaattcagatactacctcgcctgagcttcgtgaacatctagcacagaaaccagtatttctccccaggaatctacggcggatccggaagtgtcaacgtggtcgagagcagcaggaaaaggaagggaaggaaggaaacagcaagaagaccatggagaatgtggatagtctggataagctggagtgtagattcaagctgaattcctacaagatggtgtatgtgatcaaatcagaggactatatgtatcggaggaccgccctgctccgggctcatcaggtgagaaccagtaactgaaatttctgtacacatctcccaccctagctaggaccaggggaggcccagagtcttctgattgtttttctttgtttatgcaaacctgttcttggagctgagacttaactgaggaagtacgtatgttggttgctaaggatcctgtgacaaagtaccacagactgtggcttaaatgacaaaagttgtggagactagaagtccaaagtcaagtgtcagcagtgttggttccttttgaggactgtgagggacaatctcttctaggcctctcctagcttctggttctttgctggcaatctttggcattcctgggcttgtagatccctgccttcatcttcatatggtgttcctacctgtgtgtgtgtgtctgcctccagatgaggtcacattcggaagtactgggggctaggacttcaatgtatgattttttgtttgtttgtttgagacagagtctcacctgacacagcctctcaaagtgctagcattacaggcgtgagcca

SEQ ID NO: 290256 - DNA, 1766 bp, Homo sapiens
gaagatgctacggcctgccacgaccacctgggctgcgtcgcggcacacactgatggcattggcgggagcatccaggtggcagtgcatggtgcggcctgtcagcacgctgccacccagggctgtggtcacacgggacatcttctccatggctgcacaggaatgggaggtcctctgccttccatgtagtcactgctgtttccattctaccatgtcggcatccagcctctacccctttgttgcaagaaagaataaatctgataagaggtacaggagaatcccgagacctgggatgcgcagggcagatatgcccacctacaccgctgtctggggacctaaaaacaactcagacacatgtttttacaacttttttaatatatatttttataaacaggtcacgtgataaaatagcacaagaaacacttaccaaatataaggttatatcttccgcatatacaggagaatgaggtcgttatgtacaataagaaaatgattttaggggttggttggttttgttttcctctctccccttaatttttcctcctacagtcgttggaaatatcacagcttcagttgcattaatactttgggcaaatggacagctgcccctccccactaggggttgtggggaggaggggctggagaaactggctcctgaccactcagccctggagcttcctggggctggcactccagggacaggaaaatctttgggctgttgatctgtttctgattcaacagcatctctctctctctttctctctctctctcactctctttctctctctcactctctggctctctggaaactggttactctcttccaaccagatagggagtgtcccaagattgggtgtgggcgcggtatctcctggggctcaaggttgggatgggaaggggtcccagccccctcctcagcaacagctgagatttgccagcatcccccaggacttccaaatgtctcgggccgacagagcacggtcagagcccatttgggcagacagaagtttgggaagctggggaggggtgaagtgggggtgggggggcaggctagaaaggagccctccctcctcggggtgtctagggtgtgctggccactggaagattggagtcgctgacccagtgctgaccctgacccttggctgggtccactctgcagactccacctgaggagacccacccagggtgaagctcggtgcccaggcctgaactgagcccggccgggtgcaagggctgaggtgtgaggtcggcccaggcctcttcccaggcctgagggtggctacagctcgaggcttgcaaggtgcctgcgccacccctgggttgaggccgaccggagtcagctgggatcacgttaatgactccaagcgatcgccagcccttccgccctctccctgcccaattctctcagcctggccagggaccaaggccgggttttggggcggacaggggactgccccacacagcggcaaggaggaggagaggccgcgtgggtcaggctggatgggtgaggaggtgcgggtggggcctgggctctcggcggcgggccatggctttggcggtggcctgtttcccctgacacccctcggagggctccaggtatggtgcggtggaagatgcaggaagcccgtggggctcttctgggcccgtgtcctgggggacccagccccctcaatcccactgggccctgcccgggatgggggggacagtgggaagacagagcgggtgtggcggggaaggcggtaagggcacagtctggagagctcaaagcc

SEQ ID NO: 290257 - DNA, 482 bp, Homo sapiens
accaccaccacaccctgttaattttttgtatttttagtagagacagggtttcaccatgttggccaggctggtcttgaacgcctgacctcaggtgatccacccgcttcggcctaagtgctaggattacaggcgtgagccactgtgcccagcctcagttgcctttttcgacctctctgtctctcctgggtgtgagccattgtctgctattggtgcattttgtaatcttttgcgacatccttgtccttgcctgttactgtgtatagaacagggtttatttctgcctctctggaagggtgggctagagtctggatatgttggagggaatattatgtgtagtgacttcagtgttgtctctccctttaaggaatgggaggtcctctgccttccatgtagtcactgctgtttccattctaccatgtcggcatccagcctctacccctttgttgcaagaaagaataaatctgataagaggtacaggagaa

SEQ ID NO: 290258 - DNA, 740 bp, Homo sapiens
atcggaactccaggtgctgggtcttccaggagcgcgcctgcgcgggagggtgaccacaggcggccgggcgggatgtcctgtccgcagtcttcagcccagccgccgccacccataagctatgaggaggagtttacgaccacctggactactaccacctgcgtgacttcccggcctgcggggtccgcgcagcaaaggcttgacgctgctggagcaggcgctgcgcacctactggctggcgcctggtaggcacgagcgcagggtcgcccagaagctcctcaatggcctgagcaagtaccagccagcgccagctgcagccctggccgcgcactcgcctcagctgagcctggattgaaagattccagagcaagaagttgaaagcacaaggcggtgaggcaccctgcgcaccgagagcaacctccccagccggcggctgcaggcgcatcccggaagcgggcagaggggcctcaggctctctcccgccagggcggagggccccatcccctttcccagcgcctccggcgtggccggcggttcagtgacctagcttgagccacgcaccaaccaggagcgacagcagggacagcagcggtgatgaacaacccatgctggcatcaggactggcgcgccacgccgcgcacacccacggccccgctgctcatccgccctcacgcaccacggtggcagtcgcctcctccacacatgcgcatgctgctccaccaccgcccctcacccaacggttc

SEQ ID NO: 290259 - DNA, 624 bp, Homo sapiens
ttaggggaggaacaggaagagaagagtgtggcctcctagaaatctagcacggagaaagactggtcttgaactcctgacctcgtgatactcagcctcccaaagtgctgggattacaggagtgaaccaccaagcccggcttgacctcttggcttttaccaaaggatgtttgcttctgaggaagctggaagctgcagccacaatgtgcctttgcaggggagcctgagagccacaggatggaatacaggggggacagttagattctgaattgttaagcagagctgcttgatgcagaagatgaagacacaagaaagaatgagcctaggccgggcacagtggctcacgcctgtaattccagcacttcgggaggccgaggcgggaggatcacttgagctcaggagtttgagaccggcctggccaccatggtgaaacctcgactctaccaaaaaaaaaaaaaaaaagccaaaattagccgggtgtggtggcatatgcctgtggtcccagctacttgggaggctgaagtgggagaatcacttgagcccaggaggctgcagttgcagtgagctgatattatgccactgcactccagcctgggtgacagggtgagaccctgtctcaaaaaaaaaa

SEQ ID NO: 290260 - DNA, 885 bp, Homo sapiens
  misc_feature (885)..(885): n is a, c, g, or t
atcggaactccaggtgctgggtcttccaggagcgcgcctgcgcgggagggtgaccacaggcggccgggcgggatgtcctgtccgcagtcttcagcccagccgccgccacccataagctatgaggaggagtttacgaccacctggactactaccacctgcgtgacttcccggcctgcggggtccgcgcagcaaaggcttgacgctgctggagcaggcgctgcgcacctactggctggcgcctggtaggcacgagcgcagggtcgcccagaagctcctcaatggcctgagcaagtaccagccagcgccagctgcagccctggccgcgcactcgcctcagctgagcctgggggaggaacaggaagagaagagtgtggcctcctagaaatctagcacggagaaagatttttcaccatcctgcctgtgctcctgaatacacactcaagctagaaacacagagccccgaacttaggacagtgatctggccggccactgcctagcaagactatcatctcaggaaacccagaccatgaaggcgagtaccttctaagagccagcactgcagctgatcaccaaattgggctagcttttgtgccttttggcacttgcttttaagatgcccaaccagggataccaacttggtcaacggcacaagacattcttaaactgttcacttaccgttggcggactgaagtccactgacacgtcagacacttcatttttaaccgtcggcgtcagtggcccaaacaaacttcaattacaggtgggcctccaagaagcttaacacactttggttgaagggacacacacagaaattgctccaccagggaggtctcgaccgcggactggaaatctccggtttaccagaggctggtgactgcccagaan

SEQ ID NO: 290261 - DNA, 791 bp, Homo sapiens
atcggaactccaggtgctgggtcttccaggagcgcgcctgcgcgggagggtgaccacaggcggccgggcgggatgtcctgtccgcagtcttcagcccagccgccgccacccataagctatgaggaggagtttacgaccacctggactactaccacctgcgtgacttcccggcctgcggggtccgcgcagcaaaggcttgacgctgctggagcaggcgctgcgcacctactggctggcgcctggtaggcacgagcgcagggtcgcccagaagctcctcaatggcctgagcaagtaccagccagcgccagctgcagccctggccgcgcactcgcctcagctgagcctgggggaggaacaggaagagaagagtgtggcctcctagaaatctagcacggagaaagatttttcaccatcctgcctgtgctcctgaatacacactcaagctagaaacacagagccccgaacttaggacagtgatctggccggccactgcctagcaagactatcatctcaggaaacccagaccatgaaggcgagtaccttctaagagccagcactgcagctgatcaccaaattgggctagcttttgtgccttttggcacttgctttagtgccaacaggataaaactgtcaaggacaaaatctaaatgtttatttacgtggggatgagtcaggaagtagactttattttactgggctcagggccaacaacctcattcagtggcctccaaaactaaacactttgttgagggagaagagaaatcgctccacaagagatatagaaaggactg

SEQ ID NO: 290262 - DNA, 718 bp, Homo sapiens
atcggaactccaggtgctgggtcttccaggagcgcgcctgcgcgggagggtgaccacaggcggccgggcgggatgtcctgtccgcagtcttcagcccagccgccgccacccataagctatgaggaggagtttacgaccacctggactactaccacctgcgtgacttcccggcctgcggggtccgcgcagcaaaggcttgacgctgctggagcaggcgctgcgcacctactggctggcgcctggtaggcacgagcgcagggtcgcccagaagctcctcaatggcctgagcaagtaccagccagcgccagctgcagccctggccgcgcactcgcctcagctgagcctgggaatgaagaagctgtttctttacacaatcgttatcccataatgcctgcttctgctgctaccacgggctcacctaaaaggcaaccaaagggaggaacaggaagagaagagtgtggcctcctagaaatctagcacggagaaagttactcatccttcaaaactcagttcagagatcagctcctccaagaaggcttctgtggttgtggttggtgctctttcctaccagtaccagctgtcctgagagcacgtctctacatctctagctgccttctggaaaccgggagaaagccaaaacggatgaccagacactagatcagccgtgtccaaccctgtgactacgacggacttttccgcctatctttggtgagacggg

SEQ ID NO: 290263 - DNA, 489 bp, Homo sapiens
atcggaactccaggtgctgggtcttccaggagcgcgcctgcgcgggagggtgaccacaggcggccgggcgggatgtcctgtccgcagtcttcagcccagccgccgccacccataagctatgaggaggagtttacgaccacctggactactaccacctgcgtgacttcccggcctgcggggtccgcgcagcaaaggcttgacgctgctggagcaggcgctgcgcacctactggctggcgcctggtaggcacgagcgcagggtcgcccagaagctcctcaatggcctgagcaagtaccagccagcgccagctgcagccctggccgcgcactcgcctcagctgagcctggctgaaggtttagaataaaatgggttatgtctggacccacttcaaaatggctccaggagacggggagagtgcgattccacaggagcaggactggccacaaactggcagctctttaaggtggcccacgagtacgtgagggcagg

SEQ ID NO: 290264 - DNA, 320 bp, Homo sapiens
cacctggccggcatgaggccaagatccccctctgcctctctcttttctttgtactctgctaatcaggtttacatgatttcctatcagacctgaatcttgcagaattgaagccacagaaaagaatatgctgactctgcagtgcttgaagggggtaaaactaaagcattacctagaggaagcagtcttaggaaattttgcctctgactcgtttttgtgacagtcccaccaggagagagtgaagccagtctccctctttcctgttttgtgtctggacttcaatgttcatttcctcattctctctttctaggatcttgctcttg

SEQ ID NO: 290265 - DNA, 483 bp, Homo sapiens
cagccttggcctcccagtgctgggattacaggcgtgaggcactgcgcccgcctgagtctgcttctgtgtctattcatttagttctcccaagagattctctttccctctccctctgcctctctcttttctttgtactctgctaatcaggtttacatgatttcctatcagacctgaatcttgcagaattgaagccacagaaaagaatatgctgactctgcagtgcttgaagggggtaaaactaaagcattacctagaggaagcagtcttaggaaattttgcctctgactcgtttttgtgacagtcccaccaggagagagtgaagccagtctccctctttcctgttttgtgtctggacttcaatgttcatttcctcattctctctttctaggatcttgctcttgcagaatctacaggtctttcttgaagaaatctgtagtcataattttgtgctccatttttatttaggggaggaacaggaagaga

SEQ ID NO: 290266 - DNA, 4635 bp, Homo sapiens
  misc_feature (3)..(3): n is a, c, g, or t
  misc_feature (2300)..(2300): n is a, c, g, or t
gangaaaactcacagggtgcgtcgctggtaacccatgctcccataaagcctggcctctggaaagagacttgggaacgagccctgacgttctcagccgtcgagcttcacagagaagggtagctcgaattaggttccttatcttaaagagaataacagcagtcactttctcacaatcttgcgaacgccaaatggaaggatccctcgagagcgctgagaactcgccgagctcctcccgggaaacccggtaccacgaggcgccattttgcggatgggcaaaccgaggcccgcggggccgcgacttacccaggcctttttgcagtgggaggcgacggtggaggagggtggtctgggaccgggacaacaaagtccatcctgccgccggcttcgacgcaggtgccagaaaggtcccaaccccgcccaggcagggcgaggcggcgcggcccaggaacctgtcatggcggcgccgctgcccgacgccggaagtgcccgcctggaactacagctcccagcagaccccgcggcgcgctccggtcgacgccggggaagcagccgccattgtccgcggctgaggtgaggcctttgctcaggctgtggggccgccgtagctgcggggcttggggggtcaggagagccggctgggagaggcggcgtcagggtgggtcctgcgcctgccctttccgcgccggctttgcgccgtcgttgccgtcggttctccagccagcagcctgcctccggcctcccgcctccgggcgttcttcgttttctggtcggacgggcctgggtgaactctgctgcacgtcggctccgcgggcctttgtccccgaggccgcgccgggagctcccaagcgcactcctgggccggacctcggcgcgggacaaaagccaaacgccccaggcgggcagaccccgatcctgctgcgccgccttcaagggggaccgccggccgcgagccaggttgggatttgctgtgttcctgggcaggtgcctggtcaatcagtcctcgggatggcagccatcaacccgtgggcctcctggggtgcccttacggaccaatcttgggggatgacagctgttgacccatgggcctcctgggctctgtgtcctcagtatcctgcctggcacgtggagggaagcctggaggaggggaggagggccactgggctcccagcagcccaggttcaggaaccagtgaccttcaaggacgtggccgtggacttcacccaagaagagtgggggcagctggaccttgttcagaggaccctgtaccgtgatgtgatgctggagacctatggtcacctgctctctgtgggaaatcagattgccaagcctgaggtcatctccctgttggagcaaggagaagagccgtggtcagtggagcaggcatgtcctcaacgcacttgtccagaatgggtgagaaatcttgaaagcaaagcattgatcccagcacagagcatttttgaggaagaacaatcccatggcatgaagttggaaagatatatatgggatgatccttggttctccaggttagaagttttgggatgtaaagaccaattagaaatgtaccacatgaaccagagtacagctatgaggcagatggtcttcatgcaaaagcaagtactatcccagagaagctctgaattctgtggacttggggcagagtttagccagaacttaaactttgttccatctcagagagtttctcagatagaacatttctataagcctgatacacatgctcaaagttggagatgtgactcagccataatgtatgcagataaggttacctgtgaaaataatgattatgacaaaactgtttatcagtccattcaacctatttaccctgcaagaatacaaactggagataatcttttcaaatgtactgatgctgttaaatctttcaatcatataatacattttggtgatcataaaggaattcacacaggagaaaaactctatgaatataaggaatgccatcaaatctttaaccagagcccatcatttaatgaacacccaaggcttcatgttggagaaaaccagtataattacaaagaatatgagaatatcttttatttctcatcctttatggaacatcaaaaaattggtactgtagagaaagcgtataaatacaatgaatgggagaaagtctttgggtatgactctttccttactcaacatacaagcacttacactgcagagaaaccctatgactgcaatgaatgtgggacgtctttcatctggagctcttaccttattcaacataagaaaactcatactggagaaaaaccctatgaatgtgatanatgtggaaaagtttttaggaatcgctcagcctttacgaaacatgaacggactcacactggaataaaaccctatgaatgtaataaatgtggaaaagccttcagctggaattctcatcttattgtacataagagaattcatacaggagaaaaaccttatgtttgtaatgagtgtgggaaatctttcaactggaactctcatcttattggacatcagaggactcatacaggagagaaaccttttgaatgtactgaatgtgggaaatcattcagctggagctcccatcttattgcccatatgagaatgcatactggagagaaaccctttaaatgtgatgaatgtgaaaaagcttttagggactactcagcccttagtaaacatgaaagaactcattctggagcaaaaccatataaatgtactgaatgtggaaaatccttcagctggagctcccatcttattgcccatcagagaactcacacgggagagaaaccatataactgtcaggaatgtggcaaagcattcagagaacgctcagccctcactaaacatgagataattcattctggaattaagccctatgaatgtaataaatgtggaaaatcctgtagccagatggctcaccttgttagacatcaaaggactcatactggagaaaaaccctatgaatgcaataaatgtggaaaatccttcagtcagagctgtcaccttgttgctcatcggagaattcacactggtgagaaaccctataaatgtaatcagtgtgaaagatcctttaactgtagttctcacctcattgcacaccggagaactcatactggagagaaaccatacaggtgtaatgaatgtgggaaagcatttaatgagagttcatcccttattgtacacctaagaaaccatactggagaaaagccctacaaatgtaatcattgtgaaaaagcattttgtaagaattcttcccttattattcatcagagaatgcatagtggagagaaacgctttatatgcagtgaatgtggaaaagcctttagtggtcactcagccctacttcaacaccagagaaatcacagtgaagagaaactgaattgaatttatgcgagtttttcgtttcttgtacatttgacaacacattgaggaaaaccctataaacataatcaagaggggacatttttcattaagagttcagtaagacttctcccacattatttactagaaaatatcatcttagaagaaaccccatgaaggaaaagaatagggaaaagctttcagcagttatttagcccttactcaaaatcagataattaacaatgaaggaaactctaaactccccttatggtctaccagtaattcatacttgaggaccatgactgtggggaatgaggcatcttttagcaagagctctcaccaattgtagattggtgtgaattgctaagggaaaaaccttatgcagagaaaagtttttgactggaaatacactgttttgcatcaagctggagtactggatggaaaactctacaataacattttgtgcataattgtagaaatacagattttgttgttataaggggagggtctgggtgcccaggagtagaatatgaagtgctaaatctgaatgtaagaaaaataatagtattgaatggggtatttactgttgattaacctccttagagaaaattaatgaatgagatgactaacggtagaaaagttattgcctaggagtgtgagactgatgttgctggacagaaagtgatccttagcccagtgtgtcagcgtccattgttactcatcactgcattgttgggcaattagtttgtaatttgttttaggcaatcactataaattataattatggacactgcatcagtatacataacatgaaggaataaaaaggatacagaattgtatatacatacttactgtaacacatctaaaaaaatgtatatgggtaaggacctgaaagatccatggaaaagttaacccagttgagatttttaaaaagttttacaaatacatataacacttatgtgctgggctttcttttaaatgctttccaagtgttaacttgtttagtcccctttactctgagataggtactgttaccccagttttacaaatggctaagctgaagcagagatgttgaaggatcctacctaaggggcacaactagtaagggagtagagctgagattggctccagagttcttgttttcagccaccattttatgctgcctctccagtgattttttttcccattttcttcagtgtttctatagcagagatttgataataaaaagaaaatcctaaacaatgagaaataaagttacctggtttctctgtcaaa

SEQ ID NO: 290267 - DNA, 1659 bp, Homo sapiens
  misc_feature (3)..(3): n is a, c, g, or t
gangaaaactcacagggtgcgtcgctggtaacccatgctcccataaagcctggcctctggaaagagacttgggaacgagccctgacgttctcagccgtcgagcttcacagagaagggtagctcgaattaggttccttatcttaaagagaataacagcagtcactttctcacaatcttgcgaacgccaaatggaaggatccctcgagagcgctgagaactcgccgagctcctcccgggaaacccggtaccacgaggcgccattttgcggatgggcaaaccgaggcccgcggggccgcgacttacccaggcctttttgcagtgggaggcgacggtggaggagggtggtctgggaccgggacaacaaagtccatcctgccgccggcttcgacgcaggtgccagaaaggtcccaaccccgcccaggcagggcgaggcggcgcggcccaggaacctgtcatggcggcgccgctgcccgacgccggaagtgcccgcctggaactacagctcccagcagaccccgcggcgcgctccggtcgacgccggggaagcagccgccattgtccgcggctgaggtgaggcctttgctcaggctgtggggccgccgtagctgcggggcttggggggtcaggagagccggctgggagaggcggcgtcagggtgggtcctgcgcctgccctttccgcgccggctttgcgccgtcgttgccgtcggttctccagccagcagcctgcctccggcctcccgcctccgggcgttcttcgttttctggtcggacgggcctgggtgaactctgctgcacgtcggctccgcgggcctttgtccccgaggccgcgccgggagctcccaagcgcactcctgggccggacctcggcgcgggacaaaagccaaacgccccaggcgggcagaccccgatcctgctgcgccgccttcaagggggaccgccggccgcgagccaggttgggatttgctgtgttcctgggcaggtgcctggtcaatcagtcctcgggatggcagccatcaacccgtgggcctcctggggtgcccttacggaccaatcttgggggatgacagctgttgacccatgggcctcctggggtgagtcaagagcctggtcagctgtgggctgccatattgtggcctctggctgtagtgctctgccacagctggggaatagaatggggaccaggtggggctttagggcaggtggtccagatctgtctctgtgcagagctggaacaaggaggaatcagaaaactagtggccaggcgtggtgactcacgcctacagcactttgggaggccgaggcgagtggatcacgaggtcaggagatcgagaccatcctggctaacacggtgaaaccccgtctctactaaaacaaaatacaaaaaattagctgggcgtggtggtgggcgcctgtagtcccagctgctcgggaggctgaggcaggagaatggcgtgaagccaggaggcggagcgtgcagtgagccaagatcgtgccactgcactccagcctgggcgacagagcgagactcagtctccagaaagacagaaaaatcgcggggggggccggaccaattgcgccggggcggtacaaccacggcggggtatcgcgtgcggacacactgggcccaccgctcccgggacaccctcccgcgcgggcc

SEQ ID NO: 290268 - DNA, 4251 bp, Homo sapiens
  misc_feature (3)..(3): n is a, c, g, or t
  misc_feature (1916)..(1916): n is a, c, g, or t
gangaaaactcacagggtgcgtcgctggtaacccatgctcccataaagcctggcctctggaaagagacttgggaacgagccctgacgttctcagccgtcgagcttcacagagaagggtagctcgaattaggttccttatcttaaagagaataacagcagtcactttctcacaatcttgcgaacgccaaatggaaggatccctcgagagcgctgagaactcgccgagctcctcccgggaaacccggtaccacgaggcgccattttgcggatgggcaaaccgaggcccgcggggccgcgacttacccaggcctttttgcagtgggaggcgacggtggaggagggtggtctgggaccgggacaacaaagtccatcctgccgccggcttcgacgcaggtgccagaaaggtcccaaccccgcccaggcagggcgaggcggcgcggcccaggaacctgtcatggcggcgccgctgcccgacgccggaagtgcccgcctggaactacagctcccagcagaccccgcggcgcgctccggtcgacgccggggaagcagccgccattgtccgcggctgaggttgggatttgctgtgttcctgggcaggtgcctggtcaatcagtcctcgggatggcagccatcaacccgtgggcctcctggggtgcccttacggaccaatcttgggggatgacagctgttgacccatgggcctcctgggctctgtgtcctcagtatcctgcctggcacgtggagggaagcctggaggaggggaggagggccactgggctcccagcagcccaggttcaggaaccagtgaccttcaaggacgtggccgtggacttcacccaagaagagtgggggcagctggaccttgttcagaggaccctgtaccgtgatgtgatgctggagacctatggtcacctgctctctgtgggaaatcagattgccaagcctgaggtcatctccctgttggagcaaggagaagagccgtggtcagtggagcaggcatgtcctcaacgcacttgtccagaatgggtgagaaatcttgaaagcaaagcattgatcccagcacagagcatttttgaggaagaacaatcccatggcatgaagttggaaagatatatatgggatgatccttggttctccaggttagaagttttgggatgtaaagaccaattagaaatgtaccacatgaaccagagtacagctatgaggcagatggtcttcatgcaaaagcaagtactatcccagagaagctctgaattctgtggacttggggcagagtttagccagaacttaaactttgttccatctcagagagtttctcagatagaacatttctataagcctgatacacatgctcaaagttggagatgtgactcagccataatgtatgcagataaggttacctgtgaaaataatgattatgacaaaactgtttatcagtccattcaacctatttaccctgcaagaatacaaactggagataatcttttcaaatgtactgatgctgttaaatctttcaatcatataatacattttggtgatcataaaggaattcacacaggagaaaaactctatgaatataaggaatgccatcaaatctttaaccagagcccatcatttaatgaacacccaaggcttcatgttggagaaaaccagtataattacaaagaatatgagaatatcttttatttctcatcctttatggaacatcaaaaaattggtactgtagagaaagcgtataaatacaatgaatgggagaaagtctttgggtatgactctttccttactcaacatacaagcacttacactgcagagaaaccctatgactgcaatgaatgtgggacgtctttcatctggagctcttaccttattcaacataagaaaactcatactggagaaaaaccctatgaatgtgatanatgtggaaaagtttttaggaatcgctcagcctttacgaaacatgaacggactcacactggaataaaaccctatgaatgtaataaatgtggaaaagccttcagctggaattctcatcttattgtacataagagaattcatacaggagaaaaaccttatgtttgtaatgagtgtgggaaatctttcaactggaactctcatcttattggacatcagaggactcatacaggagagaaaccttttgaatgtactgaatgtgggaaatcattcagctggagctcccatcttattgcccatatgagaatgcatactggagagaaaccctttaaatgtgatgaatgtgaaaaagcttttagggactactcagcccttagtaaacatgaaagaactcattctggagcaaaaccatataaatgtactgaatgtggaaaatccttcagctggagctcccatcttattgcccatcagagaactcacacgggagagaaaccatataactgtcaggaatgtggcaaagcattcagagaacgctcagccctcactaaacatgagataattcattctggaattaagccctatgaatgtaataaatgtggaaaatcctgtagccagatggctcaccttgttagacatcaaaggactcatactggagaaaaaccctatgaatgcaataaatgtggaaaatccttcagtcagagctgtcaccttgttgctcatcggagaattcacactggtgagaaaccctataaatgtaatcagtgtgaaagatcctttaactgtagttctcacctcattgcacaccggagaactcatactggagagaaaccatacaggtgtaatgaatgtgggaaagcatttaatgagagttcatcccttattgtacacctaagaaaccatactggagaaaagccctacaaatgtaatcattgtgaaaaagcattttgtaagaattcttcccttattattcatcagagaatgcatagtggagagaaacgctttatatgcagtgaatgtggaaaagcctttagtggtcactcagccctacttcaacaccagagaaatcacagtgaagagaaactgaattgaatttatgcgagtttttcgtttcttgtacatttgacaacacattgaggaaaaccctataaacataatcaagaggggacatttttcattaagagttcagtaagacttctcccacattatttactagaaaatatcatcttagaagaaaccccatgaaggaaaagaatagggaaaagctttcagcagttatttagcccttactcaaaatcagataattaacaatgaaggaaactctaaactccccttatggtctaccagtaattcatacttgaggaccatgactgtggggaatgaggcatcttttagcaagagctctcaccaattgtagattggtgtgaattgctaagggaaaaaccttatgcagagaaaagtttttgactggaaatacactgttttgcatcaagctggagtactggatggaaaactctacaataacattttgtgcataattgtagaaatacagattttgttgttataaggggagggtctgggtgcccaggagtagaatatgaagtgctaaatctgaatgtaagaaaaataatagtattgaatggggtatttactgttgattaacctccttagagaaaattaatgaatgagatgactaacggtagaaaagttattgcctaggagtgtgagactgatgttgctggacagaaagtgatccttagcccagtgtgtcagcgtccattgttactcatcactgcattgttgggcaattagtttgtaatttgttttaggcaatcactataaattataattatggacactgcatcagtatacataacatgaaggaataaaaaggatacagaattgtatatacatacttactgtaacacatctaaaaaaatgtatatgggtaaggacctgaaagatccatggaaaagttaacccagttgagatttttaaaaagttttacaaatacatataacacttatgtgctgggctttcttttaaatgctttccaagtgttaacttgtttagtcccctttactctgagataggtactgttaccccagttttacaaatggctaagctgaagcagagatgttgaaggatcctacctaaggggcacaactagtaagggagtagagctgagattggctccagagttcttgttttcagccaccattttatgctgcctctccagtgattttttttcccattttcttcagtgtttctatagcagagatttgataataaaaagaaaatcctaaacaatgagaaataaagttacctggtttctctgtcaaa

SEQ ID NO: 290269 - DNA, 3066 bp, Homo sapiens
cggtggattaagggtcagggccggtggctgtgggaggtgacactgagccgctcctcagcccctcctcccatccccaacgcgcacaacacatgcatttcaaatggtaaaaggcttaaaaacagcttgtatagaatattcttttttaaatagattaaggttgaaattgtctgaaatcaggtctgtaaatttccttaagacctaccttggcataaaggctgacccagcaaaagaactgagaaatacagcctgagatggacagcagtaattgcaaagttattgctcctctcctaagtcaaagataccggaggatggtcaccaaggatggccacagcacacttcaaatggatggcgctcaaagaggtcttgcatatcttcgagatgcttggggaatcctaatggacatgcgctggcgttggatgatgttggtcttttctgcttcttttgttgtccactggcttgtctttgcagtgctctggtatgttctggctgagatgaatggtgatctggaactagatcatgatgccccacctgaaaaccacactatctgtgtcaagtatatcaccagtttcacagctgcattctccttctccctggagacacaactcacaattggttatggtaccatgttccccagtggtgactgtccaagtgcaatcgccttacttgccatacaaatgctcctaggcctcatgctagaggcttttatcacaggtgcttttgtggcgaagattgcccggccaaaaaatcgagctttttcaattcgctttactgacacagcagtagtagctcacatggatggcaaacctaatcttatcttccaagtggccaacacccgacctagccctctaaccagtgtccgggtctcagctgtactctatcaggaaagagaaaatggcaaactctaccagaccagtgtggatttccaccttgatggcatcagttctgacgaatgtccattcttcatctttccactaacgtactatcactccattacaccatcaagtcctctggctactctgctccagcatgaaaatccttctcactttgaattagttgtattcctttcagcaatgcaggagggcactggagaaatatgccaaaggaggacatcctacctaccgtctgaaatcatgttacatcactgttttgcatctctgttgacccgaggttccaaaggtgaatatcaaatcaagatggagaattttgacaagactgtccctgaatttccaactcctctggtttctaaaagcccaaacaggactgacctggatatccacatcaatggacaaagcattgacaattttcagatctctgaaacaggactgacagaataagacttatccattttttaatgtattaaatacacccagccagttatgcagctactttttctttactgtatctcatgttttcttttttcaatgctaattatagctctctacatcacggtaatcatgcctatgcctacataagaatggctgagctaacaatacacattctggaaacataacactctacattacaaagtttgttacctgctgaaatcaatgtaactcaacttgacagacacttatacagaaatgttgctggtgaatttataagaatgtggtatgatactagtaatgaaggcaaaatggacagtgaagtttaacacaactgaactctaagaaaatcaaccattaatctctcattttcatctgcaaattgaagcaacagtttagtttcaaacctagctccctgggtggaatgacgacttcactatacttagtgaatatcctttaagagctgggatttttttcaagacaacaaagatcattcatttggttctttatactatgaaacttgagtaagtattacctccttaatttttaacaactaagaacaaaaattaacgagaaaaacaacaaagtacagatttatacataaacctaaaagcatttgaacatgacacccgaacacatacatatatgttcacttatttgtggcagaaggtgatcagataagctccagcccaaatggaacctgtggggtggtattttgcattgcaaggagacgcaaaattttattttaaaactgtcctccataataatcaaacggtgattcatctaaatgacttctagcaacctaagtaaaaacattcccctcctatgtatgattcatttgatcatataaaacatcatgatggctctaattcataaatacaaaaatatatttaagtctttatagatataaagctttacttagatataacttgagtgagtagggaaaaaaatctacagtagataaagcaaaagataattaggcaacaaagcattttcaaactcaaattcctgtttccaacttcaaatagttttttctataaacacaaaatcagtgtttattcaccagtaggaggttggactagatgaactctattatttctttctaaatctaatagtctataaaaattatgtttcctctgttttttattttatctatgctaaaatgagccctttcccttatgtccagtttaagatgatcatttgcatgattttcatttcaataaaaaaaagagaaactgtccttaaaacaaaacaaaaaccaaaaaagtcaccctatcaggtttcaaacagatttgtggctgttcttttctgaaatttcccttattcaggtttctgtgggaaaaatgaaagattaaccttccccactggtgatgacctaggcaggaatcatctcttgaaataaatactagctgagtaaaggcaagcaggtgtgaagagcagggctcagcagcaagtcacatttttctactatttgaccaaaaggaaaagaaaataaagaagaactctggagtggtctaagactgataatagcagaagaatatcaagaacacagaaacttaattattgtgaacttttgctgtttgaaaatcttagacattcattcttaagtagaaatcagaccaacagattttcccaacccaagactattgtaacacataaagacagcaagaattcttatttctataataaattaacaagattcacctaacctttgaaaataaagtagtattgaagacttaaaaaa

SEQ ID NO: 290270 - DNA, 3892 bp, Homo sapiens
  misc_feature (1910)..(1910): n is a, c, g, or t
  misc_feature (2382)..(2382): n is a, c, g, or t
cttttagagacagggtctcgctatgttggccagatcggtcttgaattcccgacctcaagcaatcctcccgactcaacgtcccaaagtgctagtgttacaggcatgagtcaccatgcctggttcctcactttcgttatctgtaaaatgggactaatagtgatacttattactgtgaaacttaagacacctttttttttttttttttttttttaaatagagacaaagtctcactacgttgcctaggctggtctctaactcctggactcaagcaatcctcctgtctcggcctcccgaagtgctgggagccagacacgtttttaataacaataaagcaactaatactttactgagagcttactctgtgccactggcttcacatcagtttgtacatatgaagtatttggtatgattcctggcacatgctaaacaatatatatattagctaatattattaatcattactatctaaagaatcatgaataaagttaacaatggtttaatacagatacttgagacagtttcaggggcaagaaaggcatctactaaaggtgctagaaatttggctatcaaagaccttcttgagaatgcaatatcaatcatttttggaaagactgttatttcaccaaacgcttcctgtattaaaaaaaaaaattaactggctttgaagttagctagacttgaataaccatccaaataatccaaagctcctatttgccttgtgtaaatttcttttatctgtctgagcaccagtgacttcatctgaaaatgggaacaatggctatcttgttgagatactgaagaattaagagataatacagtatgaaagcagttatcacagtgcctatgaagattttgttgtttccaaagcgtagagatcaggtctcctaaaacatttaaaaataatctaacaaaataagggtcattaagtagctatgccaagaaaaaagaatacactaaatgattatgacaacttgttagggtaataagttataaaacattaaaataatgcactaagattttttaaagtctatatcatatgaaactgaaatcgccatctaacctaaataaactgaacaatcatcccagtgttccattagctcaaatctgaagaaaatacaaaaaaaagtctctaatcaccaataaatgttaagttacctcagagcaaaagaaagttgtatatacccaggtggccaatatccaattccaacaacacagaaaggcagtctccaaagcctcaaagtcccgagatataggaactaggaaacccaagcaacaacctagctccacaagtctgtagtgcccttctcaagccccattaaaaggcaggaagtgggtatgcagcactctcaagggtatctacctctaaaggaagaagcaaagaggacagtcaaatataaactcatagtcctgaattgtagcaaacaagagaggctcactcaagggaagcaaagctgcatttcctgttctgttcctagtaactgctacactaaagtcttaagacacctttgtcatacgcaaggatgattacaaggaaggcacacattagatttctactcaccaccttgagaaaaggataaccactgatgaaaactgtttgcagcagaaaactaattatactaatgttatctttttaaaattcttatttaaccccttaatgattattttagttcattgaactattcaacctttttcttctagtttacttacttttaaagctaatgctatccagaaatgtcttcctggaatttcttattttgccaagaaacaattctctttctaccccccaatctaatcagagcctagaatatgcaaagagatagcaatccatcatccaggacagaaagaatccacgaacatggttgcaaagtgacaaaaacaaataaagcctaatcataaaactctaaataagnccaggtatggtggctcacccctgtaatcccagcgctttggaaggctgaagtgggaagatggcttgagaacaggagtctgagaccagcctaggcaatatattgagcccagtaccaacaaaaattaaaattctaaaaatttgctgaggttgcagtgagctatgattgtgccactgcactccagcctaggagacagagcaagaccctgtctctaaaaatacaaatcaataaatcaaactctgaataggctaattataaagcatacattagaactacaaacctctaaaagcttaccacaaatgtaagccttgtcctatactaaatctggcttcaaaggatttgcagacagtttaataataagcttccaaatgacttctaattatttacacagaagaacacttacatatttaaacataccccttttaattatgaataatgcataattataaattaactatgaaatgctagtctttanacacaatatttggtcaaatcaataaatgcttgacacccggacttgtgcaaggaagacacaggggtatataatctctacctacaggaattctaaaatatacttagaaaatgtttaagtgttaaacaatgttttaactgtcattcaaagaaacaatagaagagatattttaaggtaacacacaattagctcccaaatgaatgacttagtaaatgccatctaacgtgaagagaaaagcgagagagttggcaaagttgtggttagagaagcattcccaagaaagcagaaagtccatgagctctccaaattcacaaacattaactataaaacagttaagagcttactaatttactcttgattttagagaaatacagcctgagatggacagcagtaattgcaaagttattgctcctctcctaagtcaaagataccggaggatggtcaccaaggatggccacagcacacttcaaatggatggcgctcaaagaggtcttgcatatcttcgagatgcttggggaatcctaatggacatgcgctggcgttggatgatgttggtcttttctgcttcttttgttgtccactggcttgtctttgcagtgctctggtatgttctggctgagatgaatggtgatctggaactagatcatgatgccccacctgaaaaccacactatctgtgtcaagtatatcaccagtttcacagctgcattctccttctccctggagacacaactcacaattggttatggtaccatgttccccagtggtgactgtccaagtgcaatcgccttacttgccatacaaatgctcctaggcctcatgctagaggcttttatcacaggtgcttttgtggcgaagattgcccggccaaaaaatcgagctttttcaattcgctttactgacacagcagtagtagctcacatggatggcaaacctaatcttatcttccaagtggccaacacccgacctagccctctaaccagtgtccgggtctcagctgtactctatcaggaaagagaaaatggcaaactctaccagaccagtgtggatttccaccttgatggcatcagttctgacgaatgtccattcttcatctttccactaacgtactatcactccattacaccatcaagtcctctggctactctgctccagcatgaaaatccttctcactttgaattagttgtattcctttcagcaatgcaggagggcactggagaaatatgccaaaggaggacatcctacctaccgtctgaaatcatgttacatcactgttttgcatctctgttgacccgaggttccaaaggtgaatatcaaatcaagatggagaattttgacaagactgtccctgaatttccaactcctctggtttctaaaagcccaaacaggactgacctggatatccacatcaatggacaaagcattgacaattttcagatctctgaaacaggactgacagaataagacttatccattttttaatgtattaaatacacccagccagttatgcagct

SEQ ID NO: 290271 - DNA, 1275 bp, Homo sapiens
agcggagtccaagaagagaacctacaaactagacttgtagattaaaattatctgatcaaaaaggcagactctgtaaatttccttaagacctaccttggcataaaggctgacccagcaaaagaactgagaaatacagcctgagatggacagcagtaattgcaaagttattgctcctctcctaagtcaaagataccggaggatggtcaccaaggatggccacagcacacttcaaatggatggcgctcaaagaggtcttgcatatcttcgagatgcttggggaatcctaatggacatgcgctggcgttggatgatgttggtcttttctgcttcttttgttgtccactggcttgtctttgcagtgctctggtatgttctggctgagatgaatggtgatctggaactagatcatgatgccccacctgaaaaccacactatctgtgtcaagtatatcaccagtttcacagctgcattctccttctccctggagacacaactcacaattggttatggtaccatgttccccagtggtgactgtccaagtgcaatcgccttacttgccatacaaatgctcctaggcctcatgctagaggcttttatcacaggtgcttttgtggcgaagattgcccggccaaaaaatcgagctttttcaattcgctttactgacacagcagtagtagctcacatggatggcaaacctaatcttatcttccaagtggccaacacccgacctagccctctaaccagtgtccgggtctcagctgtactctatcaggaaagagaaaatggcaaactctaccagaccagtgtggatttccaccttgatggcatcagttctgacgaatgtccattcttcatctttccactaacgtactatcactccattacaccatcaagtcctctggctactctgctccagcatgaaaatccttctcactttgaattagttgtattcctttcagcaatgcaggagggcactggagaaatatgccaaaggaggacatcctacctaccgtctgaaatcatgttacatcactgttttgcatctctgttgacccgaggttccaaaggtgaatatcaaatcaagatggagaattttgacaagactgtccctgaatttccaactcctctggtttctaaaagcccaaacaggactgacctggatatccacatcaatggacaaagcattgacaattttcagatctctgaaacaggactgacagaataagacttatccattttttaatgtattaaatacacccagccagttatgcagct

SEQ ID NO: 290272 - DNA, 3601 bp, Homo sapiens
  misc_feature (1910)..(1910): n is a, c, g, or t
  misc_feature (2382)..(2382): n is a, c, g, or t
cttttagagacagggtctcgctatgttggccagatcggtcttgaattcccgacctcaagcaatcctcccgactcaacgtcccaaagtgctagtgttacaggcatgagtcaccatgcctggttcctcactttcgttatctgtaaaatgggactaatagtgatacttattactgtgaaacttaagacacctttttttttttttttttttttttaaatagagacaaagtctcactacgttgcctaggctggtctctaactcctggactcaagcaatcctcctgtctcggcctcccgaagtgctgggagccagacacgtttttaataacaataaagcaactaatactttactgagagcttactctgtgccactggcttcacatcagtttgtacatatgaagtatttggtatgattcctggcacatgctaaacaatatatatattagctaatattattaatcattactatctaaagaatcatgaataaagttaacaatggtttaatacagatacttgagacagtttcaggggcaagaaaggcatctactaaaggtgctagaaatttggctatcaaagaccttcttgagaatgcaatatcaatcatttttggaaagactgttatttcaccaaacgcttcctgtattaaaaaaaaaaattaactggctttgaagttagctagacttgaataaccatccaaataatccaaagctcctatttgccttgtgtaaatttcttttatctgtctgagcaccagtgacttcatctgaaaatgggaacaatggctatcttgttgagatactgaagaattaagagataatacagtatgaaagcagttatcacagtgcctatgaagattttgttgtttccaaagcgtagagatcaggtctcctaaaacatttaaaaataatctaacaaaataagggtcattaagtagctatgccaagaaaaaagaatacactaaatgattatgacaacttgttagggtaataagttataaaacattaaaataatgcactaagattttttaaagtctatatcatatgaaactgaaatcgccatctaacctaaataaactgaacaatcatcccagtgttccattagctcaaatctgaagaaaatacaaaaaaaagtctctaatcaccaataaatgttaagttacctcagagcaaaagaaagttgtatatacccaggtggccaatatccaattccaacaacacagaaaggcagtctccaaagcctcaaagtcccgagatataggaactaggaaacccaagcaacaacctagctccacaagtctgtagtgcccttctcaagccccattaaaaggcaggaagtgggtatgcagcactctcaagggtatctacctctaaaggaagaagcaaagaggacagtcaaatataaactcatagtcctgaattgtagcaaacaagagaggctcactcaagggaagcaaagctgcatttcctgttctgttcctagtaactgctacactaaagtcttaagacacctttgtcatacgcaaggatgattacaaggaaggcacacattagatttctactcaccaccttgagaaaaggataaccactgatgaaaactgtttgcagcagaaaactaattatactaatgttatctttttaaaattcttatttaaccccttaatgattattttagttcattgaactattcaacctttttcttctagtttacttacttttaaagctaatgctatccagaaatgtcttcctggaatttcttattttgccaagaaacaattctctttctaccccccaatctaatcagagcctagaatatgcaaagagatagcaatccatcatccaggacagaaagaatccacgaacatggttgcaaagtgacaaaaacaaataaagcctaatcataaaactctaaataagnccaggtatggtggctcacccctgtaatcccagcgctttggaaggctgaagtgggaagatggcttgagaacaggagtctgagaccagcctaggcaatatattgagcccagtaccaacaaaaattaaaattctaaaaatttgctgaggttgcagtgagctatgattgtgccactgcactccagcctaggagacagagcaagaccctgtctctaaaaatacaaatcaataaatcaaactctgaataggctaattataaagcatacattagaactacaaacctctaaaagcttaccacaaatgtaagccttgtcctatactaaatctggcttcaaaggatttgcagacagtttaataataagcttccaaatgacttctaattatttacacagaagaacacttacatatttaaacataccccttttaattatgaataatgcataattataaattaactatgaaatgctagtctttanacacaatatttggtcaaatcaataaatgcttgacacccggacttgtgcaaggaagacacaggggtatataatctctacctacaggaattctaaaatatacttagaaaatgtttaagtgttaaacaatgttttaactgtcattcaaagaaacaatagaagagatattttaaggtaacacacaattagctcccaaatgaatgacttagtaaatgccatctaacgtgaagagaaaagcgagagagttggcaaagttgtggttagagaagcattcccaagaaagcagaaagtccatgagctctccaaattcacaaacattaactataaaacagttaagagcttactaatttactcttgattttagagaaatacagcctgagatggacagcagtaattgcaaagttattgctcctctcctaagtcaaagataccggaggatggtcaccaaggatggccacagcacacttcaaatggatggcgctcaaagaggtcttgcatatcttcgagatgcttggggaatcctaatggacatgcgctggcgttggatgatgttggtcttttctgcttcttttgttgtccactggcttgtctttgcagtgctctggtatgttctggctgagatgaatggtgatctggaactagatcatgatgccccacctgaaaaccacactatctgtgtcaagtatatcaccagtttcacagctgcattctccttctccctggagacacaactcacaattggttatggtaccatgttccccagtggtgactgtccaagtgcaatcgccttacttgccatacaaatgctcctaggcctcatgctagaggcttttatcacaggtaattttgtctttgttcttaaaaaaaacaaaaacaaaaacaaaacaaaacaaaactacaggtgtttggaaagggtatagtcagttataagtaatgctgttacagaataatttatctatattgatagcaggtaatgtctaagatagaaaagaaacagtttagagccaaaaaaaataggagaaatgcataaggaacctgtctcaatgccaaaattttacttactgtaactacttaagaaaaaagagatcagtatgatactaaattgcagaaatatcccatatcaaaaaaaaaaaattaacaaaaggtttaaaaggaggttttcactgaagctaatcattttgtcaaatacataaataaatacattcaatacctattttgacag

SEQ ID NO: 290273 - DNA, 3056 bp, Homo sapiens
tttttttttgagatggagtcttcctctgttgcccaggctggagtgcagtgctacaaacttggctcactgcaatctcctgcctcagcctcctgagtagctgggattacaggcatgtgccaccagacccagctaatttttgtatttttagtagagacggggtttcatgatgttggccaggctggtctcaaactcctgacctcaaatgacccgcccgcctcgggctcccaaagtgccgggattacaggcgtgagacaccatgcctggccaaaatatcactcattctattggtcccctccccatcccaaatcattctactctgaacctagtctctacttcaacgtaatctggctgtagccaagttgcatttattttctattacttttttttaagcacaggcaggaatataggaaatgaccaattctttgactttgtaagaaactagaggatgaagttttacatttctctgtaacaaaatcattttgcttatctattctgaaatcatggtttttaaacagaaatgtactttgaaaaatgcttcaggcaaataagactgaccaaattaacaatgagttcaattcctgactcactgaaaggcatggcaccaagaaatgtgtaaatatttgatatacacttgtcattcagaaaaagtattgatatttaaagtcttcattctaaaaaaaaatcaataatttcttatttaggtgcttttgtggcgaagattgcccggccaaaaaatcgagctttttcaattcgctttactgacacagcagtagtagctcacatggatggcaaacctaatcttatcttccaagtggccaacacccgacctagccctctaaccagtgtccgggtctcagctgtactctatcaggaaagagaaaatggcaaactctaccagaccagtgtggatttccaccttgatggcatcagttctgacgaatgtccattcttcatctttccactaacgtactatcactccattacaccatcaagtcctctggctactctgctccagcatgaaaatccttctcactttgaattagttgtattcctttcagcaatgcaggagggcactggagaaatatgccaaaggaggacatcctacctaccgtctgaaatcatgttacatcactgttttgcatctctgttgacccgaggttccaaaggtgaatatcaaatcaagatggagaattttgacaagactgtccctgaatttccaactcctctggtttctaaaagcccaaacaggactgacctggatatccacatcaatggacaaagcattgacaattttcagatctctgaaacaggactgacagaataagacttatccattttttaatgtattaaatacacccagccagttatgcagctactttttctttactgtatctcatgttttcttttttcaatgctaattatagctctctacatcacggtaatcatgcctatgcctacataagaatggctgagctaacaatacacattctggaaacataacactctacattacaaagtttgttacctgctgaaatcaatgtaactcaacttgacagacacttatacagaaatgttgctggtgaatttataagaatgtggtatgatactagtaatgaaggcaaaatggacagtgaagtttaacacaactgaactctaagaaaatcaaccattaatctctcattttcatctgcaaattgaagcaacagtttagtttcaaacctagctccctgggtggaatgacgacttcactatacttagtgaatatcctttaagagctgggatttttttcaagacaacaaagatcattcatttggttctttatactatgaaacttgagtaagtattacctccttaatttttaacaactaagaacaaaaattaacgagaaaaacaacaaagtacagatttatacataaacctaaaagcatttgaacatgacacccgaacacatacatatatgttcacttatttgtggcagaaggtgatcagataagctccagcccaaatggaacctgtggggtggtattttgcattgcaaggagacgcaaaattttattttaaaactgtcctccataataatcaaacggtgattcatctaaatgacttctagcaacctaagtaaaaacattcccctcctatgtatgattcatttgatcatataaaacatcatgatggctctaattcataaatacaaaaatatatttaagtctttatagatataaagctttacttagatataacttgagtgagtagggaaaaaaatctacagtagataaagcaaaagataattaggcaacaaagcattttcaaactcaaattcctgtttccaacttcaaatagttttttctataaacacaaaatcagtgtttattcaccagtaggaggttggactagatgaactctattatttctttctaaatctaatagtctataaaaattatgtttcctctgttttttattttatctatgctaaaatgagccctttcccttatgtccagtttaagatgatcatttgcatgattttcatttcaataaaaaaaagagaaactgtccttaaaacaaaacaaaaaccaaaaaagtcaccctatcaggtttcaaacagatttgtggctgttcttttctgaaatttcccttattcaggtttctgtgggaaaaatgaaagattaaccttccccactggtgatgacctaggcaggaatcatctcttgaaataaatactagctgagtaaaggcaagcaggtgtgaagagcagggctcagcagcaagtcacatttttctactatttgaccaaaaggaaaagaaaataaagaagaactctggagtggtctaagactgataatagcagaagaatatcaagaacacagaaacttaattattgtgaacttttgctgtttgaaaatcttagacattcattcttaagtagaaatcagaccaacagattttcccaacccaagactattgtaacacataaagacagcaagaattcttatttctataataaattaacaagattcacctaacctttgaaaataaagtagtattgaagacttaaaaaa

SEQ ID NO: 290274 - DNA, 2721 bp, Homo sapiens
agcggagtccaagaagagaacctacaaactagacttgtagattaaaattatctgatcaaaaaggcagactctgtaaatttccttaagacctaccttggcataaaggctgacccagcaaaagaactgagaaatacagcctgagatggacagcagtaattgcaaagttattgctcctctcctaagtcaaagataccggaggatggtcaccaaggatggccacagcacacttcaaatggatggcgctcaaagaggtcttgcatatcttcgagatgcttggggaatcctaatggacatgcgctggcgttggatgatgttggtcttttctgcttcttttgttgtccactggcttgtctttgcagtgctctggtgcttttgtggcgaagattgcccggccaaaaaatcgagctttttcaattcgctttactgacacagcagtagtagctcacatggatggcaaacctaatcttatcttccaagtggccaacacccgacctagccctctaaccagtgtccgggtctcagctgtactctatcaggaaagagaaaatggcaaactctaccagaccagtgtggatttccaccttgatggcatcagttctgacgaatgtccattcttcatctttccactaacgtactatcactccattacaccatcaagtcctctggctactctgctccagcatgaaaatccttctcactttgaattagttgtattcctttcagcaatgcaggagggcactggagaaatatgccaaaggaggacatcctacctaccgtctgaaatcatgttacatcactgttttgcatctctgttgacccgaggttccaaaggtgaatatcaaatcaagatggagaattttgacaagactgtccctgaatttccaactcctctggtttctaaaagcccaaacaggactgacctggatatccacatcaatggacaaagcattgacaattttcagatctctgaaacaggactgacagaataagacttatccattttttaatgtattaaatacacccagccagttatgcagctactttttctttactgtatctcatgttttcttttttcaatgctaattatagctctctacatcacggtaatcatgcctatgcctacataagaatggctgagctaacaatacacattctggaaacataacactctacattacaaagtttgttacctgctgaaatcaatgtaactcaacttgacagacacttatacagaaatgttgctggtgaatttataagaatgtggtatgatactagtaatgaaggcaaaatggacagtgaagtttaacacaactgaactctaagaaaatcaaccattaatctctcattttcatctgcaaattgaagcaacagtttagtttcaaacctagctccctgggtggaatgacgacttcactatacttagtgaatatcctttaagagctgggatttttttcaagacaacaaagatcattcatttggttctttatactatgaaacttgagtaagtattacctccttaatttttaacaactaagaacaaaaattaacgagaaaaacaacaaagtacagatttatacataaacctaaaagcatttgaacatgacacccgaacacatacatatatgttcacttatttgtggcagaaggtgatcagataagctccagcccaaatggaacctgtggggtggtattttgcattgcaaggagacgcaaaattttattttaaaactgtcctccataataatcaaacggtgattcatctaaatgacttctagcaacctaagtaaaaacattcccctcctatgtatgattcatttgatcatataaaacatcatgatggctctaattcataaatacaaaaatatatttaagtctttatagatataaagctttacttagatataacttgagtgagtagggaaaaaaatctacagtagataaagcaaaagataattaggcaacaaagcattttcaaactcaaattcctgtttccaacttcaaatagttttttctataaacacaaaatcagtgtttattcaccagtaggaggttggactagatgaactctattatttctttctaaatctaatagtctataaaaattatgtttcctctgttttttattttatctatgctaaaatgagccctttcccttatgtccagtttaagatgatcatttgcatgattttcatttcaataaaaaaaagagaaactgtccttaaaacaaaacaaaaaccaaaaaagtcaccctatcaggtttcaaacagatttgtggctgttcttttctgaaatttcccttattcaggtttctgtgggaaaaatgaaagattaaccttccccactggtgatgacctaggcaggaatcatctcttgaaataaatactagctgagtaaaggcaagcaggtgtgaagagcagggctcagcagcaagtcacatttttctactatttgaccaaaaggaaaagaaaataaagaagaactctggagtggtctaagactgataatagcagaagaatatcaagaacacagaaacttaattattgtgaacttttgctgtttgaaaatcttagacattcattcttaagtagaaatcagaccaacagattttcccaacccaagactattgtaacacataaagacagcaagaattcttatttctataataaattaacaagattcacctaacctttgaaaataaagtagtattgaagacttaaaaaa

SEQ ID NO: 290275 - DNA, 2957 bp, Homo sapiens
agcggagtccaagaagagaacctacaaactagacttgtagattaaaattatctgatcaaaaaggcagactctgtaaatttccttaagacctaccttggcataaaggctgacccagcaaaagaactgagaaatacagcctgagatggacagcagtaattgcaaagttattgctcctctcctaagtcaaagataccggaggatggtcaccaaggatggccacagcacacttcaaatggatggcgctcaaagaggtcttgcatatcttcgagatgcttggggaatcctaatggacatgcgctggcgttggatgatgttggtcttttctgcttcttttgttgtccactggcttgtctttgcagtgctctggtatgttctggctgagatgaatggtgatctggaactagatcatgatgccccacctgaaaaccacactatctgtgtcaagtatatcaccagtttcacagctgcattctccttctccctggagacacaactcacaattggttatggtaccatgttccccagtggtgactgtccaagtgcaatcgccttacttgccatacaaatgctcctaggcctcatgctagaggcttttatcacaggtgcttttgtggcgaagattgcccggccaaaaaatcgagctttttcaattcgctttactgacacagcagtagtagctcacatggatggcaaacctaatcttatcttccaagtggccaacacccgacctagccctctaaccagtgtccgggtctcagctgtactctatcaggaaagagaaaatggcaaactctaccagaccagtgtggatttccaccttgatggcatcagttctgacgaatgtccattcttcatctttccactaacgtactatcactccattacaccatcaagtcctctggctactctgctccagcatgaaaatccttctcactttgaattagttgtattcctttcagcaatgcaggagggcactggagaaatatgccaaaggaggacatcctacctaccgtctgaaatcatgttacatcactgttttgcatctctgttgacccgaggttccaaaggtgaatatcaaatcaagatggagaattttgacaagactgtccctgaatttccaactcctctggtttctaaaagcccaaacaggactgacctggatatccacatcaatggacaaagcattgacaattttcagatctctgaaacaggactgacagaataagacttatccattttttaatgtattaaatacacccagccagttatgcagctactttttctttactgtatctcatgttttcttttttcaatgctaattatagctctctacatcacggtaatcatgcctatgcctacataagaatggctgagctaacaatacacattctggaaacataacactctacattacaaagtttgttacctgctgaaatcaatgtaactcaacttgacagacacttatacagaaatgttgctggtgaatttataagaatgtggtatgatactagtaatgaaggcaaaatggacagtgaagtttaacacaactgaactctaagaaaatcaaccattaatctctcattttcatctgcaaattgaagcaacagtttagtttcaaacctagctccctgggtggaatgacgacttcactatacttagtgaatatcctttaagagctgggatttttttcaagacaacaaagatcattcatttggttctttatactatgaaacttgagtaagtattacctccttaatttttaacaactaagaacaaaaattaacgagaaaaacaacaaagtacagatttatacataaacctaaaagcatttgaacatgacacccgaacacatacatatatgttcacttatttgtggcagaaggtgatcagataagctccagcccaaatggaacctgtggggtggtattttgcattgcaaggagacgcaaaattttattttaaaactgtcctccataataatcaaacggtgattcatctaaatgacttctagcaacctaagtaaaaacattcccctcctatgtatgattcatttgatcatataaaacatcatgatggctctaattcataaatacaaaaatatatttaagtctttatagatataaagctttacttagatataacttgagtgagtagggaaaaaaatctacagtagataaagcaaaagataattaggcaacaaagcattttcaaactcaaattcctgtttccaacttcaaatagttttttctataaacacaaaatcagtgtttattcaccagtaggaggttggactagatgaactctattatttctttctaaatctaatagtctataaaaattatgtttcctctgttttttattttatctatgctaaaatgagccctttcccttatgtccagtttaagatgatcatttgcatgattttcatttcaataaaaaaaagagaaactgtccttaaaacaaaacaaaaaccaaaaaagtcaccctatcaggtttcaaacagatttgtggctgttcttttctgaaatttcccttattcaggtttctgtgggaaaaatgaaagattaaccttccccactggtgatgacctaggcaggaatcatctcttgaaataaatactagctgagtaaaggcaagcaggtgtgaagagcagggctcagcagcaagtcacatttttctactatttgaccaaaaggaaaagaaaataaagaagaactctggagtggtctaagactgataatagcagaagaatatcaagaacacagaaacttaattattgtgaacttttgctgtttgaaaatcttagacattcattcttaagtagaaatcagaccaacagattttcccaacccaagactattgtaacacataaagacagcaagaattcttatttctataataaattaacaagattcacctaacctttgaaaataaagtagtattgaagacttaaaaaa

SEQ ID NO: 290276 - DNA, 5574 bp, Homo sapiens
  misc_feature (1910)..(1910): n is a, c, g, or t
  misc_feature (2382)..(2382): n is a, c, g, or t
cttttagagacagggtctcgctatgttggccagatcggtcttgaattcccgacctcaagcaatcctcccgactcaacgtcccaaagtgctagtgttacaggcatgagtcaccatgcctggttcctcactttcgttatctgtaaaatgggactaatagtgatacttattactgtgaaacttaagacacctttttttttttttttttttttttaaatagagacaaagtctcactacgttgcctaggctggtctctaactcctggactcaagcaatcctcctgtctcggcctcccgaagtgctgggagccagacacgtttttaataacaataaagcaactaatactttactgagagcttactctgtgccactggcttcacatcagtttgtacatatgaagtatttggtatgattcctggcacatgctaaacaatatatatattagctaatattattaatcattactatctaaagaatcatgaataaagttaacaatggtttaatacagatacttgagacagtttcaggggcaagaaaggcatctactaaaggtgctagaaatttggctatcaaagaccttcttgagaatgcaatatcaatcatttttggaaagactgttatttcaccaaacgcttcctgtattaaaaaaaaaaattaactggctttgaagttagctagacttgaataaccatccaaataatccaaagctcctatttgccttgtgtaaatttcttttatctgtctgagcaccagtgacttcatctgaaaatgggaacaatggctatcttgttgagatactgaagaattaagagataatacagtatgaaagcagttatcacagtgcctatgaagattttgttgtttccaaagcgtagagatcaggtctcctaaaacatttaaaaataatctaacaaaataagggtcattaagtagctatgccaagaaaaaagaatacactaaatgattatgacaacttgttagggtaataagttataaaacattaaaataatgcactaagattttttaaagtctatatcatatgaaactgaaatcgccatctaacctaaataaactgaacaatcatcccagtgttccattagctcaaatctgaagaaaatacaaaaaaaagtctctaatcaccaataaatgttaagttacctcagagcaaaagaaagttgtatatacccaggtggccaatatccaattccaacaacacagaaaggcagtctccaaagcctcaaagtcccgagatataggaactaggaaacccaagcaacaacctagctccacaagtctgtagtgcccttctcaagccccattaaaaggcaggaagtgggtatgcagcactctcaagggtatctacctctaaaggaagaagcaaagaggacagtcaaatataaactcatagtcctgaattgtagcaaacaagagaggctcactcaagggaagcaaagctgcatttcctgttctgttcctagtaactgctacactaaagtcttaagacacctttgtcatacgcaaggatgattacaaggaaggcacacattagatttctactcaccaccttgagaaaaggataaccactgatgaaaactgtttgcagcagaaaactaattatactaatgttatctttttaaaattcttatttaaccccttaatgattattttagttcattgaactattcaacctttttcttctagtttacttacttttaaagctaatgctatccagaaatgtcttcctggaatttcttattttgccaagaaacaattctctttctaccccccaatctaatcagagcctagaatatgcaaagagatagcaatccatcatccaggacagaaagaatccacgaacatggttgcaaagtgacaaaaacaaataaagcctaatcataaaactctaaataagnccaggtatggtggctcacccctgtaatcccagcgctttggaaggctgaagtgggaagatggcttgagaacaggagtctgagaccagcctaggcaatatattgagcccagtaccaacaaaaattaaaattctaaaaatttgctgaggttgcagtgagctatgattgtgccactgcactccagcctaggagacagagcaagaccctgtctctaaaaatacaaatcaataaatcaaactctgaataggctaattataaagcatacattagaactacaaacctctaaaagcttaccacaaatgtaagccttgtcctatactaaatctggcttcaaaggatttgcagacagtttaataataagcttccaaatgacttctaattatttacacagaagaacacttacatatttaaacataccccttttaattatgaataatgcataattataaattaactatgaaatgctagtctttanacacaatatttggtcaaatcaataaatgcttgacacccggacttgtgcaaggaagacacaggggtatataatctctacctacaggaattctaaaatatacttagaaaatgtttaagtgttaaacaatgttttaactgtcattcaaagaaacaatagaagagatattttaaggtaacacacaattagctcccaaatgaatgacttagtaaatgccatctaacgtgaagagaaaagcgagagagttggcaaagttgtggttagagaagcattcccaagaaagcagaaagtccatgagctctccaaattcacaaacattaactataaaacagttaagagcttactaatttactcttgattttagagaaatacagcctgagatggacagcagtaattgcaaagttattgctcctctcctaagtcaaagataccggaggatggtcaccaaggatggccacagcacacttcaaatggatggcgctcaaagaggtcttgcatatcttcgagatgcttggggaatcctaatggacatgcgctggcgttggatgatgttggtcttttctgcttcttttgttgtccactggcttgtctttgcagtgctctggtatgttctggctgagatgaatggtgatctggaactagatcatgatgccccacctgaaaaccacactatctgtgtcaagtatatcaccagtttcacagctgcattctccttctccctggagacacaactcacaattggttatggtaccatgttccccagtggtgactgtccaagtgcaatcgccttacttgccatacaaatgctcctaggcctcatgctagaggcttttatcacaggtgcttttgtggcgaagattgcccggccaaaaaatcgagctttttcaattcgctttactgacacagcagtagtagctcacatggatggcaaacctaatcttatcttccaagtggccaacacccgacctagccctctaaccagtgtccgggtctcagctgtactctatcaggaaagagaaaatggcaaactctaccagaccagtgtggatttccaccttgatggcatcagttctgacgaatgtccattcttcatctttccactaacgtactatcactccattacaccatcaagtcctctggctactctgctccagcatgaaaatccttctcactttgaattagttgtattcctttcagcaatgcaggagggcactggagaaatatgccaaaggaggacatcctacctaccgtctgaaatcatgttacatcactgttttgcatctctgttgacccgaggttccaaaggtgaatatcaaatcaagatggagaattttgacaagactgtccctgaatttccaactcctctggtttctaaaagcccaaacaggactgacctggatatccacatcaatggacaaagcattgacaattttcagatctctgaaacaggactgacagaataagacttatccattttttaatgtattaaatacacccagccagttatgcagctactttttctttactgtatctcatgttttcttttttcaatgctaattatagctctctacatcacggtaatcatgcctatgcctacataagaatggctgagctaacaatacacattctggaaacataacactctacattacaaagtttgttacctgctgaaatcaatgtaactcaacttgacagacacttatacagaaatgttgctggtgaatttataagaatgtggtatgatactagtaatgaaggcaaaatggacagtgaagtttaacacaactgaactctaagaaaatcaaccattaatctctcattttcatctgcaaattgaagcaacagtttagtttcaaacctagctccctgggtggaatgacgacttcactatacttagtgaatatcctttaagagctgggatttttttcaagacaacaaagatcattcatttggttctttatactatgaaacttgagtaagtattacctccttaatttttaacaactaagaacaaaaattaacgagaaaaacaacaaagtacagatttatacataaacctaaaagcatttgaacatgacacccgaacacatacatatatgttcacttatttgtggcagaaggtgatcagataagctccagcccaaatggaacctgtggggtggtattttgcattgcaaggagacgcaaaattttattttaaaactgtcctccataataatcaaacggtgattcatctaaatgacttctagcaacctaagtaaaaacattcccctcctatgtatgattcatttgatcatataaaacatcatgatggctctaattcataaatacaaaaatatatttaagtctttatagatataaagctttacttagatataacttgagtgagtagggaaaaaaatctacagtagataaagcaaaagataattaggcaacaaagcattttcaaactcaaattcctgtttccaacttcaaatagttttttctataaacacaaaatcagtgtttattcaccagtaggaggttggactagatgaactctattatttctttctaaatctaatagtctataaaaattatgtttcctctgttttttattttatctatgctaaaatgagccctttcccttatgtccagtttaagatgatcatttgcatgattttcatttcaataaaaaaaagagaaactgtccttaaaacaaaacaaaaaccaaaaaagtcaccctatcaggtttcaaacagatttgtggctgttcttttctgaaatttcccttattcaggtttctgtgggaaaaatgaaagattaaccttccccactggtgatgacctaggcaggaatcatctcttgaaataaatactagctgagtaaaggcaagcaggtgtgaagagcagggctcagcagcaagtcacatttttctactatttgaccaaaaggaaaagaaaataaagaagaactctggagtggtctaagactgataatagcagaagaatatcaagaacacagaaacttaattattgtgaacttttgctgtttgaaaatcttagacattcattcttaagtagaaatcagaccaacagattttcccaacccaagactattgtaacacataaagacagcaagaattcttatttctataataaattaacaagattcacctaacctttgaaaataaagtagtattgaagacttaaaaaa

SEQ ID NO: 290277 - DNA, 3594 bp, Homo sapiens
tgtcgagaggggacgctccctcctcgtaggcgtccacactggagaaggaataagatgggcgattgcctgggaagcctgacagggcggcggcagctgggatgctggagaggactggccccttgagttactgagtccgatgaatgtgcttgctctgctggaggaaccgcgctcaggttacagtcatcccaatatggttctgaagacatccaagtggagatatggcatttaaattcatgagattggatgagatcccaccaaaggaacaggtttaggtggagacaaccaaataccgatgcctaggacactgcagtgtttagaattcaaggagatgagaaggaaacaggagggaagattgaaaagaagagtccagtgtgttatgaggaaaaccccaagagcatgctgccttacaagacaggtgaaaaatgtgttctgtgaaagaaagagtaattaactgttaaatgttacagactgatcaaataaaatgaagactgagaatggcctgtttgtaagagggagacatcaacctgttgtggaaaagaatgatcacttaaagtctttagaaattctgaaccaactctctagcaggtgatccttgttagaatttgagcccttaacgctatccaggactggaggttgaagggacgatagagggagcaggaggagaatgcacatggattaaggagcgagaacacagaaatcctgggctctcttctcccagccacaaggttaggttgaaaaacagagcagatggaggtagtttgtagcctacaggtgccctgaatgaagcttccacagtgctaaagtggaagaacgagggactccaagggaaggattcaaggctgggcccatgcactgtgtaattcagaagagaccccagaggagatcagcgccctctaattagccctgtatctgggctctacaggacagacatgcctccatttatgcaacaaataagaacagcatctcatgacagtggagaaaacatgggatgtgcaggtagggttttgttttgcctcttggtagtttctttcctacggaaaattctccctctgatctttccaagtcaaaggcttcagcaaacatttgttgaacgcgtggattgtgctaggtgggtgttatggaccatggagaatgctagagatgtaagacatgcgctgtccaatcgcagcgcaggttgtgttgacagccattatacttgcccacgaatctttgagaacattataatgacctttgtgcctcttcttgcaaggtgttttctcagctgttatctcaagacatggatataaaaaactcaccatctagccttaattctccttcctcctacaactgcagtcaatccatcttacccctggagcacggctccatatacataccttcctcctatgtagacagccaccatgaatatccagccatgacattctatagccctgctgtgatgaattacagcattcccagcaatgtcactaacttggaaggtgggcctggtcggcagaccacaagcccaaatgtgttgtggccaacacctgggcacctttctcctttagtggtccatcgccagttatcacatctgtatgcggaacctcaaaagagtccctggtgtgaagcaagatcgctagaacacaccttacctgtaaacagagagacactgaaaaggaaggttagtgggaaccgttgcgccagccctgttactggtccaggttcaaagagggatgctcacttctgcgctgtctgcagcgattacgcatcgggatatcactatggagtctggtcgtgtgaaggatgtaaggccttttttaaaagaagcattcaaggacataatgattatatttgtccagctacaaatcagtgtacaatcgataaaaaccggcgcaagagctgccaggcctgccgacttcggaagtgttacgaagtgggaatggtgaagtgtggctcccggagagagagatgtgggtaccgccttgtgcggagacagagaagtgccgacgagcagctgcactgtgccggcaaggccaagagaagtggcggccacgcgccccgagtgcgggagctgctgctggacgccctgagccccgagcagctagtgctcaccctcctggaggctgagccgccccatgtgctgatcagccgccccagtgcgcccttcaccgaggcctccatgatgatgtccctgaccaagttggccgacaaggagttggtacacatgatcagctgggccaagaagattcccggctttgtggagctcagcctgttcgaccaagtgcggctcttggagagctgttggatggaggtgttaatgatggggctgatgtggcgctcaattgaccaccccggcaagctcatctttgctccagatcttgttctggacagggatgaggggaaatgcgtagaaggaattctggaaatctttgacatgctcctggcaactacttcaaggtttcgagagttaaaactccaacacaaagaatatctctgtgtcaaggccatgatcctgctcaattccagtatgtaccctctggtcacagcgacccaggatgctgacagcagccggaagctggctcacttgctgaacgccgtgaccgatgctttggtttgggtgattgccaagagcggcatctcctcccagcagcaatccatgcgcctggctaacctcctgatgctcctgtcccacgtcaggcatgcgagggcagaaaaggcctctcaaacactcacctcatttggaatgaagatggagactcttttgcctgaagcaacgatggagcagtgaccctctaatcaactcggtggcctaaagaaaaatcttgggtaacattttcacttcaatttccctctgggatcattgtaatccatgaaaaaaataattttaaagaaagagttaaaatactttgaagttagttatgtggttaaaaaccaccttcctttctattatcaatccaacaatttgataactgtaaacgctaaagtgaagacggattctcttcagatggtctccttaactgcccagggcttgcagatgtctcacccatgaggggcaccaatgtagaaagctgaggcttcatctactgatgagcttcactggtttcccctgaggtttgtgctttggcagagaaggggaggaggggactgggattgtgtggtcagctgtgcctgccaacagatgcaggttaggaactgtgttcagtatcttccaataagaaaggggaaatgccgatgcctatcctctttgtttaggtagaaagtaaaatgctactggacttaaatgggcaacaaggggctttgcctgttcatttgccatggagagggctgggaatccaggtgcggtggctcacacctgtaatcccaacactttgggaggccgaggtgggcagatcagttgaggtcaggagtttgaaaccagcctggccaacatggcgaaaccccgtctctattaaaaatataataattagccaggcatggtggtgtgtgcttgtaatcccagctactcaggaggctgaggcatgagaatggcttgaacctggaaggcaaaggttgcagtgagccgagattgggccaccgcactccagcctgggtgactgacagagtgagacttgtcaaaaa

SEQ ID NO: 290278 - DNA, 2786 bp, Homo sapiens
ctcggtctttaaaaggaagaaggggcttatcgttaagtcgcttgtgatcttttcagtttctccagctgctggctttttggacacccactcccccgccaggaggcagttgcaagcgcggaggctgcgagaaataactgcctcttgaaacttgcagggcgaagagcaggcggcgagcgctgggccggggagggaccacccgagctgcgacgggctctggggctgcggggcagggctggcgcccggagcctgagctgcaggaggtgcgctcgctttcctcaacaggtggcggcggggcgcgcgccgggagaccccccctaatgcgggaaaagcacgtgtccgcattttagagaaggcaaggccggtgtgtttatctgcaagccattatacttgcccacgaatctttgagaacattataatgacctttgtgcctcttcttgcaaggtgttttctcagctgttatctcaagacatggatataaaaaactcaccatctagccttaattctccttcctcctacaactgcagtcaatccatcttacccctggagcacggctccatatacataccttcctcctatgtagacagccaccatgaatatccagccatgacattctatagccctgctgtgatgaattacagcattcccagcaatgtcactaacttggaaggtgggcctggtcggcagaccacaagcccaaatgtgttgtggccaacacctgggcacctttctcctttagtggtccatcgccagttatcacatctgtatgcggaacctcaaaagagtccctggtgtgaagcaagatcgctagaacacaccttacctgtaaacagagagacactgaaaaggaaggttagtgggaaccgttgcgccagccctgttactggtccaggttcaaagagggatgctcacttctgcgctgtctgcagcgattacgcatcgggatatcactatggagtctggtcgtgtgaaggatgtaaggccttttttaaaagaagcattcaaggacataatgattatatttgtccagctacaaatcagtgtacaatcgataaaaaccggcgcaagagctgccaggcctgccgacttcggaagtgttacgaagtgggaatggtgaagtgtggctcccggagagagagatgtgggtaccgccttgtgcggagacagagaagtgccgacgagcagctgcactgtgccggcaaggccaagagaagtggcggccacgcgccccgagtgcgggagctgctgctggacgccctgagccccgagcagctagtgctcaccctcctggaggctgagccgccccatgtgctgatcagccgccccagtgcgcccttcaccgaggcctccatgatgatgtccctgaccaagttggccgacaaggagttggtacacatgatcagctgggccaagaagattcccggctttgtggagctcagcctgttcgaccaagtgcggctcttggagagctgttggatggaggtgttaatgatggggctgatgtggcgctcaattgaccaccccggcaagctcatctttgctccagatcttgttctggacagggatgaggggaaatgcgtagaaggaattctggaaatctttgacatgctcctggcaactacttcaaggtttcgagagttaaaactccaacacaaagaatatctctgtgtcaaggccatgatcctgctcaattccagtatgtaccctctggtcacagcgacccaggatgctgacagcagccggaagctggctcacttgctgaacgccgtgaccgatgctttggtttgggtgattgccaagagcggcatctcctcccagcagcaatccatgcgcctggctaacctcctgatgctcctgtcccacgtcaggcatgcgagggcagaaaaggcctctcaaacactcacctcatttggaatgaagatggagactcttttgcctgaagcaacgatggagcagtgaccctctaatcaactcggtggcctaaagaaaaatcttgggtaacattttcacttcaatttccctctgggatcattgtaatccatgaaaaaaataattttaaagaaagagttaaaatactttgaagttagttatgtggttaaaaaccaccttcctttctattatcaatccaacaatttgataactgtaaacgctaaagtgaagacggattctcttcagatggtctccttaactgcccagggcttgcagatgtctcacccatgaggggcaccaatgtagaaagctgaggcttcatctactgatgagcttcactggtttcccctgaggtttgtgctttggcagagaaggggaggaggggactgggattgtgtggtcagctgtgcctgccaacagatgcaggttaggaactgtgttcagtatcttccaataagaaaggggaaatgccgatgcctatcctctttgtttaggtagaaagtaaaatgctactggacttaaatgggcaacaaggggctttgcctgttcatttgccatggagagggctgggaatccaggtgcggtggctcacacctgtaatcccaacactttgggaggccgaggtgggcagatcagttgaggtcaggagtttgaaaccagcctggccaacatggcgaaaccccgtctctattaaaaatataataattagccaggcatggtggtgtgtgcttgtaatcccagctactcaggaggctgaggcatgagaatggcttgaacctggaaggcaaaggttgcagtgagccgagattgggccaccgcactccagcctgggtgactgacagagtgagacttgtcaaaaa

SEQ ID NO: 290279 - DNA, 2098 bp, Homo sapiens
tgtcgagaggggacgctccctcctcgtaggcgtccacactggagaaggaataagatgggcgattgcctgggaagcctgacagggcggcggcagctgggatgctggagaggactggccccttgagttactgagtccgatgaatgtgcttgctctgctggaggaaccgcgctcaggttacagtcatcccaatatggttctgaagacatccaagtggagatatggcatttaaattcatgagattggatgagatcccaccaaaggaacaggtttaggtggagacaaccaaataccgatgcctaggacactgcagtgtttagaattcaaggagatgagaaggaaacaggagggaagattgaaaagaagagtccagtgtgttatgaggaaaaccccaagagcatgctgccttacaagacaggtgaaaaatgtgttctgtgaaagaaagagtaattaactgttaaatgttacagactgatcaaataaaatgaagactgagaatggcctgtttgtaagatcacttttaaaaggaaaacataggagcctgaaacagaagtgggaaacaaatatttactcaaactaagagactaaactcagtagccagcaacaagagatcaagatggagtcctcctctgtcacccaggctggaacgcagtggtatgatctcggctaactgcaacctcagcctgccaggttcaagcaattcttctgcctcagcctcccgagtagctgggattacaggtgcctgctgccatgatgattaattttatgtgttaacttagctgggctgtgttgcccagatagttggttaaacattattctggatgtttctgtgaagatgtttttggatgaggttaacatttagatcggtggactttgagtaaagcagattacctttcataatttgggtggggctcatccaatcagttgaacatctgaagagaccaaaagactgaccttctgcaagcaaagaaaaattctgccaacagacagccattggacttgaacttcaacattgactcttcagtctattggcccaccctgcaaattttggacttgccagtaagtgtctgaaatctagtgaggcaatttctttcttttttttttttttgagatggagtttcgctcttgttgtccaggctggagtgcagtggtgcgatctcagctcaccgtaacctctgcctcccaggttcaagtgattcttctgcctcagcctcctgagtagctgggattacaggcatgtgccaccacgcctggctacttttgtatttttagtagagatggggtttctccatattggtcaggctggtctcaaattcccaaactcaggtgatccacccgccttggcctcccaaagtgctgggattacaggtgtgagccacagtgcccagcctaatttctttctttctttctttctttttttgagacagagttttgctctttttgaccagaaaggagtgcaatgtggcaggatgttggctcactgcaacctccacctcctggcctctctagtagctgggattacaggcgcctgccaccacgcccagctaatttttgtatttttagtagagatggggtttcaccatgttggccaggctggtctcaaactcctgaaattacgtgatctgcccgccttggcctcccaaagtgctgggattacaggcgtgagccaccatgcctagccgggtagtttatcttgacttgacttcaggctcaccaatccttttggctgcaattctacgatagaaaaggacataaaaaactttaaattagccttagaataaagagatgttatcattccctagcaattagtattcaaagcaagatccaaatatgtaattagtcatttatgtatctaagctgtttgtatgtatgatacaagttttcacatacaaatttcttctttctttctttctttttttttgatagaggcagggtttcacgacattgcccaggctggtcttgagctcaagtgatccatctgccttggcctcccaaagtgctgagattacaggcatgagccacagtgcctggcccaaattattgtagttatttccaattcctttcccccttctcacatcccaattaaagaattccactcagg

SEQ ID NO: 290280 - DNA, 2471 bp, Homo sapiens
tgtcgagaggggacgctccctcctcgtaggcgtccacactggagaaggaataagatgggcgattgcctgggaagcctgacagggcggcggcagctgggatgctggagaggactggccccttgagttactgagtccgatgaatgtgcttgctctgctggaggaaccgcgctcaggttacagtcatcccaatatggttctgaagccattatacttgcccacgaatctttgagaacattataatgacctttgtgcctcttcttgcaaggtgttttctcagctgttatctcaagacatggatataaaaaactcaccatctagccttaattctccttcctcctacaactgcagtcaatccatcttacccctggagcacggctccatatacataccttcctcctatgtagacagccaccatgaatatccagccatgacattctatagccctgctgtgatgaattacagcattcccagcaatgtcactaacttggaaggtgggcctggtcggcagaccacaagcccaaatgtgttgtggccaacacctgggcacctttctcctttagtggtccatcgccagttatcacatctgtatgcggaacctcaaaagagtccctggtgtgaagcaagatcgctagaacacaccttacctgtaaacagagagacactgaaaaggaaggttagtgggaaccgttgcgccagccctgttactggtccaggttcaaagagggatgctcacttctgcgctgtctgcagcgattacgcatcgggatatcactatggagtctggtcgtgtgaaggatgtaaggccttttttaaaagaagcattcaaggacataatgattatatttgtccagctacaaatcagtgtacaatcgataaaaaccggcgcaagagctgccaggcctgccgacttcggaagtgttacgaagtgggaatggtgaagtgtggctcccggagagagagatgtgggtaccgccttgtgcggagacagagaagtgccgacgagcagctgcactgtgccggcaaggccaagagaagtggcggccacgcgccccgagtgcgggagctgctgctggacgccctgagccccgagcagctagtgctcaccctcctggaggctgagccgccccatgtgctgatcagccgccccagtgcgcccttcaccgaggcctccatgatgatgtccctgaccaagttggccgacaaggagttggtacacatgatcagctgggccaagaagattcccgggatgaggggaaatgcgtagaaggaattctggaaatctttgacatgctcctggcaactacttcaaggtttcgagagttaaaactccaacacaaagaatatctctgtgtcaaggccatgatcctgctcaattccagtatgtaccctctggtcacagcgacccaggatgctgacagcagccggaagctggctcacttgctgaacgccgtgaccgatgctttggtttgggtgattgccaagagcggcatctcctcccagcagcaatccatgcgcctggctaacctcctgatgctcctgtcccacgtcaggcatgcgagggcagaaaaggcctctcaaacactcacctcatttggaatgaagatggagactcttttgcctgaagcaacgatggagcagtgaccctctaatcaactcggtggcctaaagaaaaatcttgggtaacattttcacttcaatttccctctgggatcattgtaatccatgaaaaaaataattttaaagaaagagttaaaatactttgaagttagttatgtggttaaaaaccaccttcctttctattatcaatccaacaatttgataactgtaaacgctaaagtgaagacggattctcttcagatggtctccttaactgcccagggcttgcagatgtctcacccatgaggggcaccaatgtagaaagctgaggcttcatctactgatgagcttcactggtttcccctgaggtttgtgctttggcagagaaggggaggaggggactgggattgtgtggtcagctgtgcctgccaacagatgcaggttaggaactgtgttcagtatcttccaataagaaaggggaaatgccgatgcctatcctctttgtttaggtagaaagtaaaatgctactggacttaaatgggcaacaaggggctttgcctgttcatttgccatggagagggctgggaatccaggtgcggtggctcacacctgtaatcccaacactttgggaggccgaggtgggcagatcagttgaggtcaggagtttgaaaccagcctggccaacatggcgaaaccccgtctctattaaaaatataataattagccaggcatggtggtgtgtgcttgtaatcccagctactcaggaggctgaggcatgagaatggcttgaacctggaaggcaaaggttgcagtgagccgagattgggccaccgcactccagcctgggtgactgacagagtgagacttgtcaaaaa

SEQ ID NO: 290281 - DNA, 1429 bp, Homo sapiens
ccttcccttccgattgcatttttctcttttcttttgctgggtgttctttcttcttcatcttttttctgttctgctttttccttttttttttttcataccttcctcctatgtagacagccaccatgaatatccagccatgacattctatagccctgctgtgatgaattacagcattcccagcaatgtcactaacttggaaggtgggcctggtcggcagaccacaagcccaaatgtgttgtggccaacacctgggcacctttctcctttagtggtccatcgccagttatcacatctgtatgcggaacctcaaaagagtccctggtgtgaagcaagatcgctagaacacaccttacctgtaaacagagagacactgaaaaggaaggttagtgggaaccgttgcgccagccctgttactggtccaggttcaaagagggatgctcacttctgcgctgtctgcagcgattacgcatcgggatatcactatggagtctggtcgtgtgaaggatgtaaggccttttttaaaagaagcattcaaggacataatgattatatttgtccagctacaaatcagtgtacaatcgataaaaaccggcgcaagagctgccaggcctgccgacttcggaagtgttacgaagtgggaatggtgaagtgtggctcccggagagagagatgtgggtaccgccttgtgcggagacagagaagtgccgacgagcagctgcactgtgccggcaaggccaagagaagtggcggccacgcgccccgagtgcgggagctgctgctggacgccctgagccccgagcagctagtgctcaccctcctggaggctgagccgccccatgtgctgatcagccgccccagtgcgcccttcaccgaggcctccatgatgatgtccctgaccaagttggccgacaaggagttggtacacatgatcagctgggccaagaagattcccggtatgtaccctctggtcacagcgacccaggatgctgacagcagccggaagctggctcacttgctgaacgccgtgaccgatgctttggtttgggtgattgccaagagcggcatctcctcccagcagcaatccatgcgcctggctaacctcctgatgctcctgtcccacgtcaggcatgcgagtaacaagggcatggaacatctgctcaacatgaagtgcaaaaatgtggtcccagtgtatgacctgctgctggagatgctgaatgcccacgtgcttcgcgggtgcaagtcctccatcacggggtccgagtgcagcccggcagaggacagtaaaagcaaagagggctcccagaacccacagtctcagtgacgcctggccctgaggtgaactggcccacagaggtcacaagctgaagcgtgaactccagtgtgtcaggagcctgggcttcatctttctgctgtgtggtccctcatttgg

SEQ ID NO: 290282 - DNA, 2266 bp, Homo sapiens
ccttcccttccgattgcatttttctcttttcttttgctgggtgttctttcttcttcatcttttttctgttctgctttttccttttttttttttcataccttcctcctatgtagacagccaccatgaatatccagccatgacattctatagccctgctgtgatgaattacagcattcccagcaatgtcactaacttggaaggtgggcctggtcggcagaccacaagcccaaatgtgttgtggccaacacctgggcacctttctcctttagtggtccatcgccagttatcacatctgtatgcggaacctcaaaagagtccctggtgtgaagcaagatcgctagaacacaccttacctgtaaacagagagacactgaaaaggaaggttagtgggaaccgttgcgccagccctgttactggtccaggttcaaagagggatgctcacttctgcgctgtctgcagcgattacgcatcgggatatcactatggagtctggtcgtgtgaaggatgtaaggccttttttaaaagaagcattcaaggacataatgattatatttgtccagctacaaatcagtgtacaatcgataaaaaccggcgcaagagctgccaggcctgccgacttcggaagtgttacgaagtgggaatggtgaagtgtggctcccggagagagagatgtgggtaccgccttgtgcggagacagagaagtgccgacgagcagctgcactgtgccggcaaggccaagagaagtggcggccacgcgccccgagtgcgggagctgctgctggacgccctgagccccgagcagctagtgctcaccctcctggaggctgagccgccccatgtgctgatcagccgccccagtgcgcccttcaccgaggcctccatgatgatgtccctgaccaagttggccgacaaggagttggtacacatgatcagctgggccaagaagattcccggctttgtggagctcagcctgttcgaccaagtgcggctcttggagagctgttggatggaggtgttaatgatggggctgatgtggcgctcaattgaccaccccggcaagctcatctttgctccagatcttgttctggacaggtatgtaccctctggtcacagcgacccaggatgctgacagcagccggaagctggctcacttgctgaacgccgtgaccgatgctttggtttgggtgattgccaagagcggcatctcctcccagcagcaatccatgcgcctggctaacctcctgatgctcctgtcccacgtcaggcatgcgaggtacgcgccctaaggagctgctctgcttgggcttgggatgggattatgtgctccacggagggtgaagtgatttgggaaaagtgtctgcaagttaaggaaaatgaatgcctcatttggaatgaagatggagactcttttgcctgaagcaacgatggagcagtgaccctctaatcaactcggtggcctaaagaaaaatcttgggtaacattttcacttcaatttccctctgggatcattgtaatccatgaaaaaaataattttaaagaaagagttaaaatactttgaagttagttatgtggttaaaaaccaccttcctttctattatcaatccaacaatttgataactgtaaacgctaaagtgaagacggattctcttcagatggtctccttaactgcccagggcttgcagatgtctcacccatgaggggcaccaatgtagaaagctgaggcttcatctactgatgagcttcactggtttcccctgaggtttgtgctttggcagagaaggggaggaggggactgggattgtgtggtcagctgtgcctgccaacagatgcaggttaggaactgtgttcagtatcttccaataagaaaggggaaatgccgatgcctatcctctttgtttaggtagaaagtaaaatgctactggacttaaatgggcaacaaggggctttgcctgttcatttgccatggagagggctgggaatccaggtgcggtggctcacacctgtaatcccaacactttgggaggccgaggtgggcagatcagttgaggtcaggagtttgaaaccagcctggccaacatggcgaaaccccgtctctattaaaaatataataattagccaggcatggtggtgtgtgcttgtaatcccagctactcaggaggctgaggcatgagaatggcttgaacctggaaggcaaaggttgcagtgagccgagattgggccaccgcactccagcctgggtgactgacagagtgagacttgtcaaaaa

SEQ ID NO: 290283 - DNA, 1456 bp, Homo sapiens
tgtcgagaggggacgctccctcctcgtaggcgtccacactggagaaggaataagatgggcgattgcctgggaagcctgacagggcggcggcagctgggatgctggagaggactggccccttgagttactgagtccgatgaatgtgcttgctctgctggaggaaccgcgctcaggttacagtcatcccaatatggttctgaagacatccaagtggagatatggcatttaaattcatgagattggatgagatcccaccaaaggaacaggtttaggtggagacaaccaaataccgatgcctaggacactgcagtgtttagaattcaaggagatgagaaggaaacaggagggaagattgaaaagaagagtccagtgtgttatgaggaaaaccccaagagcatgctgccttacaagacagtggtccatcgccagttatcacatctgtatgcggaacctcaaaagagtccctggtgtgaagcaagatcgctagaacacaccttacctgtaaacagctcctgatgctcctgtcccacgtcaggcatgcgagggcagaaaaggcctctcaaacactcacctcatttggaatgaagatggagactcttttgcctgaagcaacgatggagcagtgaccctctaatcaactcggtggcctaaagaaaaatcttgggtaacattttcacttcaatttccctctgggatcattgtaatccatgaaaaaaataattttaaagaaagagttaaaatactttgaagttagttatgtggttaaaaaccaccttcctttctattatcaatccaacaatttgataactgtaaacgctaaagtgaagacggattctcttcagatggtctccttaactgcccagggcttgcagatgtctcacccatgaggggcaccaatgtagaaagctgaggcttcatctactgatgagcttcactggtttcccctgaggtttgtgctttggcagagaaggggaggaggggactgggattgtgtggtcagctgtgcctgccaacagatgcaggttaggaactgtgttcagtatcttccaataagaaaggggaaatgccgatgcctatcctctttgtttaggtagaaagtaaaatgctactggacttaaatgggcaacaaggggctttgcctgttcatttgccatggagagggctgggaatccaggtgcggtggctcacacctgtaatcccaacactttgggaggccgaggtgggcagatcagttgaggtcaggagtttgaaaccagcctggccaacatggcgaaaccccgtctctattaaaaatataataattagccaggcatggtggtgtgtgcttgtaatcccagctactcaggaggctgaggcatgagaatggcttgaacctggaaggcaaaggttgcagtgagccgagattgggccaccgcactccagcctgggtgactgacagagtgagacttgtcaaaaa

SEQ ID NO: 290284 - DNA, 380 bp, Homo sapiens
gatttgggaaaagtgtctgcaagttaaggaaaatgaatgcctgaaagggaatggggaatttgtcagttcacacacctgtaagcaaagatgggcacagagtgggcatggaaggaatgtcatgtggtatcttacaggctctgcatggcagccagtggtggctcatgggtttttcaattgctggggtttatagcctgtttatggagtcctaaaaggggcagttcctcccctaacacgaactgccacccctgtttacaccacccagggctgaggccctgaggccactttttgtggagaggctaagacccgctcccctagatggcccctcgagctggtgatgcgaagaagtgcacaaatgcttccctaagagttgttctttcggt

SEQ ID NO: 290285 - DNA, 510 bp, Homo sapiens
tgcttatttttccataagaactttcatttttatttaatcctgtgttttttggttttaaagactattttataataaattttcgtgattaaactcttgtgcttaaactcttgattaaacaaacaagcaatgaagagatgaatgaagcagaaaatgtgagtttcatgcctcacattcccactcctctgaggttaatattttcatgtatatttttcaggatgtatttgtaatctcatacaaacgtatgtatttttttaatgaaaatatttaaattttcatagttaacagctgtagctctaacttggcaatatcttctgtgtttctttacagccattatacttgcccacgaatctttgagaacattataatgacctttgtgcctcttcttgcaaggtgttttctcagctgttatctcaagacatggatataaaaaactcaccatctagccttaattctccttcctcctacaactgcagtcaatccatcttacccctggagcacggctccatatac

SEQ ID NO: 290286 - DNA, 2169 bp, Homo sapiens
ctcggtctttaaaaggaagaaggggcttatcgttaagtcgcttgtgatcttttcagtttctccagctgctggctttttggacacccactcccccgccaggaggcagttgcaagcgcggaggctgcgagaaataactgcctcttgaaacttgcagggcgaagagcaggcggcgagcgctgggccggggagggaccacccgagctgcgacgggctctggggctgcggggcagggctggcgcccggagcctgagctgcaggaggtgcgctcgctttcctcaacaggtggcggcggggcgcgcgccgggagaccccccctaatgcgggaaaagcacgtgtccgcattttagagaaggcaaggccggtgtgtttatctgcaagccattatacttgcccacgaatctttgagaacattataatgacctttgtgcctcttcttgcaaggtgttttctcagctgttatctcaagacatggatataaaaaactcaccatctagccttaattctccttcctcctacaactgcagtcaatccatcttacccctggagcacggctccatatacataccttcctcctatgtagacagccaccatgaatatccagccatgacattctatagccctgctgtgatgaattacagcattcccagcaatgtcactaacttggaaggtgggcctggtcggcagaccacaagcccaaatgtgttgtggccaacacctgggcacctttctcctttagtggtccatcgccagttatcacatctgtatgcggaacctcaaaagagtccctggtgtgaagcaagatcgctagaacacaccttacctgtaaacagagagacactgaaaaggaaggttagtgggaaccgttgcgccagccctgttactggtccaggttcaaagagggatgctcacttctgcgctgtctgcagcgattacgcatcgggatatcactatggagtctggtcgtgtgaaggatgtaaggccttttttaaaagaagcattcaaggacataatgattatatttgtccagctacaaatcagtgtacaatcgataaaaaccggcgcaagagctgccaggcctgccgacttcggaagtgttacgaagtgggaatggtgaagtgtggctcccggagagagagatgtgggtaccgccttgtgcggagacagagaagtgccgacgagcagctgcactgtgccggcaaggccaagagaagtggcggccacgcgccccgagtgcgggagctgctgctggacgccctgagccccgagcagctagtgctcaccctcctggaggctgagccgccccatgtgctgatcagccgccccagtgcgcccttcaccgaggcctccatgatgatgtccctgaccaagttggccgacaaggagttggtacacatgatcagctgggccaagaagattcccggctttgtggagctcagcctgttcgaccaagtgcggctcttggagagctgttggatggaggtgttaatgatggggctgatgtggcgctcaattgaccaccccggcaagctcatctttgctccagatcttgttctggacagggatgaggggaaatgcgtagaaggaattctggaaatctttgacatgctcctggcaactacttcaaggtttcgagagttaaaactccaacacaaagaatatctctgtgtcaaggccatgatcctgctcaattccagtatgtaccctctggtcacagcgacccaggatgctgacagcagccggaagctggctcacttgctgaacgccgtgaccgatgctttggtttgggtgattgccaagagcggcatctcctcccagcagcaatccatgcgcctggctaacctcctgatgctcctgtcccacgtcaggcatgcgagtaacaagggcatggaacatctgctcaacatgaagtgcaaaaatgtggtcccagtgtatgacctgctgctggagatgctgaatgcccacgtgcttcgcgggtgcaagtcctccatcacggggtccgagtgcagcccggcagaggacagtaaaagcaaagagggctcccagaacccacagtctcagtgacgcctggccctgaggtgaactggcccacagaggtcacaagctgaagcgtgaactccagtgtgtcaggagcctgggcttcatctttctgctgtgtggtccctcatttgg

SEQ ID NO: 290287 - DNA, 2695 bp, Homo sapiens
  misc_feature (1957)..(1957): n is a, c, g, or t
  misc_feature (2090)..(2090): n is a, c, g, or t
ctcggtctttaaaaggaagaaggggcttatcgttaagtcgcttgtgatcttttcagtttctccagctgctggctttttggacacccactcccccgccaggaggcagttgcaagcgcggaggctgcgagaaataactgcctcttgaaacttgcagggcgaagagcaggcggcgagcgctgggccggggagggaccacccgagctgcgacgggctctggggctgcggggcagggctggcgcccggagcctgagctgcaggaggtgcgctcgctttcctcaacaggtggcggcggggcgcgcgccgggagaccccccctaatgcgggaaaagcacgtgtccgcattttagagaaggcaaggccggtgtgtttatctgcaagccattatacttgcccacgaatctttgagaacattataatgacctttgtgcctcttcttgcaaggtgttttctcagctgttatctcaagacatggatataaaaaactcaccatctagccttaattctccttcctcctacaactgcagtcaatccatcttacccctggagcacggctccatatacataccttcctcctatgtagacagccaccatgaatatccagccatgacattctatagccctgctgtgatgaattacagcattcccagcaatgtcactaacttggaaggtgggcctggtcggcagaccacaagcccaaatgtgttgtggccaacacctgggcacctttctcctttagtggtccatcgccagttatcacatctgtatgcggaacctcaaaagagtccctggtgtgaagcaagatcgctagaacacaccttacctgtaaacagagagacactgaaaaggaaggttagtgggaaccgttgcgccagccctgttactggtccaggttcaaagagggatgctcacttctgcgctgtctgcagcgattacgcatcgggatatcactatggagtctggtcgtgtgaaggatgtaaggccttttttaaaagaagcattcaaggacataatgattatatttgtccagctacaaatcagtgtacaatcgataaaaaccggcgcaagagctgccaggcctgccgacttcggaagtgttacgaagtgggaatggtgaagtgtggctcccggagagagagatgtgggtaccgccttgtgcggagacagagaagtgccgacgagcagctgcactgtgccggcaaggccaagagaagtggcggccacgcgccccgagtgcgggagctgctgctggacgccctgagccccgagcagctagtgctcaccctcctggaggctgagccgccccatgtgctgatcagccgccccagtgcgcccttcaccgaggcctccatgatgatgtccctgaccaagttggccgacaaggagttggtacacatgatcagctgggccaagaagattcccggctttgtggagctcagcctgttcgaccaagtgcggctcttggagagctgttggatggaggtgttaatgatggggctgatgtggcgctcaattgaccaccccggcaagctcatctttgctccagatcttgttctggacagggatgaggggaaatgcgtagaaggaattctggaaatctttgacatgctcctggcaactacttcaaggtttcgagagttaaaactccaacacaaagaatatctctgtgtcaaggccatgatcctgctcaattccagtatgtaccctctggtcacagcgacccaggatgctgacagcagccggaagctggctcacttgctgaacgccgtgaccgatgctttggtttgggtgattgccaagagcggcatctcctcccagcagcaatccatgcgcctggctaacctcctgatgctcctgtcccacgtcaggcatgcgagctctctctcactctcttggagattgtttatgctgagggaagccagctgccatggtgtgaggcagactcctggaggagcccacntgtctgtaagtagaagcagatcttttgaggcctgtcaacagccacgggaatgagcttggaagcagatcccacctcctccctcacacaagtcgagccttcagatgagcctgcagcctttgtcgacaccttgacngcattctcatgagagaccttgagccagagatacttagctaagccatgcccatggactcctgacccacagaaactgtgataataagtttgttgtttcaagctgctaacttatggagtaatatgttacacaaaaatagctaatatatagctcaaaactggaagcaacccaaatatctattaactggtagataaacaaactactcatttccaaacttatttccaaaactggaacactacttggcaatcaaataattaactatgcattaagtgtaacaacctggatgaatctcaaaggcattatgttaagtgaaacaagtgagccacgtaagactacatactgtttgattccctctatatgatattctagaaaaggcaaaactatagtaataggaaacagtgagtgatcacctagggttgaagacaggtgaaaggggattgactgcaaagaggcaggaggaaacgtcttgggagatggagatgttccttatattgatggcggtggtggttacacaactgcacttttatcaaaacttacctaactgctacttaaaataggtgtattaatatttttactgtatgtaaattatacctcaataaatttgattt

SEQ ID NO: 290288 - DNA, 1702 bp, Homo sapiens
ccttcccttccgattgcatttttctcttttcttttgctgggtgttctttcttcttcatcttttttctgttctgctttttccttttttttttttcataccttcctcctatgtagacagccaccatgaatatccagccatgacattctatagccctgctgtgatgaattacagcattcccagcaatgtcactaacttggaaggtgggcctggtcggcagaccacaagcccaaatgtgttgtggccaacacctgggcacctttctcctttagtggtccatcgccagttatcacatctgtatgcggaacctcaaaagagtccctggtgtgaagcaagatcgctagaacacaccttacctgtaaacagagagacactgaaaaggaaggttagtgggaaccgttgcgccagccctgttactggtccaggttcaaagagggatgctcacttctgcgctgtctgcagcgattacgcatcgggatatcactatggagtctggtcgtgtgaaggatgtaaggccttttttaaaagaagcattcaaggacataatgattatatttgtccagctacaaatcagtgtacaatcgataaaaaccggcgcaagagctgccaggcctgccgacttcggaagtgttacgaagtgggaatggtgaagtgtggctcccggagagagagatgtgggtaccgccttgtgcggagacagagaagtgccgacgagcagctgcactgtgccggcaaggccaagagaagtggcggccacgcgccccgagtgcgggagctgctgctggacgccctgagccccgagcagctagtgctcaccctcctggaggctgagccgccccatgtgctgatcagccgccccagtgcgcccttcaccgaggcctccatgatgatgtccctgaccaagttggccgacaaggagttggtacacatgatcagctgggccaagaagattcccggctttgtggagctcagcctgttcgaccaagtgcggctcttggagagctgttggatggaggtgttaatgatggggctgatgtggcgctcaattgaccaccccggcaagctcatctttgctccagatcttgttctggacagggatgaggggaaatgcgtagaaggaattctggaaatctttgacatgctcctggcaactacttcaaggtttcgagagttaaaactccaacacaaagaatatctctgtgtcaaggccatgatcctgctcaattccagtatgtaccctctggtcacagcgacccaggatgctgacagcagccggaagctggctcacttgctgaacgccgtgaccgatgctttggtttgggtgattgccaagagcggcatctcctcccagcagcaatccatgcgcctggctaacctcctgatgctcctgtcccacgtcaggcatgcgagtaacaagggcatggaacatctgctcaacatgaagtgcaaaaatgtggtcccagtgtatgacctgctgctggagatgctgaatgcccacgtgcttcgcgggtgcaagtcctccatcacggggtccgagtgcagcccggcagaggacagtaaaagcaaagagggctcccagaacccacagtctcagtgacgcctggccctgaggtgaactggcccacagaggtcacaagctgaagcgtgaactccagtgtgtcaggagcctgggcttcatctttctgctgtgtggtccctcatttgg

SEQ ID NO: 290289 - DNA, 2500 bp, Homo sapiens
ccttcccttccgattgcatttttctcttttcttttgctgggtgttctttcttcttcatcttttttctgttctgctttttccttttttttttttcataccttcctcctatgtagacagccaccatgaatatccagccatgacattctatagccctgctgtgatgaattacagcattcccagcaatgtcactaacttggaaggtgggcctggtcggcagaccacaagcccaaatgtgttgtggccaacacctgggcacctttctcctttagtggtccatcgccagttatcacatctgtatgcggaacctcaaaagagtccctggtgtgaagcaagatcgctagaacacaccttacctgtaaacagagagacactgaaaaggaaggttagtgggaaccgttgcgccagccctgttactggtccaggttcaaagagggatgctcacttctgcgctgtctgcagcgattacgcatcgggatatcactatggagtctggtcgtgtgaaggatgtaaggccttttttaaaagaagcattcaaggacataatgattatatttgtccagctacaaatcagtgtacaatcgataaaaaccggcgcaagagctgccaggcctgccgacttcggaagtgttacgaagtgggaatggtgaagtgtggctcccggagagagagatgtgggtaccgccttgtgcggagacagagaagtgccgacgagcagctgcactgtgccggcaaggccaagagaagtggcggccacgcgccccgagtgcgggagctgctgctggacgccctgagccccgagcagctagtgctcaccctcctggaggctgagccgccccatgtgctgatcagccgccccagtgcgcccttcaccgaggcctccatgatgatgtccctgaccaagttggccgacaaggagttggtacacatgatcagctgggccaagaagattcccggctttgtggagctcagcctgttcgaccaagtgcggctcttggagagctgttggatggaggtgttaatgatggggctgatgtggcgctcaattgaccaccccggcaagctcatctttgctccagatcttgttctggacaggtatgtaccctctggtcacagcgacccaggatgctgacagcagccggaagctggctcacttgctgaacgccgtgaccgatgctttggtttgggtgattgccaagagcggcatctcctcccagcagcaatccatgcgcctggctaacctcctgatgctcctgtcccacgtcaggcatgcgagatggggagaaaagcaattcattcatttgaagttatcttagtgccaagagtcatgtgaaaatgtcccttgcatgtgggcaatgaaagatttgcagacgatataaaacccagactacctcataaaagagttttgggaatacactgagctttgagtgaaagaagctgcagtggcctccctggagatggggagcaaaccagcttaaaggcccttatcctgaggaagagacaaaaattgacatgcacaatattaagctttgaaatgcagaccacacttcctttcactgcaactttgacttgtcccgcatctctacttaagggcagaaaaggcctctcaaacactcacctcatttggaatgaagatggagactcttttgcctgaagcaacgatggagcagtgaccctctaatcaactcggtggcctaaagaaaaatcttgggtaacattttcacttcaatttccctctgggatcattgtaatccatgaaaaaaataattttaaagaaagagttaaaatactttgaagttagttatgtggttaaaaaccaccttcctttctattatcaatccaacaatttgataactgtaaacgctaaagtgaagacggattctcttcagatggtctccttaactgcccagggcttgcagatgtctcacccatgaggggcaccaatgtagaaagctgaggcttcatctactgatgagcttcactggtttcccctgaggtttgtgctttggcagagaaggggaggaggggactgggattgtgtggtcagctgtgcctgccaacagatgcaggttaggaactgtgttcagtatcttccaataagaaaggggaaatgccgatgcctatcctctttgtttaggtagaaagtaaaatgctactggacttaaatgggcaacaaggggctttgcctgttcatttgccatggagagggctgggaatccaggtgcggtggctcacacctgtaatcccaacactttgggaggccgaggtgggcagatcagttgaggtcaggagtttgaaaccagcctggccaacatggcgaaaccccgtctctattaaaaatataataattagccaggcatggtggtgtgtgcttgtaatcccagctactcaggaggctgaggcatgagaatggcttgaacctggaaggcaaaggttgcagtgagccgagattgggccaccgcactccagcctgggtgactgacagagtgagacttgtcaaaaa

SEQ ID NO: 290290 - DNA, 285 bp, Homo sapiens
gcggcccctactactactaaattcgcggcaggttgttggtgctggggctcatcgagctctcctggaacacatacccttccacatcctgcagctctgctgccctgcacatatgccatgccgtcatcctgctgcagctctggctgggcccgcagcctttccccaagagcacccaacacagcaagaaagcccactgaagtccacccctttccctcaggacctgagtctaccctcaggacctggggttggttggactctgcccttccaaataaaccttgctaagtccaa

SEQ ID NO: 290291 - DNA, 221 bp, Homo sapiens
agggcctaagccttaggggctgcttgggggaagtgtcagttaagctcatggggtgagtctagagtttgactcacaaaaggggcttgataactgtctgaatggcttttctccaggacaggggaaagtatcttgtcgctgctgagggatccctccaaaaggaaggttccaccccagccccttacacccaaccatatccttataaatatgtgaggaaaggtaag

SEQ ID NO: 290292 - DNA, 1551 bp, Homo sapiens
ggtggtgggcccacacaagcggcgcaccgttaagatggcggctgggctgcggaaacgcggccggtccggttccgcggcccaggcagagggactctgcaagcaatggctgcagcgcgcctggcaagagcggcgcctgctgctgcgggagccgcgctacacgctgctggtggccgcctgcctctgcctggcggaggtgggcatcaccttctgggtcattcacagggtggcatacacagagattgactggaaggcctacatggccgaggtagaaggcgtcatcaatggtacctatgactatacccaactgcagggtgacaccggaccacttgtgtacccagctggtttcgtgtacatctttatggggttgtactatgccaccagccgaggcactgacatccgcatggcccagaacatctttgctgtgctctacctggctaccttgctgcttgtcttcttgatctatcaccagacctgcaaggtacctcccttcgtctttttcttcatgtgctgcgcctcttaccgtgtccactccatctttgtgctgcggctcttcaatgacccagtggccatggtgctgctcttcctcagtatcaacctcctgctggcccagcgctggggctggggttgctgctttttcagcctggcagtctctgtgaagatgaatgtgctgctcttcgcccctgggttactgtttcttctcctcacacagtttggcttccgtggggccctccccaagctgggaatctgtgctggccttcaggtggtgctggggctgcccttcctgctggagaaccccagcggctacctgtcccgctcctttgaccttggccgccagtttctgttccactggacagtgaactggcgcttcctcccagaggcgctcttcctgcatcgagccttccacctggccctgttgactgcccacctcaccctgctcctgctgtttgccctctgcaggtggcacaggacaggggaaagtatcttgtcgctgctgagggatccctccaaaaggaaggttccaccccagccccttacacccaaccagatcgtttctaccctcttcacctccaacttcattggcatctgcttcagccgctccctccactaccagttctacgtctggtatttccacacactgccctacctcctgtgggccatgcctgcacgctggctcacacacctgctcaggttgttggtgctggggctcatcgagctctcctggaacacatacccttccacatcctgcagctctgctgccctgcacatatgccatgccgtcatcctgctgcagctctggctgggcccgcagcctttccccaagagcacccaacacagcaagaaagcccactgaagtccacccctttccctcaggacctgagtctaccctcaggacctggggttggttggactctgcccttccaaataaaccttgctaagtccaactctgtgcaacctacatggaggtgggggcagccgatgcctggtccaggctgtgagggacacgtatggagcagataaagaattcactcaagcagaaaaaaaaaaaaaaaa

SEQ ID NO: 290293 - DNA, 1548 bp, Homo sapiens
tcgaaccttaggctaggtagcgaggcctgggtgttgggctgggctgcggaaacgcggccggtccggttccgcggcccaggcagagggactctgcaagcaatggctgcagcgcgcctggcaagagcggcgcctgctgctgcgggagccgcgctacacgctgctggtggccgcctgcctctgcctggcggaggtgggcatcaccttctgggtcattcacagggtggcatacacagagattgactggaaggcctacatggccgaggtagaaggcgtcatcaatggtacctatgactatacccaactgcagggtgacaccggaccacttgtgtacccagctggtttcgtgtacatctttatggggttgtactatgccaccagccgaggcactgacatccgcatggcccagaacatctttgctgtgctctacctggctaccttgctgcttgtcttcttgatctatcaccagacctgcaaggtacctcccttcgtctttttcttcatgtgctgcgcctcttaccgtgtccactccatctttgtgctgcggctcttcaatgacccagtggccatggtgctgctcttcctcagtatcaacctcctgctggcccagcgctggggctggggttgctgctttttcagcctggcagtctctgtgaagatgaatgtgctgctcttcgcccctgggttactgtttcttctcctcacacagtttggcttccgtggggccctccccaagctgggaatctgtgctggccttcaggtggtgctggggctgcccttcctgctggagaaccccagcggctacctgtcccgctcctttgaccttggccgccagtttctgttccactggacagtgaactggcgcttcctcccagaggcgctcttcctgcatcgagccttccacctggccctgttgactgcccacctcaccctgctcctgctgtttgccctctgcaggtggcacaggacaggggaaagtatcttgtcgctgctgagggatccctccaaaaggaaggttccaccccagccccttacacccaaccagatcgtttctaccctcttcacctccaacttcattggcatctgcttcagccgctccctccactaccagttctacgtctggtatttccacacactgccctacctcctgtgggccatgcctgcacgctggctcacacacctgctcaggttgttggtgctggggctcatcgagctctcctggaacacatacccttccacatcctgcagctctgctgccctgcacatatgccatgccgtcatcctgctgcagctctggctgggcccgcagcctttccccaagagcacccaacacagcaagaaagcccactgaagtccacccctttccctcaggacctgagtctaccctcaggacctggggttggttggactctgcccttccaaataaaccttgctaagtccaactctgtgcaacctacatggaggtgggggcagccgatgcctggtccaggctgtgagggacacgtatggagcagataaagaattcactcaagcagaaaaaaaaaaaaaaaa

SEQ ID NO: 290294 - DNA, 1794 bp, Homo sapiens
ggtggtgggcccacacaagcggcgcaccgttaagatggcggctgggctgcggaaacgcggccggtccggttccgcggcccaggcagagggactctgcaagcaatggctgcagcgcgcctggcaagagcggcgcctgctgctgcgggagccgcgctacacgctgctggtggccgcctgcctctgcctggcggaggtgggcatcaccttctgggtcattcacagggtggcatacacagagattgactggaaggcctacatggccgaggtagaaggcgtcatcaatggtacctatgactatacccaactgcagggtgacaccggaccacttgtgtacccagctggtttcgtgtacatctttatggggttgtactatgccaccagccgaggcactgacatccgcatggcccagaacatctttgctgtgctctacctggctaccttgctgcttgtcttcttgatctatcaccagacctgcaaggtacctcccttcgtctttttcttcatgtgctgcgcctcttaccgtgtccactccatctttgtgctgcggctcttcaatgacccagtggccatggtgctgctcttcctcagtatcaacctcctgctggcccagcgctggggctggggttgctgctttttcagcctggcagtctctgtgaagatgaatgtgctgctcttcgcccctgggttactgtttcttctcctcacacagtttggcttccgtggggccctccccaagctgggaatctgtgctggccttcaggtggtgctggggctgcccttcctgctggagaaccccagcggctacctgtcccgctcctttgaccttggccgccagtttctgttccactggacagtgaactggcgcttcctcccagaggcgctcttcctgcatcgagccttccacctggccctgttgactgcccacctcaccctgctcctgctgtttgccctctgcaggtggcacaggacaggggaaagtatcttgtcgctgctgagggatccctccaaaaggaaggttccaccccagccccttacacccaaccagatcgtttctaccctcttcacctccaacttcattggcatctgcttcagccgctccctccactaccagttctacgtctggtatttccacacactgccctacctcctgtgggccatgcctgcacgctggctcacacacctgctcaggttgttggtgctggggctcatcgagctctcctggaacacatacccttccacatcctgcagctctgctgccctgcacatatgccatgccgtcatcctgctgcagctctggctgggcccgcagcctttccccaagagcacccaacacagcaagaaagcccactgaagtccacccctttccctcaggacctgagtctaccctcaggacctggggttggttggactctgcccttccaaataaaccttgctaagtccaactctgtgcaacctacatggaggtgggggcagccgatgcctggtccaggctgtgagggacacgtatggagcagataaagaattcactcaagcagaaaaaaaaaaaaaaaaaaaaaaaaaaaaaaaaaaaaaaaaaaaaaaaaaaaaaaaaaaaaaaaaaaaaagaaaaaaaaaaaaaaaaaaaaaacaaccgggacgcacaatgagagcaagaccaatcgccgcgagagcgacacacaacacaaagacgaaaaccaccgggtgcgtgctagacgaacagcagggccgctccacagagacgaccctgtcatacactagaccgaccgagagcgcgcgaggaaaagaaacacgaga

SEQ ID NO: 290295 - DNA, 1818 bp, Homo sapiens
  misc_feature (1564)..(1564): n is a, c, g, or t
  misc_feature (1571)..(1571): n is a, c, g, or t
ggtggtgggcccacacaagcggcgcaccgttaagatggcggctgggctgcggaaacgcggccggtccggttccgcggcccaggcagagggactctgcaagcaatggctgcagcgcgcctggcaagagcggcgcctgctgctgcgggagccgcgctacacgctgctggtggccgcctgcctctgcctggcggaggtgggcatcaccttctgggtcattcacagggtggcatacacagagattgactggaaggcctacatggccgaggtagaaggcgtcatcaatggtacctatgactatacccaactgcagggtgacaccggaccacttgtgtacccagctggtttcgtgtacatctttatggggttgtactatgccaccagccgaggcactgacatccgcatggcccagaacatctttgctgtgctctacctggctaccttgctgcttgtcttcttgatctatcaccagacctgcaaggtacctcccttcgtctttttcttcatgtgctgcgcctcttaccgtgtccactccatctttgtgctgcggctcttcaatgacccagtggccatggtgctgctcttcctcagtatcaacctcctgctggcccagcgctggggctggggttgctgctttttcagcctggcagtctctgtgaagatgaatgtgctgctcttcgcccctgggttactgtttcttctcctcacacagtttggcttccgtggggccctccccaagctgggaatctgtgctggccttcaggtggtgctggggctgcccttcctgctggagaaccccagcggctacctgtcccgctcctttgaccttggccgccagtttctgttccactggacagtgaactggcgcttcctcccagaggcgctcttcctgcatcgagccttccacctggccctgttgactgcccacctcaccctgctcctgctgtttgccctctgcaggtggcacaggacaggggaaagtatcttgtcgctgctgagggatccctccaaaaggaaggttccaccccagccccttacacccaaccagatcgtttctaccctcttcacctccaacttcattggcatctgcttcagccgctccctccactaccagttctacgtctggtatttccacacactgccctacctcctgtgggccatgcctgcacgctggctcacacacctgctcaggttgttggtgctggggctcatcgagctctcctggaacacatacccttccacatcctgcagctctgctgccctgcacatatgccatgccgtcatcctgctgcagctctggctgggcccgcagcctttccccaagagcacccaacacagcaagaaagcccactgaagtccacccctttccctcaggacctgagtctaccctcaggacctggggttggttggactctgcccttccaaataaaccttgctaagtccaaataaaccttgctaagtccaaaaaaaaaaaaaaaaaaaaaaacacccgcgctctatctgcgcgcgggcggcgcaccacagcgttcagaaacggcaacaggttcaaagctcttcccgacccccntttttgnccaaggggaatgccggaccctaaaggagcggctaaaattgcaaacccggtcgtaattgtcgccgatcaaaaacagcgaacaacatccacagcggcgtgatcacacttcataacaactgacgcagacaaaccacacccagcaacatgacaacacgataaacaacaacgatacaaacatataactacgtctagcaggacgacacaacaacaccacactaatctgaccccaatacaaaaacactaggcca

SEQ ID NO: 290296 - DNA, 1549 bp, Homo sapiens
ggtggtgggcccacacaagcggcgcaccgttaagatggcggctgggctgcggaaacgcggccggtccggttccgcggcccaggcagagggactctgcaagcaatggctgcagcgcgcctggcaagagcggcgcctgctgctgcgggagccgcgctacacgctgctggtggccgcctgcctctgcctggcggaggtgggcatcaccttctgggtcattcacagggtggcatacacagagattgactggaaggcctacatggccgaggtagaaggcgtcatcaatggtacctatgactatacccaactgcagggtgacaccggaccacttgtgtacccagctggtttcgtgtacatctttatggggttgtactatgccaccagccgaggcactgacatccgcatggcccagaacatctttgctgtgctctacctggctaccttgctgcttgtcttcttgatctatcaccagacctgcaaggtacctcccttcgtctttttcttcatgtgctgcgcctcttaccgtgtccactccatctttgtgctgcggctcttcaatgacccagtggccatggtgctgctcttcctcagtatcaacctcctgctggcccagcgctggggctggggttgctgctttttcagcctggcagtctctgtgaagatgaatgtgctgctcttcgcccctgggttactgtttcttctcctcacacagtttggcttccgtggggccctccccaagctgggaatctgtgctggccttcaggtggtgctggggctgcccttcctgctggagaaccccagcggctacctgtcccgctcctttgaccttggccgccagtttctgttccactggacagtgaactggcgcttcctcccagaggcgctcttcctgcatcgagccttccacctggccctgttgactgcccacctcaccctgctcctgctgtttgccctctgcaggtggcacaggacaggggaaagtatcttgtcgctgctgagggatccctccaaaaggaaggttccaccccagccccttacacccaaccagatcgtttctaccctcttcacctccaacttcattggcatctgcttcagccgctccctccactaccagttctacgtctggtatttccacacactgccctacctcctgtgggccatgcctgcacgctggctcacacacctgctcaggttgttggtgctggggctcatcgagctctcctggaacacatacccttccacatcctgcagctctgctgccctgcacatatgccatgccgtcatcctgctgcagctctggctgggcccgcagcctttccccaagagcacccaacacagcaagaaagcccactgaagtcacctttcctcagactgagtctacctcagacgggtggttgactctgcctcaataacttgtagtcaaaaaaaagggggcgaaaataccgggggccatacgcctttgcaagggccagagtaaaacgggcggtaaaggaggaagcggctggggccttggggaaggccccacacggaaaatggagccggggctaacaag

SEQ ID NO: 290297 - DNA, 1572 bp, Homo sapiens
tcttcgaagaatcctccggctgggaaaactatcgtccagaccctgaatcctccggctgtactgccaagtcatttcctagggccgcactcaaggtgtcagactcacgtgggctcatcactgcgtcctctcatattttcaatatgaatgacttttatcaggaaatctgaaaattagtgaaaggttcatttttctcagcatccggaaggctcgaagggcaggcaggaggggcgcgaacaggggctttgccctcctggagagacagcatgaacacagatgttcccagcgcaggcgaaggagaatgctggcttcagcggttgtgggggagacacagagattgactggaaggcctacatggccgaggtagaaggcgtcatcaatggtacctatgactatacccaactgcagggtgacaccggaccacttgtgtacccagctggtttcgtgtacatctttatggggttgtactatgccaccagccgaggcactgacatccgcatggcccagaacatctttgctgtgctctacctggctaccttgctgcttgtcttcttgatctatcaccagacctgcaaggtacctcccttcgtctttttcttcatgtgctgcgcctcttaccgtgtccactccatctttgtgctgcggctcttcaatgacccagtggccatggtgctgctcttcctcagtatcaacctcctgctggcccagcgctggggctggggttgctgctttttcagcctggcagtctctgtgaagatgaatgtgctgctcttcgcccctgggttactgtttcttctcctcacacagtttggcttccgtggggccctccccaagctgggaatctgtgctggccttcaggtggtgctggggctgcccttcctgctggagaaccccagcggctacctgtcccgctcctttgaccttggccgccagtttctgttccactggacagtgaactggcgcttcctcccagaggcgctcttcctgcatcgagccttccacctggccctgttgactgcccacctcaccctgctcctgctgtttgccctctgcaggtggcacaggacaggggaaagtatcttgtcgctgctgagggatccctccaaaaggaaggttccaccccagccccttacacccaaccagatcgtttctaccctcttcacctccaacttcattggcatctgcttcagccgctccctccactaccagttctacgtctggtatttccacacactgccctacctcctgtgggccatgcctgcacgctggctcacacacctgctcaggttgttggtgctggggctcatcgagctctcctggaacacatacccttccacatcctgcagctctgctgccctgcacatatgccatgccgtcatcctgctgcagctctggctgggcccgcagcctttccccaagagcacccaacacagcaagaaagcccactgaagtccacccctttccctcaggacctgagtctaccctcaggacctggggttggttggactctgcccttccaaataaaccttgctaagtccaaaaaaaaaaatggggtttttcgggcgggaaaagata

SEQ ID NO: 290298 - DNA, 1517 bp, Homo sapiens
caaacttaggctaggtagcgaggctgggtgttatcaggtgtcagactcacgtgggctcatcactgcgtcctctcatattttcaatatgaatgacttttatcaggaaatctgaaaattagtgaaaggttcatttttctcagcatccggaaggctcgaagggcaggcaggaggggcgcgaacaggggctttgccctcctggagagacagcatgaacacagatgttcccagcgcaggcgaaggagaatgctggcttcagcggttgtgggggagacacagagattgactggaaggcctacatggccgaggtagaaggcgtcatcaatggtacctatgactatacccaactgcagggtgacaccggaccacttgtgtacccagctggtttcgtgtacatctttatggggttgtactatgccaccagccgaggcactgacatccgcatggcccagaacatctttgctgtgctctacctggctaccttgctgcttgtcttcttgatctatcaccagacctgcaaggtacctcccttcgtctttttcttcatgtgctgcgcctcttaccgtgtccactccatctttgtgctgcggctcttcaatgacccagtggccatggtgctgctcttcctcagtatcaacctcctgctggcccagcgctggggctggggttgctgctttttcagcctggcagtctctgtgaagatgaatgtgctgctcttcgcccctgggttactgtttcttctcctcacacagtttggcttccgtggggccctccccaagctgggaatctgtgctggccttcaggtggtgctggggctgcccttcctgctggagaaccccagcggctacctgtcccgctcctttgaccttggccgccagtttctgttccactggacagtgaactggcgcttcctcccagaggcgctcttcctgcatcgagccttccacctggccctgttgactgcccacctcaccctgctcctgctgtttgccctctgcaggtggcacaggacaggggaaagtatcttgtcgctgctgagggatccctccaaaaggaaggttccaccccagccccttacacccaaccagatcgtttctaccctcttcacctccaacttcattggcatctgcttcagccgctccctccactaccagttctacgtctggtatttccacacactgccctacctcctgtgggccatgcctgcacgctggctcacacacctgctcaggttgttggtgctggggctcatcgagctctcctggaacacatacccttccacatcctgcagctctgctgccctgcacatatgccatgccgtcatcctgctgcagctctggctgggcccgcagcctttccccaagagcacccaacacagcaagaaagcccactgaagtccacccctttccctcaggacctgagtctaccctcaggacctggggttggttggactctgcccttccaaataaaccttgctaagtccaaaaaaaaaaatggggtttttcgggcgggaaaagata

SEQ ID NO: 290299 - DNA, 1375 bp, Homo sapiens
tcgaaccttaggctaggtagcgaggcctgggtgttgggctgggctgcggaaacgcggccggtccggttccgcggcccaggcagagggactctgcaagcaatggctgcagcgcgcctggcaagagcggcgcctgctgctgcgggagccgcgctacacgctgctggtggccgcctgcctctgcctggcggaggtgggcatcaccttctgggtcattcacagggtggcattgtacccagctggtttcgtgtacatctttatggggttgtactatgccaccagccgaggcactgacatccgcatggcccagaacatctttgctgtgctctacctggctaccttgctgcttgtcttcttgatctatcaccagacctgcaaggtacctcccttcgtctttttcttcatgtgctgcgcctcttaccgtgtccactccatctttgtgctgcggctcttcaatgacccagtggccatggtgctgctcttcctcagtatcaacctcctgctggcccagcgctggggctggggttgctgctttttcagcctggcagtctctgtgaagatgaatgtgctgctcttcgcccctgggttactgtttcttctcctcacacagtttggcttccgtggggccctccccaagctgggaatctgtgctggccttcaggtggtgctggggctgcccttcctgctggagaaccccagcggctacctgtcccgctcctttgaccttggccgccagtttctgttccactggacagtgaactggcgcttcctcccagaggcgctcttcctgcatcgagccttccacctggccctgttgactgcccacctcaccctgctcctgctgtttgccctctgcaggtggcacaggacaggggaaagtatcttgtcgctgctgagggatccctccaaaaggaaggttccaccccagccccttacacccaaccagatcgtttctaccctcttcacctccaacttcattggcatctgcttcagccgctccctccactaccagttctacgtctggtatttccacacactgccctacctcctgtgggccatgcctgcacgctggctcacacacctgctcaggttgttggtgctggggctcatcgagctctcctggaacacatacccttccacatcctgcagctctgctgccctgcacatatgccatgccgtcatcctgctgcagctctggctgggcccgcagcctttccccaagagcacccaacacagcaagaaagcccactgaagtccacccctttccctcaggacctgagtctaccctcaggacctggggttggttggactctgcccttccaaataaaccttgctaagtccaaaaaaaaaaatggggtttttcgggcgggaaaagata

SEQ ID NO: 290300 - DNA, 1915 bp, Homo sapiens
tcgaaccttaggctaggtagcgaggcctgggtgttgggctgggctgcggaaacgcggccggtccggttccgcggcccaggcagagggactctgcaagcaatggctgcagcgcgcctggcaagagcggcgcctgctgctgcgggagccgcgctacacgctgctggtggccgcctgcctctgcctggcggaggtgggcatcaccttctgggtcattcacagggtggcatacacagagattgactggaaggcctacatggccgaggtagaaggcgtcatcaatggtacctatgactatacccaactgcagggtgacaccggaccacttgtgtacccagctggtttcgtgtacatctttatggggttgtactatgccaccagccgaggcactgacatccgcatggcccagaacatctttgctgtgctctacctggctaccttgctgcttgtcttcttgatctatcaccagacctgcaaggtacctcccttcgtctttttcttcatgtgctgcgcctcttaccgtgtccactccatctttgtgctgcggctcttcaatgacccagtggccatggtgctgctcttcctcagtatcaacctcctgctggcccagcgctggggctggggttgctgctttttcaggtcaacacctcttcctttctggtcccctctcgttttctgcatttccatctcttcccaatttcctgcagcagagggagtaaaggagtagccaagacagcatgggtcactcagggctccacaaagcgagtccaggatctatagaaagtttctgccctgccatcccccaacatacacacatgccctctttccatcctgtcttcctcccagacagcattccttgttggaattagtccttcacattctaaatactcagtatatgctcattcgcatctagtaggcatagagactatgtatctgcctcctgcctactccaggctcttccctccaacagttgtgagtgtaggtcccatcttggagtttgttggcgtggcggcgggggggaggttgctgtggtgatggtggggggtatgtctttgggtgttgtgtgcatggccctggagctgatctccacccttcctctcccctgctcaccccagcctggcagtctctgtgaagatgaatgtgctgctcttcgcccctgggttactgtttcttctcctcacacagtttggcttccgtggggccctccccaagctgggaatctgtgctggccttcaggtggtgctggggctgcccttcctgctggagaaccccagcggctacctgtcccgctcctttgaccttggccgccagtttctgttccactggacagtgaactggcgcttcctcccagaggcgctcttcctgcatcgagccttccacctggccctgttgactgcccacctcaccctgctcctgctgtttgccctctgcaggtggcacaggacaggggaaagtatcttgtcgctgctgagggatccctccaaaaggaaggttccaccccagccccttacacccaaccagatcgtttctaccctcttcacctccaacttcattggcatctgcttcagccgctccctccactaccagttctacgtctggtatttccacacactgccctacctcctgtgggccatgcctgcacgctggctcacacacctgctcaggttgttggtgctggggctcatcgagctctcctggaacacatacccttccacatcctgcagctctgctgccctgcacatatgccatgccgtcatcctgctgcagctctggctgggcccgcagcctttccccaagagcacccaacacagcaagaaagcccactgaagtccacccctttccctcaggacctgagtctaccctcaggacctggggttggttggactctgcccttccaaataaaccttgctaagtccaa

SEQ ID NO: 290301 - DNA, 831 bp, Homo sapiens
tgactgagcaagctggcaggctgagcagcctggcagtctctgtgaagatgaatgtgctgctcttcgcccctgggttactgtttcttctcctcacacagtttggcttccgtggggccctccccaagctgggaatctgtgctggccttcaggtggtgctggggctgcccttcctgctggagaaccccagcggctacctgtcccgctcctttgaccttggccgccagtttctgttccactggacagtgaactggcgcttcctcccagaggcgctcttcctgcatcgagccttccacctggccctgttgactgcccacctcaccctgctcctgctgtttgccctctgcaggtggcacaggacaggggaaagtatcttgtcgctgctgagggatccctccaaaaggaaggttccaccccagccccttacacccaaccagatcgtttctaccctcttcacctccaacttcattggcatctgcttcagccgctccctccactaccagttctacgtctggtatttccacacactgccctacctcctgtgggccatgcctgcacgctggctcacacacctgctcaggttgttggtgctggggctcatcgagctctcctggaacacatacccttccacatcctgcagctctgctgccctgcacatatgccatgccgtcatcctgctgcagctctggctgggcccgcagcctttccccaagagcacccaacacagcaagaaagcccactgaagtccacccctttccctcaggacctgagtctaccctcaggacctggggttggttggactctgcccttccaaataaaccttgctaagtccaa

SEQ ID NO: 290302 - DNA, 1195 bp, Homo sapiens
tcgaaccttaggctaggtagcgaggcctgggtgttgggctgggctgcggaaacgcggccggtccggttccgcggcccaggcagagggactctgcaagcaatggctgcagcgcgcctggcaagagcggcgcctgctgctgcgggagccgcgctacacgctgctggtggccgcctgcctctgcctggcggagacacagagattgactggaaggcctacatggccgaggtagaaggcgtcatcaatggtacctatgactatacccaactgcagggtgacaccggaccacttgtgtacccagctggtttcgtgtacatctttatggggttgtactatgccaccagccgaggcactgacatccgcatggcccagaacatctttgctgtgctctacctggctaccttgctgcttgtcttcttgatctatcaccagacctgcaaggtacctcccttcgtctttttcttcatgtgctgcgcctcttaccgtgtccactccatctttgtgctgcggctcttcaatgacccagtggccatggtgctgctcttcctcagtatcaacctcctgctggcccagcgctggggctggggttgctgctttttcagcctggcagtctctgtgaagatgaatgtgctgctcttcgcccctgggttactgtttcttctcctcacacagtttggcttccgtggggccctccccaagctgggaatctgtgctggcctcaggacaggggaaagtatcttgtcgctgctgagggatccctccaaaaggaaggttccaccccagccccttacacccaaccagatcgtttctaccctcttcacctccaacttcattggcatctgcttcagccgctccctccactaccagttctacgtctggtatttccacacactgccctacctcctgtgggccatgcctgcacgctggctcacacacctgctcaggttgttggtgctggggctcatcgagctctcctggaacacatacccttccacatcctgcagctctgctgccctgcacatatgccatgccgtcatcctgctgcagctctggctgggcccgcagcctttccccaagagcacccaacacagcaagaaagcccactgaagtccacccctttccctcaggacctgagtctaccctcaggacctggggttggttggactctgcccttccaaataaaccttgctaagtccaa

SEQ ID NO: 290303 - DNA, 890 bp, Homo sapiens
tcgaaccttaggctaggtagcgaggcctgggtgttgggctgggctgcggaaacgcggccggtccggttccgcggcccaggcagagggactctgcaagcaatggctgcagcgcgcctggcaagagcggcgcctgctgctgcgggagccgcgctacacgctgctggtggccgcctgcctctgcctggcggaggtgggcatcaccttctgggtcattcacagggtggcatacacagagattgactggaaggcctacatggccgaggtagaaggcgtcatcaatggtacctatgactatacccaactgcagggtgacaccggaccacttgtgtacccagctggtttcgtgtacatctttatggggttgtactatgccaccagccgaggcactgacatccgcatggcccagaacatctttgctgtgctctacctggctaccttgctgcttgtcttcttgatctatcaccagacctgcaaggtacctcccttcgtctttttcttcatgtgctgcgcctcttaccgtgtccactccatctttgtgctgcggctcttcaatgacccagtggccatggtgctgctcttcctcagtatcaacctcctgctggcccagcgctggggctggggttgctgctttttcaggttgttggtgctggggctcatcgagctctcctggaacacatacccttccacatcctgcagctctgctgccctgcacatatgccatgccgtcatcctgctgcagctctggctgggcccgcagcctttccccaagagcacccaacacagcaagaaagcccactgaagtccacccctttccctcaggacctgagtctaccctcaggacctggggttggttggactctgcccttccaaataaaccttgctaagtccaa

SEQ ID NO: 290304 - DNA, 897 bp, Homo sapiens
aggggaccccaatcatagaagtcctattctgcaccactgtgctgagcacttcacatattgaaggatatttgattcttaattctaaatacgagctactcttatgagtacttctccctggtactatcataagagatttacatatgttctaatattgaaagctcacaagagaccccgagacagggaggtacacttacatttactattctcattttacagatggaaaaattaagacttcatgaggttaagtaacttaccaaggtcacacagccagtaagttaggggttcaaacccacaagaccttatggccctaggtattactctctccatattccatatttggttgaggagcaggtccagagaggttaataaacttgcccaaaggcatgcatcaaggaatggcagagccagagggctatgtgacctaaaaactattgcccctctgttttgggatagtcccccccacacacactcctgcccttggccttgaccaccgcatacagatcgtttctaccctcttcacctccaacttcattggcatctgcttcagccgctccctccactaccagttctacgtctggtatttccacacactgccctacctcctgtgggccatgcctgcacgctggctcacacacctgctcaggttgttggtgctggggctcatcgagctctcctggaacacatacccttccacatcctgcagctctgctgccctgcacatatgccatgccgtcatcctgctgcagctctggctgggcccgcagcctttccccaagagcacccaacacagcaagaaagcccactgaagtccacccctttccctcaggacctgagtctaccctcaggacctggggttggttggactctgcccttccaaataaaccttgctaagtccaa

SEQ ID NO: 290305 - DNA, 199 bp, Homo sapiens
ggcagacaagttctagactcagaagtaaccagatcatcttgtcttcttccagacacagagattgactggaaggcctacatggccgaggtagaaggcgtcatcaatggtacctatgactatacccaactgcagggtgacaccggaccacttgtgtgagtggggacaggaagttcagggaggatgtgaggggctggttagg

SEQ ID NO: 290306 - DNA, 1442 bp, Homo sapiens
ggtggtgggcccacacaagcggcgcaccgttaagatggcggctgggctgcggaaacgcggccggtccggttccgcggcccaggcagagggactctgcaagcaatggctgcagcgcgcctggcaagagcggcgcctgctgctgcgggagccgcgctacacgctgctggtggccgcctgcctctgcctggcggaggtgggcatcaccttctgggtcattcacagggtggcatacacagagattgactggaaggcctacatggccgaggtagaaggcgtcatcaatggtacctatgactatacccaactgcagggtgacaccggaccacttgtgtacccagctggtttcgtgtacatctttatggggttgtactatgccaccagccgaggcactgacatccgcatggcccagaacatctttgctgtgctctacctggctaccttgctgcttgtcttcttgatctatcaccagacctgcaaggtacctcccttcgtctttttcttcatgtgctgcgcctcttaccgtgtccactccatctttgtgctgcggctcttcaatgacccagtggccatggtgctgctcttcctcagtatcaacctcctgctggcccagcgctggggctggggttgctgctttttcagcctggcagtctctgtgaagatgaatgtgctgctcttcgcccctgggttactgtttcttctcctcacacagtttggcttccgtggggccctccccaagctgggaatctgtgctggccttcaggtggtgctggggctgcccttcctgctggagaaccccagcggctacctgtcccgctcctttgaccttggccgccagtttctgttccactggacagtgaactggcgcttcctcccagaggcgctcttcctgcatcgagccttccacctggccctgttgactgcccacctcaccctgctcctgctgtttgccctctgcaggtggcacaggacaggggaaagtatcttgtcgctgctgagggatccctccaaaaggaaggttccaccccagccccttacacccaaccagatcgtttctaccctcttcacctccaacttcattggcatctgcttcagccgctccctccactaccagttctacgtctggtatttccacacactgccctacctcctgtgggccatgcctgcacgctggctcacacacctgctcaggttgttggtgctggggctcatcgagctctcctggaacacatacccttccacatcctgcagctctgctgccctgcacatatgccatgccgtcatcctgctgcagctctggctgggcccgcagcctttccccaagagcacccaacacagcaagaaagcccactgaagtccacccctttccctcaggacctgagtctaccctcaggacctggggttggttggactctgcccttccaaataaaccttgctaagtccaa

SEQ ID NO: 290307 - DNA, 1477 bp, Homo sapiens
ggtggtgggcccacacaagcggcgcaccgttaagatggcggctgggctgcggaaacgcggccggtccggttccgcggcccaggcagagggactctgcaagcaatggctgcagcgcgcctggcaagagcggcgcctgctgctgcgggagccgcgctacacgctgctggtggccgcctgcctctgcctggcggaggtgggcatcaccttctgggtcattcacagggtggcatacacagagattgactggaaggcctacatggccgaggtagaaggcgtcatcaatggtacctatgactatacccaactgcagggtgacaccggaccacttgtgtacccagctggtttcgtgtacatctttatggggttgtactatgccaccagccgaggcactgacatccgcatggcccagaacatctttgctgtgctctacctggctaccttgctgcttgtcttcttgatctatcaccagacctgcaaggtacctcccttcgtctttttcttcatgtgctgcgcctcttaccgtgtccactccatctttgtgctgcggctcttcaatgacccagtggccatggtgctgctcttcctcagtatcaacctcctgctggcccagcgctggggctggggttgctgctttttcagcctggcagtctctgtgaagatgaatgtgctgctcttcgcccctgggttactgtttcttctcctcacacagtttggcttccgtggggccctccccaagctgggaatctgtgctggccttcaggtggtgctggggctgcccttcctgctggagaaccccagcggctacctgtcccgctcctttgaccttggccgccagtttctgttccactggacagtgaactggcgcttcctcccagaggcgctcttcctgcatcgagccttccacctggccctgttgactgcccacctcaccctgctcctgctgtttgccctctgcaggtggcacaggacaggggaaagtatcttgtcgctgctgagggatccctccaaaaggaaggttccaccccagccccttacacccaaccagatcgtttctaccctcttcacctccaacttcattggcatctgcttcagccgctccctccactaccagttctacgtctggtatttccacacactgccctacctcctgtgggccatgcctgcacgctggctcacacacctgctcaggttgttggtgctggggctcatcgagctctcctggaacacatacccttccacatcctgcagctctgctgccctgcacatatgccatgccgtcatcctgctgcagctctggctgggcccgcagcctttccccaagagcacccaacacagcaagaaagcccactgaagtccacccctttccctcaggacctgagtctaccctcaggacctggggttggttggactctgcccttccaaataaaccttgctaagtccaaaaaaaaaaatggggtttttcgggcgggaaaagata

SEQ ID NO: 290308 - DNA, 2551 bp, Homo sapiens
ggtggtgggcccacacaagcggcgcaccgttaagatggcggctgggctgcggaaacgcggccggtccggttccgcggcccaggcagagggactctgcaagcaatggctgcagcgcgcctggcaagagcggcgcctgctgctgcgggagccgcgctacacgctgctggtggccgcctgcctctgcctggcggaggtgggcatcaccttctgggtcattcacagggtggcatacacagagattgactggaaggcctacatggccgaggtagaaggcgtcatcaatggtacctatgactatacccaactgcagggtgacaccggaccacttgtgtacccagctggtttcgtgtacatctttatggggttgtactatgccaccagccgaggcactgacatccgcatggcccagaacatctttgctgtgctctacctggctaccttgctgcttgtcttcttgatctatcaccagacctgcaaggtacctcccttcgtctttttcttcatgtgctgcgcctcttaccgtgtccactccatctttgtgctgcggctcttcaatgacccagtggccatggtgctgctcttcctcagtatcaacctcctgctggcccagcgctggggctggggttgctgctttttcagcctggcagtctctgtgaagatgaatgtgctgctcttcgcccctgggttactgtttcttctcctcacacagtttggcttccgtggggccctccccaagctgggaatctgtgctggccttcaggtggtgctggggctgcccttcctgctggagaaccccagcggctacctgtcccgctcctttgaccttggccgccagtttctgttccactggacagtgaactggcgcttcctcccagaggcgctcttcctgcatcgagccttccacctggccctgttgactgcccacctcaccctgctcctgctgtttgccctctgcaggtggcacaggacaggggaaagtatcttgtcgctgctgagggatccctccaaaaggaaggttccaccccagccccttacacccaaccagatcgtttctaccctcttcacctccaacttcattggcatctgcttcagccgctccctccactaccagttctacgtctggtatttccacacactgccctacctcctgtgggccatgcctgcacgctggctcacacacctgctcaggttgttggtgctggggctcatcgagctctcctggaacacatacccttccacatcctgcagctctgctgccctgcacatatgccatgccgtcatcctgctgcagctctggctgggcccgcagcctttccccaagagcacccaacacagcaagaaagcccactgaagtccacccctttccctcaggacctgagtctaccctcaggacctggggttggttggactctgcccttccaaataaaccttgctaagtccaaaaaaaaaaaaaaaaaaaaaaaaaaaaaaaaaaaaaaaaaaaaaaaaaaaaaaagagaggggcgcgcgcgcgcgcgcgacgcgagcagcgcaacaacataaaagagcgcgagagagagaacgagcgaggcgagagccgcggcgcaaaggagagggggcgcgatctcacacaagcggggacgcgaagagacgaggaggacggagacgccagaaccgacgacgcggaggagaagagggggagcgcgcgcgcccacattgcatagaagaggaggcgagacagaaaggaagagacagagggagagagaaaaactaggccggcggcggggggaaaaagaacggggggcgcgccaggaaacagaggggaggagcgcccaacggggggcgagacacaccccacaaaaagagaggaggggaaaccgccgcccgcgcgcgacgaggggaggaggacaaaaacaaaaaacacagagaggagaggcgaggggtgagaacaacgaggagcgcaggcaacgcgagcgaggcgcgcccccccaccagcgagcggcggcagacaatgcagggaacaacccaagcaaagcggggagaggaagaaaaaacagcagggaagacaccggggcgcagaagcacacccaccggaagaagagaaagaaaaagaaagagaacaaaagcacgagaccgccgagacacggacaacaaagtcgggaggggcggaacaccacgggcgaagacactcggagccccacaccagcggggagagcacagaacaaaacgcacagacgagggcacgacagagcgaggacacaacaagggagggggaaggaaacgaagaagaaagaaaccaaccacggaggaaggcggagggggcagaggacggagcagacgcgccgggggagggaaaaaaaagagaggagcgagaaggaggggagccacacaacacaaggggcagcgaaacaacgaagaaagaagcagagacccccaaaaagaggaggaaagaacaccaccgaacacaaagcgaacgacgaggaaaccgaagcaaaacagcgctaccccgacgacgcccccgaccccgaaaaacgcagagggggagagaaacgccgcggcggcacgcgaagca

SEQ ID NO: 290309 - DNA, 1564 bp, Homo sapiens
ggtggtgggcccacacaagcggcgcaccgttaagatggcggctgggctgcggaaacgcggccggtccggttccgcggcccaggcagagggactctgcaagcaatggctgcagcgcgcctggcaagagcggcgcctgctgctgcgggagccgcgctacacgctgctggtggccgcctgcctctgcctggcggaggtgggcatcaccttctgggtcattcacagggtggcatacacagagattgactggaaggcctacatggccgaggtagaaggcgtcatcaatggtacctatgactatacccaactgcagggtgacaccggaccacttgtgtacccagctggtttcgtgtacatctttatggggttgtactatgccaccagccgaggcactgacatccgcatggcccagaacatctttgctgtgctctacctggctaccttgctgcttgtcttcttgatctatcaccagacctgcaaggtacctcccttcgtctttttcttcatgtgctgcgcctcttaccgtgtccactccatctttgtgctgcggctcttcaatgacccagtggccatggtgctgctcttcctcagtatcaacctcctgctggcccagcgctggggctggggttgctgctttttcagcctggcagtctctgtgaagatgaatgtgctgctcttcgcccctgggttactgtttcttctcctcacacagtttggcttccgtggggccctccccaagctgggaatctgtgctggccttcaggtggtgctggggctgcccttcctgctggagaaccccagcggctacctgtcccgctcctttgaccttggccgccagtttctgttccactggacagtgaactggcgcttcctcccagaggcgctcttcctgcatcgagccttccacctggccctgttgactgcccacctcaccctgctcctgctgtttgccctctgcaggtggcacaggacaggggaaagtatcttgtcgctgctgagggatccctccaaaaggaaggttccaccccagccccttacacccaaccagatcgtttctaccctcttcacctccaacttcattggcatctgcttcagccgctccctccactaccagttctacgtctggtatttccacacactgccctacctcctgtgggccatgcctgcacgctggctcacacacctgctcaggttgttggtgctggggctcatcgagctctcctggaacacatacccttccacatcctgcagctctgctgccctgcacatatgccatgccgtcatcctgctgcagctctggctgggcccgcagcctttccccaagagcacccaacacagcaagaaagcccactgaagtccacccctttccctcaggacctgagtctaccctcaggacctggggttggttggactctgcccttccaaataaaccttgctaagtccaaaaaaaaaaaaaaccactacaaaaaaaacgccggggttttccgcgggggaaacgaacagggggttaattttccgcccctttttaagggggagaatggggcccaaagggggtttgaaggcgcgt

SEQ ID NO: 290310 - DNA, 1437 bp, Homo sapiens
tcgaaccttaggctaggtagcgaggcctgggtgttgggctgggctgcggaaacgcggccggtccggttccgcggcccaggcagagggactctgcaagcaatggctgcagcgcgcctggcaagagcggcgcctgctgctgcgggagccgcgctacacgctgctggtggccgcctgcctctgcctggcggagacacagagattgactggaaggcctacatggccgaggtagaaggcgtcatcaatggtacctatgactatacccaactgcagggtgacaccggaccacttgtgtacccagctggtttcgtgtacatctttatggggttgtactatgccaccagccgaggcactgacatccgcatggcccagaacatctttgctgtgctctacctggctaccttgctgcttgtcttcttgatctatcaccagacctgcaaggtacctcccttcgtctttttcttcatgtgctgcgcctcttaccgtgtccactccatctttgtgctgcggctcttcaatgacccagtggccatggtgctgctcttcctcagtatcaacctcctgctggcccagcgctggggctggggttgctgctttttcagcctggcagtctctgtgaagatgaatgtgctgctcttcgcccctgggttactgtttcttctcctcacacagtttggcttccgtggggccctccccaagctgggaatctgtgctggccttcaggtggtgctggggctgcccttcctgctggagaaccccagcggctacctgtcccgctcctttgaccttggccgccagtttctgttccactggacagtgaactggcgcttcctcccagaggcgctcttcctgcatcgagccttccacctggccctgttgactgcccacctcaccctgctcctgctgtttgccctctgcaggtggcacaggacaggggaaagtatcttgtcgctgctgagggatccctccaaaaggaaggttccaccccagccccttacacccaaccagatcgtttctaccctcttcacctccaacttcattggcatctgcttcagccgctccctccactaccagttctacgtctggtatttccacacactgccctacctcctgtgggccatgcctgcacgctggctcacacacctgctcaggttgttggtgctggggctcatcgagctctcctggaacacatacccttccacatcctgcagctctgctgccctgcacatatgccatgccgtcatcctgctgcagctctggctgggcccgcagcctttccccaagagcacccaacacagcaagaaagcccactgaagtccacccctttccctcaggacctgagtctaccctcaggacctggggttggttggactctgcccttccaaataaaccttgctaagtccaaaaaaaaaaatggggtttttcgggcgggaaaagata

SEQ ID NO: 290311 - DNA, 1160 bp, Homo sapiens
  misc_feature (1103)..(1103): n is a, c, g, or t
  misc_feature (1130)..(1131): n is a, c, g, or t
  misc_feature (1139)..(1139): n is a, c, g, or t
ggtggtgggcccacacaagcggcgcaccgttaagatggcggctgggctgcggaaacgcggccggtccggttccgcggcccaggcagagggactctgcaagcaatggctgcagcgcgcctggcaagagcggcgcctgctgctgcgggagccgcgctacacgctgctggtggccgcctgcctctgcctggcggaggtgggcatcaccttctgggtcattcacagggtggcatacacagagattgactggaaggcctacatggccgaggtagaaggcgtcatcaatggtacctatgactatacccaactgcagggtgacaccggaccacttgtgtacccagctggtttcgtgtacatctttatggggttgtactatgccaccagccgaggcactgacatccgcatggcccagaacatctttgctgtgctctacctggctaccttgctgcttgtcttcttgatctatcaccagacctgcaaggtacctcccttcgtctttttcttcatgtgctgcgcctcttaccgtgtccactccatctttgtgctgcggctcttcaatgacccagtggccatggtgctgctcttcctcagtatcaacctcctgctggcccagcgctggggctggggttgctgctttttcagcctggcagtctctgtgaagatgaatgtgctgctcttcgcccctgggttactgtttcttctcctcacacagtttggcttccgtggggccctccccaagctgggaatctgtgctggccttcaggtggtgctggggctgcccttcctgctggagaaccccagcggctacctgtcccgctcctttgaccttggccgccagtttctgttccactggacagtgaactggcgcttcctcccagaggcgctcttcctgcatcgagccttccacctggccctgttgactgcccacctcaccctgctcctgctgtttgccctctgcaggtggcacaggacaggggaaagtatcttgtcgctgctgagggatccctccaaaaggaaggttccaccccagccccttacacccaaccagatcgtttctaccctcttcaccatcctgctgctgctgctcttcctcagcaccatagagnctgtgctgctggctgggctgctgcccnnggcaaccntgggccaagagcgactgatag

SEQ ID NO: 290312 - DNA, 1338 bp, Homo sapiens
tcgaaccttaggctaggtagcgaggcctgggtgttgggctgggctgcggaaacgcggccggtccggttccgcggcccaggcagagggactctgcaagcaatggctgcagcgcgcctggcaagagcggcgcctgctgctgcgggagccgcgctacacgctgctggtggccgcctgcctctgcctggcggagtgtacccagctggtttcgtgtacatctttatggggttgtactatgccaccagccgaggcactgacatccgcatggcccagaacatctttgctgtgctctacctggctaccttgctgcttgtcttcttgatctatcaccagacctgcaaggtacctcccttcgtctttttcttcatgtgctgcgcctcttaccgtgtccactccatctttgtgctgcggctcttcaatgacccagtggccatggtgctgctcttcctcagtatcaacctcctgctggcccagcgctggggctggggttgctgctttttcagcctggcagtctctgtgaagatgaatgtgctgctcttcgcccctgggttactgtttcttctcctcacacagtttggcttccgtggggccctccccaagctgggaatctgtgctggccttcaggtggtgctggggctgcccttcctgctggagaaccccagcggctacctgtcccgctcctttgaccttggccgccagtttctgttccactggacagtgaactggcgcttcctcccagaggcgctcttcctgcatcgagccttccacctggccctgttgactgcccacctcaccctgctcctgctgtttgccctctgcaggtggcacaggacaggggaaagtatcttgtcgctgctgagggatccctccaaaaggaaggttccaccccagccccttacacccaaccagatcgtttctaccctcttcacctccaacttcattggcatctgcttcagccgctccctccactaccagttctacgtctggtatttccacacactgccctacctcctgtgggccatgcctgcacgctggctcacacacctgctcaggttgttggtgctggggctcatcgagctctcctggaacacatacccttccacatcctgcagctctgctgccctgcacatatgccatgccgtcatcctgctgcagctctggctgggcccgcagcctttccccaagagcacccaacacagcaagaaagcccactgaagtccacccctttccctcaggacctgagtctaccctcaggacctggggttggttggactctgcccttccaaataaaccttgctaagtccaaaaaaaaaaatggggtttttcgggcgggaaaagata

SEQ ID NO: 290313 - DNA, 1878 bp, Homo sapiens
tcgaaccttaggctaggtagcgaggcctgggtgttgggctgggctgcggaaacgcggccggtccggttccgcggcccaggcagagggactctgcaagcaatggctgcagcgcgcctggcaagagcggcgcctgctgctgcgggagccgcgctacacgctgctggtggccgcctgcctctgcctggcggagacacagagattgactggaaggcctacatggccgaggtagaaggcgtcatcaatggtacctatgactatacccaactgcagggtgacaccggaccacttgtgtacccagctggtttcgtgtacatctttatggggttgtactatgccaccagccgaggcactgacatccgcatggcccagaacatctttgctgtgctctacctggctaccttgctgcttgtcttcttgatctatcaccagacctgcaaggtacctcccttcgtctttttcttcatgtgctgcgcctcttaccgtgtccactccatctttgtgctgcggctcttcaatgacccagtggccatggtgctgctcttcctcagtatcaacctcctgctggcccagcgctggggctggggttgctgctttttcaggtcaacacctcttcctttctggtcccctctcgttttctgcatttccatctcttcccaatttcctgcagcagagggagtaaaggagtagccaagacagcatgggtcactcagggctccacaaagcgagtccaggatctatagaaagtttctgccctgccatcccccaacatacacacatgccctctttccatcctgtcttcctcccagacagcattccttgttggaattagtccttcacattctaaatactcagtatatgctcattcgcatctagtaggcatagagactatgtatctgcctcctgcctactccaggctcttccctccaacagttgtgagtgtaggtcccatcttggagtttgttggcgtggcggcgggggggaggttgctgtggtgatggtggggggtatgtctttgggtgttgtgtgcatggccctggagctgatctccacccttcctctcccctgctcaccccagcctggcagtctctgtgaagatgaatgtgctgctcttcgcccctgggttactgtttcttctcctcacacagtttggcttccgtggggccctccccaagctgggaatctgtgctggccttcaggtggtgctggggctgcccttcctgctggagaaccccagcggctacctgtcccgctcctttgaccttggccgccagtttctgttccactggacagtgaactggcgcttcctcccagaggcgctcttcctgcatcgagccttccacctggccctgttgactgcccacctcaccctgctcctgctgtttgccctctgcaggtggcacaggacaggggaaagtatcttgtcgctgctgagggatccctccaaaaggaaggttccaccccagccccttacacccaaccagatcgtttctaccctcttcacctccaacttcattggcatctgcttcagccgctccctccactaccagttctacgtctggtatttccacacactgccctacctcctgtgggccatgcctgcacgctggctcacacacctgctcaggttgttggtgctggggctcatcgagctctcctggaacacatacccttccacatcctgcagctctgctgccctgcacatatgccatgccgtcatcctgctgcagctctggctgggcccgcagcctttccccaagagcacccaacacagcaagaaagcccactgaagtccacccctttccctcaggacctgagtctaccctcaggacctggggttggttggactctgcccttccaaataaaccttgctaagtccaa

SEQ ID NO: 290314 - DNA, 1967 bp, Homo sapiens
tcgaaccttaggctaggtagcgaggcctgggtgttgggctgggctgcggaaacgcggccggtccggttccgcggcccaggcagagggactctgcaagcaatggctgcagcgcgcctggcaagagcggcgcctgctgctgcgggagccgcgctacacgctgctggtggccgcctgcctctgcctggcggaggtgggcatcaccttctgggtcattcacagggtggcatacacagagattgactggaaggcctacatggccgaggtagaaggcgtcatcaatggtacctatgactatacccaactgcagggtgacaccggaccacttgtgtacccagctggtttcgtgtacatctttatggggttgtactatgccaccagccgaggcactgacatccgcatggcccagaacatctttgctgtgctctacctggctaccttgctgcttgtcttcttgatctatcaccagacctgcaaggtacctcccttcgtctttttcttcatgtgctgcgcctcttaccgtgtccactccatctttgtgctgcggctcttcaatgacccagtggccatggtgctgctcttcctcagtatcaacctcctgctggcccagcgctggggctggggttgctgctttttcctggaacacatacccttccacatcctgcagctctgctgccctgcacatatgccatgccgtcatcctgctgcagctctggctgggcccgcagcctttccccaagagcacccaacacagcaagaaagcccactgaagtccacccctttccctcaggacctgagtctaccctcaggacctggggttggttggactctgcccttccaaataaaccttgctaagtccaaaaaaaaaaaaaaaaaaaaaaaaaaaaaaaaaaaaaaaaaaaaaaaaaaaaaaagagaggggcgcgcgcgcgcgcgcgacgcgagcagcgcaacaacataaaagagcgcgagagagagaacgagcgaggcgagagccgcggcgcaaaggagagggggcgcgatctcacacaagcggggacgcgaagagacgaggaggacggagacgccagaaccgacgacgcggaggagaagagggggagcgcgcgcgcccacattgcatagaagaggaggcgagacagaaaggaagagacagagggagagagaaaaactaggccggcggcggggggaaaaagaacggggggcgcgccaggaaacagaggggaggagcgcccaacggggggcgagacacaccccacaaaaagagaggaggggaaaccgccgcccgcgcgcgacgaggggaggaggacaaaaacaaaaaacacagagaggagaggcgaggggtgagaacaacgaggagcgcaggcaacgcgagcgaggcgcgcccccccaccagcgagcggcggcagacaatgcagggaacaacccaagcaaagcggggagaggaagaaaaaacagcagggaagacaccggggcgcagaagcacacccaccggaagaagagaaagaaaaagaaagagaacaaaagcacgagaccgccgagacacggacaacaaagtcgggaggggcggaacaccacgggcgaagacactcggagccccacaccagcggggagagcacagaacaaaacgcacagacgagggcacgacagagcgaggacacaacaagggagggggaaggaaacgaagaagaaagaaaccaaccacggaggaaggcggagggggcagaggacggagcagacgcgccgggggagggaaaaaaaagagaggagcgagaaggaggggagccacacaacacaaggggcagcgaaacaacgaagaaagaagcagagacccccaaaaagaggaggaaagaacaccaccgaacacaaagcgaacgacgaggaaaccgaagcaaaacagcgctaccccgacgacgcccccgaccccgaaaaacgcagagggggagagaaacgccgcggcggcacgcgaagca

SEQ ID NO: 290315 - DNA, 858 bp, Homo sapiens
tcgaaccttaggctaggtagcgaggcctgggtgttgggctgggctgcggaaacgcggccggtccggttccgcggcccaggcagagggactctgcaagcaatggctgcagcgcgcctggcaagagcggcgcctgctgctgcgggagccgcgctacacgctgctggtggccgcctgcctctgcctggcggaggtgggcatcaccttctgggtcattcacagggtggcatacacagagattgactggaaggcctacatggccgaggtagaaggcgtcatcaatggtacctatgactatacccaactgcagggtgacaccggaccacttgtgtacccagctggtttcgtgtacatctttatggggttgtactatgccaccagccgaggcactgacatccgcatggcccagaacatctttgctgtgctctacctggctaccttgctgcttgtcttcttgatctatcaccagacctgcaaggtacctcccttcgtctttttcttcatgtgctgcgcctcttaccgtgtccactccatctttgtgctgcggctcttcaatgacccagtggccatggtgctgctcttcctcagtatcaacctcctgctggcccagcgctggggctggggttgctgctttttcctggaacacatacccttccacatcctgcagctctgctgccctgcacatatgccatgccgtcatcctgctgcagctctggctgggcccgcagcctttccccaagagcacccaacacagcaagaaagcccactgaagtccacccctttccctcaggacctgagtctaccctcaggacctggggttggttggactctgcccttccaaataaaccttgctaagtccaa

SEQ ID NO: 290316 - DNA, 1065 bp, Homo sapiens
agttagagaactaactgccaagatggagcgaagggaacatttaaccttgactttccacagtcctgaggttcccaaaataaaggggaaccggaaataccaaaggattatctccaatattccagggccttctttctcatctctgtctttaccatacttactggccttggctggctcttcagctcttggatccttaatcgaggaagcatgaccaccaacttggatctgaaggtatccatgctcagcttcatctcagctacctgcttgctcctctgcctcaacctgtttgtggcacaggttcactggcatactagggatgccatggagtcagatctcctatggacctattatcttaactggtgcagtgacatcttttacatgtttgctgggatcatctctcttctcaactacttaacttccagatcgcctgcctgtgatgaaaacgtcactgtgattccaacagagagatcaaggctgggggttggtccggtgactacagtatcacctgctaaagatgaagggccaaggtctgagatggaatctctaagtgtgagagagaaaaatttaccaaagtcaggactgtggtggtgataggaaaacctaactatagcttgtcttaaaagcaggggagaagctgagttgggaatggtcacataaattctgggaaactctcctaatatcatgtccatattacttgaggagacagcattaaagctgatgaaatgtcttttgcgtgcattggatccaaaatatatatgatagtcataaagtaaataactcacttaagaaaaacatttctaaaagaaaacaacaatgtttagagtcatgaatgaaagaaactagtgaaagatgcagtgtgtagaccagagacctctttgggtatcagggatctcatggaccagaatggcccgtggagaagaatgttaattacttctgtttggaattttctttattatgtgtggctttgggtatactcaggatggaaagcacttggacaaatactgttgaatctgaacttaatagcattaccagaaatggaataaatatcaatggatataagacctacta

SEQ ID NO: 290317 - DNA, 997 bp, Homo sapiens
ttccaagcaaaaaggatgtcatgtagcaagctctgctccatcatcctttgttcttaaatccttctctaagactctatctggcctttttaagggaaggtccctcactggactaaccacggtcttcctttcctcttcttcatgcagattatctccaatattccagggccttctttctcatctctgtctttaccatacttactggccttggctggctcttcagctcttggatccttaatcgaggaagcatgaccaccaacttggatctgaaggtatccatgctcagcttcatctcagctcaaattattcccttcccgtagggatcatctctcttctcaactacttaacttccagatcgcctgcctgtgatgaaaacgtcactgtgattccaacagagagatcaaggctgggggttggtccggtgactacagtatcacctgctaaagatgaagggccaaggtctgagatggaatctctaagtgtgagagagaaaaatttaccaaagtcaggactgtggtggtgataggaaaacctaactatagcttgtcttaaaagcaggggagaagctgagttgggaatggtcacataaattctgggaaactctcctaatatcatgtccatattacttgaggagacagcattaaagctgatgaaatgtcttttgcgtgcattggatccaaaatatatatgatagtcataaagtaaataactcacttaagaaaaacatttctaaaagaaaacaacaatgtttagagtcatgaatgaaagaaactagtgaaagatgcagtgtgtagaccagagacctctttgggtatcagggatctcatggaccagaatggcccgtggagaagaatgttaattacttctgtttggaattttctttattatgtgtggctttgggtatactcaggatggaaagcacttggacaaatactgttgaatctgaacttaatagcattaccagaaatggaataaatatcaatggatataagacctacta

SEQ ID NO: 290318 - DNA, 192 bp, Homo sapiens
agttagagaactaactgccaagatggagcgaagggaacatttaaccttgactttccacagtcctgaggttcccaaaataaaggggaaccggaaataccaaagggtgaggaggtatctaattgaaagtcagatgggaagaagagaacttacttaaaggcagggctacacagagcatcctaaagacagaaaaga

SEQ ID NO: 290319 - DNA, 352 bp, Homo sapiens
ttaaaagccaaaagaccattgcctattgaacctcacctcaaattattcccttcccgtagggatcatctctcttctcaactacttaacttccagatcgcctgcctgtgatgaaaacgtcactgtgattccaacagagagatcaaggctgggggttggtccggtgactacagtatcacctgctaaagatgaagggccaaggtctgagatggaatctctaagtgtgagagagaaaaatttaccaaagtcaggactgtggtggtgataggaaaacctaactatagcttgtcttaaaagcaggggagaagctgagttgggaatggtcacataaattctgggaaactctcctaatatc

SEQ ID NO: 290320 - DNA, 933 bp, Homo sapiens
agttagagaactaactgccaagatggagcgaagggaacatttaaccttgactttccacagtcctgaggttcccaaaataaaggggaaccggaaataccaaaggattatctccaatattccagggccttctttctcatctctgtctttaccatacttactggccttggctggctcttcagctcttggatccttaatcgaggaagcatgaccaccaacttggatctgaaggtatccatgctcagcttcatctcagggatcatctctcttctcaactacttaacttccagatcgcctgcctgtgatgaaaacgtcactgtgattccaacagagagatcaaggctgggggttggtccggtgactacagtatcacctgctaaagatgaagggccaaggtctgagatggaatctctaagtgtgagagagaaaaatttaccaaagtcaggactgtggtggtgataggaaaacctaactatagcttgtcttaaaagcaggggagaagctgagttgggaatggtcacataaattctgggaaactctcctaatatcatgtccatattacttgaggagacagcattaaagctgatgaaatgtcttttgcgtgcattggatccaaaatatatatgatagtcataaagtaaataactcacttaagaaaaacatttctaaaagaaaacaacaatgtttagagtcatgaatgaaagaaactagtgaaagatgcagtgtgtagaccagagacctctttgggtatcagggatctcatggaccagaatggcccgtggagaagaatgttaattacttctgtttggaattttctttattatgtgtggctttgggtatactcaggatggaaagcacttggacaaatactgttgaatctgaacttaatagcattaccagaaatggaataaatatcaatggatataagacctacta

SEQ ID NO: 290321 - DNA, 2432 bp, Homo sapiens
  misc_feature (1018)..(1018): n is a, c, g, or t
  misc_feature (1021)..(1021): n is a, c, g, or t
  misc_feature (1061)..(1061): n is a, c, g, or t
  misc_feature (1082)..(1085): n is a, c, g, or t
  misc_feature (1091)..(1091): n is a, c, g, or t
  misc_feature (1096)..(1097): n is a, c, g, or t
  misc_feature (1099)..(1099): n is a, c, g, or t
  misc_feature (1103)..(1103): n is a, c, g, or t
  misc_feature (1106)..(1106): n is a, c, g, or t
  misc_feature (1109)..(1109): n is a, c, g, or t
  misc_feature (1118)..(1118): n is a, c, g, or t
  misc_feature (1120)..(1120): n is a, c, g, or t
  misc_feature (1149)..(1149): n is a, c, g, or t
  misc_feature (1152)..(1152): n is a, c, g, or t
  misc_feature (1161)..(1161): n is a, c, g, or t
  misc_feature (1189)..(1189): n is a, c, g, or t
tacttactactggaccctgttttctctgagcagtttaatatggtttctttactattaatctaaatttgggctaattttatatatttttcaaaaggcattgattttctaaagagttttttaatcattaattcactctggtaatataagtaatacctttatatagtcatctaaactttccaaagcacttttacctattattctcagaacagtccaggaagtaggcaaaacagacattatcaccattttatgaggtattggatgctaaatgacttgctcagcgtctcataactggtaagtagcaggatcaggtctgaaatccatttcacctggccttagatccatctttgagggtctctttatctgataggcttctcgtcttggataggcaaaggaaggatgaactggagcagaggatgtcggccctgcaggagagcaggcgggagctgatggtccagctggaagagctgatgaagttgctgaaggctcaggccacagggtcaccacatacatcgcccacccatggaggcggccggccaatgcccatgccagtgcgctccacgtctgccggctccacccccacccactgtccgcaggactcgctgagcggagtcgggggagacgtgcaggaggccttcgcacaagcagaggaaggtgcagaggaagaagaagagaagatgcagaatgggaaagacagaggtaaaggcagctcagcaggactgctcgtttaaatggggagcccgagctcatggatcagccgccccccactttgtttctgcattcctccctgccaccacctttcccagagctttcggacccgaggtccctgtacctacttttcccatctgacagtcaggttttaccttccaggtgacaaggtcagtcgatcaccaagagcttcctcatttcctgatcctgggataggtagttgggatacaggaagtagatacaagtagaacacaaaagatgaccctttgactggagaagtttatgatctagttaataaagcaagaccaggccnggngcggtggctcacgcctgtaatcccagcactttgggaggcngaggcgggtggatcacgaggnnnncagacnagcanncnggcnaanatngtgaaaccncntctctactaaaaatacaaaaaattagccnggngtggtggcnggcgcctgtagtcccagctacttggggnttcttaatccttcaatacatgcaaggatgagtaaggcccatcccctgacctcaaggattttgcatcatggtaggaatggcagcagtaaagtaaattaagtaccactgaggagcactaattactgtagtgcttaatcaagcagtccctgctgaagtgatcaggagcagcttcccgacagtgatgttgggtcagacattacggaatgaataagatttggaagagaggtgagttataaaatgatggagcccacttaggaaaaatgaaccgtaagctggaggtccagacacaaagggcataagataggaggtgtggtactaaggacaggaatgtagatgggatctagagccgcactcgccgatagaaatgcaggccacgcacataatcaaaacatttctaacagcctcattgaaaaaccaaaaagtaataggcgtcattaattttaatagtatatcttacttaacctgatattttcaaaatattgtcctttcaacatgtaatcagtattaaaacatgatccagatactttgctgtttcctgcactaagtctttgaattccagtgtgtatgttacaattgccgtgcatctcagttcagcctagccctgtttcaggggctcggtagtcacgcgtggctagcggctgctgtgatagacagcgtaggtctcgattgcacaggcaagggtcagtgatgctagaaagtctgttgagatcattatgggatgatgaaatgaacatagctttgttttgagcggcagtttaaagttcgtagaacactctcatatttattaccttatatgatcctcagaatattgttgctgttactagtccccttttagaagagagaaaactgaggctaagtgacttgtctaaggttgcatatttggtaaatactggtgctgatactcaactttgaggccattgacttctatttcactgctttttcctcaccataaaagatgaaagagccaggtgcggtggctcacgactgtaatcccagcactttgggaggctgaggcaggtgggtcacttgaggtcaggagttcgagaccagcctggccaacatggtgaaactccatctctactaaaaatacaaaaattaactgggcatggtggcgatgcctgtaatcccagctatttaggaggctgaggcaggagaatcacttgaactggggaagcggaggttgcagttgagacaagatggcaccactgcactccagcctgggcgacagagtgagactccgtcac

SEQ ID NO: 290322 - DNA, 1381 bp, Homo sapiens
atataattagccaggcaattgagatcagattctagaaagtcttaattgttaggtcattggaaacccttggagagtttcaaatcatgattttggtaagttcagtagatgttaattaggtgatactggatgcatgatattttcttaatccttcaatacatgcaaggatgagtaaggcccatcccctgacctcaaggattttgcatcatggtaggaatggcagcagtaaagtaaattaagtaccactgaggagcactaattactgtagtgcttaatcaagcagtccctgctgaagtgatcaggagcagcttcccgacagtgatgttgggtcagacattacggaatgaataagatttggaagagaggtgagttataaaatgatggagcccacttaggaaaaatgaaccgtaagctggaggtccagacacaaagggcataagataggaggtgtggtactaaggacaggaatgtagatgggatctagagccgcactcgccgatagaaatgcaggccacgcacataatcaaaacatttctaacagcctcattgaaaaaccaaaaagtaataggcgtcattaattttaatagtatatcttacttaacctgatattttcaaaatattgtcctttcaacatgtaatcagtattaaaacatgatccagatactttgctgtttcctgcactaagtctttgaattccagtgtgtatgttacaattgccgtgcatctcagttcagcctagccctgtttcaggggctcggtagtcacgcgtggctagcggctgctgtgatagacagcgtaggtctcgattgcacaggcaagggtcagtgatgctagaaagtctgttgagatcattatgggatgatgaaatgaacatagctttgttttgagcggcagtttaaagttcgtagaacactctcatatttattaccttatatgatcctcagaatattgttgctgttactagtccccttttagaagagagaaaactgaggctaagtgacttgtctaaggttgcatatttggtaaatactggtgctgatactcaactttgaggccattgacttctatttcactgctttttcctcaccataaaagatgaaagagccaggtgcggtggctcacgactgtaatcccagcactttgggaggctgaggcaggtgggtcacttgaggtcaggagttcgagaccagcctggccaacatggtgaaactccatctctactaaaaatacaaaaattaactgggcatggtggcgatgcctgtaatcccagctatttaggaggctgaggcaggagaatcacttgaactggggaagcggaggttgcagttgagacaagatggcaccactgcactccagcctgggcgacagagtgagactccgtcac

SEQ ID NO: 290323 - DNA, 551 bp, Homo sapiens
tttgattttctaaagagttttttaatcattaattcactctggtaatataagtaatacctttatatagtcatctaaactttccaaagcacttttacctattattctcagaacagtccaggaagtaggcaaaacagacattatcaccattttatgaggtattggatgctaaatgacttgctcagcgtctcataactggtaagtagcaggatcaggtctgaaatccatttcacctggccttagatccatctttgagggtctctttatctgataggcttctcgtcttggataggcaaaggaaggatgaactggagcagaggatgtcggccctgcaggagagcaggcgggagctgatggtccagctggaagagctgatgaagttgctgaaggaagagcccgtggcccacgctcagttcttgtcattcttctcccaccacagcctcagctgctgcctccctgtgatgtcagaataggatgaggccaaaggcttgactttagcctagaatcagttttcagataaatttagcctaattgggtataaaagtcatctaaat

SEQ ID NO: 290324 - DNA, 447 bp, Homo sapiens
gacaaggaggtttttccattacaaagaagtgtatgacttagcttaaaccaagcagttcttcaaatgagcaatttcctgtggcagtcatcacttagccacagcccttttgtcaactttagatcttttttttgttcttgcagatggccaccagagctgcactggagagtgcatcttctgcttccatgtgtgggaagatcactgtgttctctgtgacccagtagtgtgaattgcttatctgtttctgcattaactcaaatttatcagtgattattgcctgaatacctcatgctttctgagatctacaggtacagatttagggttgaactctttctctaaataaatttaatccatgtgtgttatatgttgtatatcttcatttagtgactacgaaatgtctagctatgaaatgtgcatgttaattactcattaagcctttggatcgccttt

SEQ ID NO: 290325 - DNA, 3038 bp, Homo sapiens
  misc_feature (2516)..(2516): n is a, c, g, or t
  misc_feature (2539)..(2539): n is a, c, g, or t
agcggcggggggcgcgcgcccgcccatccgccctccgccctccgccctcgcgccctcgcgccgggggcgggcgctgcgcgtgccgggcggagaagcggcgcgagccgggcgctgcgaacgttcgccgcgggggtggctccggggcctgagtaggcgctgccgctgcctcagccgagggggctgggccggagcgtgcggaggagtgaggccgcaggagaccttcccgacgacccctgctccggcggggaagtgagcaaggatgattgaggaaagtgggaacaagcggaagaccatggcagagaagaggcagctgttcatagaaatgcgtgctcagaattttgatgtcatacgactatcaacttacagaacagcctgcaaattacgatttgtacaaaaacgatgcaaccttcatcttgttgatatctggaacatgattgaagccttccgagacaatggccttaatacactggaccataccaccgagatcagtgtgtcccgcctcgaaactgtcatctcctccatctactatcagttgaacaagcgccttccttctactcaccaaattagtgtggaacaatctatcagcctcctcctcaactttatgattgctgcatatgacagtgagggccgaggcaagttgacggtattttcagttaaagctatgttagcaaccatgtgtggtggaaaaatgctggacaaattgagatatgttttctcccagatgtcagattccaatggcttaatgatatttagcaagtttgaccagtttctgaaggaagttctgaagctcccaacagctgtctttgaagggccatcttttggttacacagagcactcagtccgcacctgttttccacagcagagaaagataatgctaaatatgtttttagacacaatgatggctgaccctcctccccagtgccttgtctggctacctctcatgcacaggcttgcccatgttgagaatgtcttccatcccgtggagtgctcctactgccgatgtgagagtatgatgggtttccggtaccgatgccagcagtgccacaactatcagctctgccagaattgcttttggcgtggccatgccggcggccctcacagcaaccagcaccagatgaaggagcattcctcttggaaatctcctgcaaagaagctgagccatgcaattagtaaatctttggggtgtgtacccacgagagaacccccgcatcctgtttttcctgagcaaccagagaaaccacttgaccttgcacatatagttcctcctcgccctctgactaatatgaatgacaccatggttagccacatgtcctctggagtgcccactcccaccaagaggttacagtatagccaggatatacccagtcacttggccgatgagcatgcgctgatagcctcctatgtggcccgtctgcagcactgtgcacgtgttctggacagtcctagccgactggatgaggaacaccgtcttatagctcgctatgctgcccggctggctgcagaagcaggaaacgtgactcgtcctcccactgacttgagctttaactttgatgccaacaaacaacaaagacagcttattgcagaactggaaaacaaaaacagagagatcctgcaggagattcagcgtctccgcctggaacacgagcaggcctcccagcccacccctgagaaggcacagcagaaccccacgctgctggcagagctgcggctgctgaggcaaaggaaggatgaactggagcagaggatgtcggccctgcaggagagcaggcgggagctgatggtccagctggaagagctgatgaagttgctgaaggaagaagcaggctcaggccacagggtcaccacatacatcgcccacccatggaggcggccggccaatgcccatgccagtgcgctccacgtctgccggctccacccccacccactgtccgcaggactcgctgagcggagtcgggggagacgtgcaggaggccttcgcacaaggtacgaggagaaacctccgcaatgacctgctggtggcagctgactccatcaccaacaccatgtcatccctggtgaaggagctccattcagcagaggaaggtgcagaggaagaagaagagaagatgcagaatgggaaagacagaggttagcagaggagccggacacagaggaagctcaggcacagaggacgaggagcaagctggcgccgacatggcgaaggcaaggtcttcccccagaggcacattcctctccatctttccaccgcacacctggaccaggcttgcaggctgccagacgtcactccacccgccagggagaggggagccagagccggtgggaagcggggaggggctgcgtggcacagctagtgggcctccccctgcacagccctgcatgtactagcaccttcatcactcccctcagggcatggtctcatctccgcatcaggaattcacctggaggttgaaaagagaaaagaaaaagcaccaaaaaaaaaaaaaaaaaaaaaaaaaaaaaaaaaaaaaaaaaaaaanaaaaaaaaaaaaaaaaaaaaaanaaaaaaaaaaaaaaaaaaaaaaaaagagagagggggcgcgcccccaaaaaatccccccggggggggcgccacatacgcagccgcacccgattctgtcgacaaaaggggcgcccctattgtggagggagttttatatatatcacatggaaggcgcagcggcgcccccgtttatataaaaaccgcctgtcactgagggagaaaaaacgacgctctctaacgtgatataaacatcttgggaagagcacactcctaccatcttcgcggaggggacggacacaactggtggggcaccacacacccccgccaaaaaagacatatacatacaccctctcgtagggggagaactaaatataacaaaataaacgcggcggggactgagctggggtcagcacacaaccactacccctacatatatgccgccgccgccggagagaacaaacatctgctcgccctcagaggaagggatacatatatatacgaagaacaatttctacagggg

SEQ ID NO: 290326 - DNA, 2894 bp, Homo sapiens
  misc_feature (2372)..(2372): n is a, c, g, or t
  misc_feature (2395)..(2395): n is a, c, g, or t
agcggcggggggcgcgcgcccgcccatccgccctccgccctccgccctcgcgccctcgcgccgggggcgggcgctgcgcgtgccgggcggagaagcggcgcgagccgggcgctgcgaacgttcgccgcgggggtggctccggggcctgagtaggcgctgccgctgcctcagccgagggggctgggccggagcgtgcggaggagtgaggccgcaggagaccttcccgacgacccctgctccggcggggaagtgagcaaggatgattgaggaaagtgggaacaagcggaagaccatggcagagaagaggcagctgttcatagaaatgcgtgctcagaattttgatgtcatacgactatcaacttacagaacagcctgcaaattacgatttgtacaaaaacgatgcaaccttcatcttgttgatatctggaacatgattgaagccttccgagacaatggccttaatacactggaccataccaccgagatcagtgtgtcccgcctcgaaactgtcatctcctccatctactatcagttgaacaagcgccttccttctactcaccaaattagtgtggaacaatctatcagcctcctcctcaactttatgattgctgcatatgacagtgagggccgaggcaagttgacggtattttcagttaaagctatgttagcaaccatgtgtggtggaaaaatgctggacaaattgagatatgttttctcccagatgtcagattccaatggcttaatgatatttagcaagtttgaccagtttctgaaggaagttctgaagctcccaacagctgtctttgaagggccatcttttggttacacagagcactcagtccgcacctgttttccacagcagagaaagataatgctaaatatgtttttagacacaatgatggctgaccctcctccccagtgccttgtctggctacctctcatgcacaggcttgcccatgttgagaatgtcttccatcccgtggagtgctcctactgccgatgtgagagtatgatgggtttccggtaccgatgccagcagtgccacaactatcagctctgccagaattgcttttggcgtggccatgccggcggccctcacagcaaccagcaccagatgaaggagcattcctcttggaaatctcctgcaaagaagctgagccatgcaattagtaaatctttggggtgtgtacccacgagagaacccccgcatcctgtttttcctgagcaaccagagaaaccacttgaccttgcacatatagttcctcctcgccctctgactaatatgaatgacaccatggttagccacatgtcctctggagtgcccactcccaccaagagtgttctggacagtcctagccgactggatgaggaacaccgtcttatagctcgctatgctgcccggctggctgcagaagcaggaaacgtgactcgtcctcccactgacttgagctttaactttgatgccaacaaacaacaaagacagcttattgcagaactggaaaacaaaaacagagagatcctgcaggagattcagcgtctccgcctggaacacgagcaggcctcccagcccacccctgagaaggcacagcagaaccccacgctgctggcagagctgcggctgctgaggcaaaggaaggatgaactggagcagaggatgtcggccctgcaggagagcaggcgggagctgatggtccagctggaagagctgatgaagttgctgaaggaagaagcaggctcaggccacagggtcaccacatacatcgcccacccatggaggcggccggccaatgcccatgccagtgcgctccacgtctgccggctccacccccacccactgtccgcaggactcgctgagcggagtcgggggagacgtgcaggaggccttcgcacaaggtacgaggagaaacctccgcaatgacctgctggtggcagctgactccatcaccaacaccatgtcatccctggtgaaggagctccattcaggttagcagaggagccggacacagaggaagctcaggcacagaggacgaggagcaagctggcgccgacatggcgaaggcaaggtcttcccccagaggcacattcctctccatctttccaccgcacacctggaccaggcttgcaggctgccagacgtcactccacccgccagggagaggggagccagagccggtgggaagcggggaggggctgcgtggcacagctagtgggcctccccctgcacagccctgcatgtactagcaccttcatcactcccctcagggcatggtctcatctccgcatcaggaattcacctggaggttgaaaagagaaaagaaaaagcaccaaaaaaaaaaaaaaaaaaaaaaaaaaaaaaaaaaaaaaaaaaaaanaaaaaaaaaaaaaaaaaaaaaanaaaaaaaaaaaaaaaaaaaaaaaaagagagagggggcgcgcccccaaaaaatccccccggggggggcgccacatacgcagccgcacccgattctgtcgacaaaaggggcgcccctattgtggagggagttttatatatatcacatggaaggcgcagcggcgcccccgtttatataaaaaccgcctgtcactgagggagaaaaaacgacgctctctaacgtgatataaacatcttgggaagagcacactcctaccatcttcgcggaggggacggacacaactggtggggcaccacacacccccgccaaaaaagacatatacatacaccctctcgtagggggagaactaaatataacaaaataaacgcggcggggactgagctggggtcagcacacaaccactacccctacatatatgccgccgccgccggagagaacaaacatctgctcgccctcagaggaagggatacatatatatacgaagaacaatttctacagggg

SEQ ID NO: 290327 - DNA, 2522 bp, Homo sapiens
  misc_feature (2000)..(2000): n is a, c, g, or t
  misc_feature (2023)..(2023): n is a, c, g, or t
ggccttaatacactggaccattgtctcggaaggcttcaatcatgttccagatatcaacatgattgaagccttccgagacaatggccttaatacactggaccataccaccgagatcagtgtgtcccgcctcgaaactgtcatctcctccatctactatcagttgaacaagcgccttccttctactcaccaaattagtgtggaacaatctatcagcctcctcctcaactttatgattgctgcatatgacagtgagggccgaggcaagttgacggtattttcagttaaagctatgttagcaaccatgtgtggtggaaaaatgctggacaaattgagatatgttttctcccagatgtcagattccaatggcttaatgatatttagcaagtttgaccagtttctgaaggaagttctgaagctcccaacagctgtctttgaagggccatcttttggttacacagagcactcagtccgcacctgttttccacagcagagaaagataatgctaaatatgtttttagacacaatgatggctgaccctcctccccagtgccttgtctggctacctctcatgcacaggcttgcccatgttgagaatgtcttccatcccgtggagtgctcctactgccgatgtgagagtatgatgggtttccggtaccgatgccagcagtgccacaactatcagctctgccagaattgcttttggcgtggccatgccggcggccctcacagcaaccagcaccagatgaaggagcattcctcttggaaatctcctgcaaagaagctgagccatgcaattagtaaatctttggggtgtgtacccacgagagaacccccgcatcctgtttttcctgagcaaccagagaaaccacttgaccttgcacatatagttcctcctcgccctctgactaatatgaatgacaccatggttagccacatgtcctctggagtgcccactcccaccaagagtgttctggacagtcctagccgactggatgaggaacaccgtcttatagctcgctatgctgcccggctggctgcagaagcaggaaacgtgactcgtcctcccactgacttgagctttaactttgatgccaacaaacaacaaagacagcttattgcagaactggaaaacaaaaacagagagatcctgcaggagattcagcgtctccgcctggaacacgagcaggcctcccagcccacccctgagaaggcacagcagaaccccacgctgctggcagagctgcggctgctgaggcaaaggaaggatgaactggagcagaggatgtcggccctgcaggagagcaggcgggagctgatggtccagctggaagagctgatgaagttgctgaaggaagaagcaggctcaggccacagggtcaccacatacatcgcccacccatggaggcggccggccaatgcccatgccagtgcgctccacgtctgccggctccacccccacccactgtccgcaggactcgctgagcggagtcgggggagacgtgcaggaggccttcgcacaaggtacgaggagaaacctccgcaatgacctgctggtggcagctgactccatcaccaacaccatgtcatccctggtgaaggagctccattcaggttagcagaggagccggacacagaggaagctcaggcacagaggacgaggagcaagctggcgccgacatggcgaaggcaaggtcttcccccagaggcacattcctctccatctttccaccgcacacctggaccaggcttgcaggctgccagacgtcactccacccgccagggagaggggagccagagccggtgggaagcggggaggggctgcgtggcacagctagtgggcctccccctgcacagccctgcatgtactagcaccttcatcactcccctcagggcatggtctcatctccgcatcaggaattcacctggaggttgaaaagagaaaagaaaaagcaccaaaaaaaaaaaaaaaaaaaaaaaaaaaaaaaaaaaaaaaaaaaaanaaaaaaaaaaaaaaaaaaaaaanaaaaaaaaaaaaaaaaaaaaaaaaagagagagggggcgcgcccccaaaaaatccccccggggggggcgccacatacgcagccgcacccgattctgtcgacaaaaggggcgcccctattgtggagggagttttatatatatcacatggaaggcgcagcggcgcccccgtttatataaaaaccgcctgtcactgagggagaaaaaacgacgctctctaacgtgatataaacatcttgggaagagcacactcctaccatcttcgcggaggggacggacacaactggtggggcaccacacacccccgccaaaaaagacatatacatacaccctctcgtagggggagaactaaatataacaaaataaacgcggcggggactgagctggggtcagcacacaaccactacccctacatatatgccgccgccgccggagagaacaaacatctgctcgccctcagaggaagggatacatatatatacgaagaacaatttctacagggg

SEQ ID NO: 290328 - DNA, 2739 bp, Homo sapiens
  misc_feature (2217)..(2217): n is a, c, g, or t
  misc_feature (2240)..(2240): n is a, c, g, or t
agcggcggggggcgcgcgcccgcccatccgccctccgccctccgccctcgcgccctcgcgccgggggcgggcgctgcgcgtgccgggcggagaagcggcgcgagccgggcgctgcgaacgttcgccgcgggggtggctccggggcctgagtaggcgctgccgctgcctcagccgagggggctgggccggagcgtgcggaggagtgaggccgcaggagaccttcccgacgacccctgctccggcggggaagtgagcaaggatgattgaggaaagtgggaacaagcggaagaccatggcagagaagaggcagctgttcatagaaatgcgtgctcagaattttgatgtcatacgactatcaacttacagaacagcctgcaaattacgatttgtacaaaaacgatgcaaccttcatcttgttgatatctggaacatgattgaagccttccgagacaatggccttaatacactggaccataccaccgagatcagtgtgtcccgcctcgaaactgtcatctcctccatctactatcagttgaacaagcgccttccttctactcaccaaattagtgtggaacaatctatcagcctcctcctcaactttatgattgctgcatatgacagtgagggccgaggcaagttgacggtattttcagttaaagctatgttagcaaccatgtgtggtggaaaaatgctggacaaattgagatagaaagataatgctaaatatgtttttagacacaatgatggctgaccctcctccccagtgccttgtctggctacctctcatgcacaggcttgcccatgttgagaatgtcttccatcccgtggagtgctcctactgccgatgtgagagtatgatgggtttccggtaccgatgccagcagtgccacaactatcagctctgccagaattgcttttggcgtggccatgccggcggccctcacagcaaccagcaccagatgaaggagcattcctcttggaaatctcctgcaaagaagctgagccatgcaattagtaaatctttggggtgtgtacccacgagagaacccccgcatcctgtttttcctgagcaaccagagaaaccacttgaccttgcacatatagttcctcctcgccctctgactaatatgaatgacaccatggttagccacatgtcctctggagtgcccactcccaccaagagtgttctggacagtcctagccgactggatgaggaacaccgtcttatagctcgctatgctgcccggctggctgcagaagcaggaaacgtgactcgtcctcccactgacttgagctttaactttgatgccaacaaacaacaaagacagcttattgcagaactggaaaacaaaaacagagagatcctgcaggagattcagcgtctccgcctggaacacgagcaggcctcccagcccacccctgagaaggcacagcagaaccccacgctgctggcagagctgcggctgctgaggcaaaggaaggatgaactggagcagaggatgtcggccctgcaggagagcaggcgggagctgatggtccagctggaagagctgatgaagttgctgaaggaagaagcaggctcaggccacagggtcaccacatacatcgcccacccatggaggcggccggccaatgcccatgccagtgcgctccacgtctgccggctccacccccacccactgtccgcaggactcgctgagcggagtcgggggagacgtgcaggaggccttcgcacaaggtacgaggagaaacctccgcaatgacctgctggtggcagctgactccatcaccaacaccatgtcatccctggtgaaggagctccattcaggttagcagaggagccggacacagaggaagctcaggcacagaggacgaggagcaagctggcgccgacatggcgaaggcaaggtcttcccccagaggcacattcctctccatctttccaccgcacacctggaccaggcttgcaggctgccagacgtcactccacccgccagggagaggggagccagagccggtgggaagcggggaggggctgcgtggcacagctagtgggcctccccctgcacagccctgcatgtactagcaccttcatcactcccctcagggcatggtctcatctccgcatcaggaattcacctggaggttgaaaagagaaaagaaaaagcaccaaaaaaaaaaaaaaaaaaaaaaaaaaaaaaaaaaaaaaaaaaaaanaaaaaaaaaaaaaaaaaaaaaanaaaaaaaaaaaaaaaaaaaaaaaaagagagagggggcgcgcccccaaaaaatccccccggggggggcgccacatacgcagccgcacccgattctgtcgacaaaaggggcgcccctattgtggagggagttttatatatatcacatggaaggcgcagcggcgcccccgtttatataaaaaccgcctgtcactgagggagaaaaaacgacgctctctaacgtgatataaacatcttgggaagagcacactcctaccatcttcgcggaggggacggacacaactggtggggcaccacacacccccgccaaaaaagacatatacatacaccctctcgtagggggagaactaaatataacaaaataaacgcggcggggactgagctggggtcagcacacaaccactacccctacatatatgccgccgccgccggagagaacaaacatctgctcgccctcagaggaagggatacatatatatacgaagaacaatttctacagggg

SEQ ID NO: 290329 - DNA, 2053 bp, Homo sapiens
  misc_feature (1531)..(1531): n is a, c, g, or t
  misc_feature (1554)..(1554): n is a, c, g, or t
tttttatattagttttggtattcctctgtattgacttcattctccaagtgaaattttattctttcttcttttattctatcccttccctcctgcccttttttctccccttttctctcctgtccacaagtcttccatcccgtggagtgctcctactgccgatgtgagagtatgatgggtttccggtaccgatgccagcagtgccacaactatcagctctgccagaattgcttttggcgtggccatgccggcggccctcacagcaaccagcaccagatgaaggagcattcctcttggaaatctcctgcaaagaagctgagccatgcaattagtaaatctttggggtgtgtacccacgagagaacccccgcatcctgtttttcctgagcaaccagagaaaccacttgaccttgcacatatagttcctcctcgccctctgactaatatgaatgacaccatggttagccacatgtcctctggagtgcccactcccaccaagagtgttctggacagtcctagccgactggatgaggaacaccgtcttatagctcgctatgctgcccggctggctgcagaagcaggaaacgtgactcgtcctcccactgacttgagctttaactttgatgccaacaaacaacaaagacagcttattgcagaactggaaaacaaaaacagagagatcctgcaggagattcagcgtctccgcctggaacacgagcaggcctcccagcccacccctgagaaggcacagcagaaccccacgctgctggcagagctgcggctgctgaggcaaaggaaggatgaactggagcagaggatgtcggccctgcaggagagcaggcgggagctgatggtccagctggaagagctgatgaagttgctgaaggaagaagcaggctcaggccacagggtcaccacatacatcgcccacccatggaggcggccggccaatgcccatgccagtgcgctccacgtctgccggctccacccccacccactgtccgcaggactcgctgagcggagtcgggggagacgtgcaggaggccttcgcacaaggtacgaggagaaacctccgcaatgacctgctggtggcagctgactccatcaccaacaccatgtcatccctggtgaaggagctccattcaggttagcagaggagccggacacagaggaagctcaggcacagaggacgaggagcaagctggcgccgacatggcgaaggcaaggtcttcccccagaggcacattcctctccatctttccaccgcacacctggaccaggcttgcaggctgccagacgtcactccacccgccagggagaggggagccagagccggtgggaagcggggaggggctgcgtggcacagctagtgggcctccccctgcacagccctgcatgtactagcaccttcatcactcccctcagggcatggtctcatctccgcatcaggaattcacctggaggttgaaaagagaaaagaaaaagcaccaaaaaaaaaaaaaaaaaaaaaaaaaaaaaaaaaaaaaaaaaaaaanaaaaaaaaaaaaaaaaaaaaaanaaaaaaaaaaaaaaaaaaaaaaaaagagagagggggcgcgcccccaaaaaatccccccggggggggcgccacatacgcagccgcacccgattctgtcgacaaaaggggcgcccctattgtggagggagttttatatatatcacatggaaggcgcagcggcgcccccgtttatataaaaaccgcctgtcactgagggagaaaaaacgacgctctctaacgtgatataaacatcttgggaagagcacactcctaccatcttcgcggaggggacggacacaactggtggggcaccacacacccccgccaaaaaagacatatacatacaccctctcgtagggggagaactaaatataacaaaataaacgcggcggggactgagctggggtcagcacacaaccactacccctacatatatgccgccgccgccggagagaacaaacatctgctcgccctcagaggaagggatacatatatatacgaagaacaatttctacagggg

SEQ ID NO: 290330 - DNA, 2850 bp, Homo sapiens
  misc_feature (2328)..(2328): n is a, c, g, or t
  misc_feature (2351)..(2351): n is a, c, g, or t
agcggcggggggcgcgcgcccgcccatccgccctccgccctccgccctcgcgccctcgcgccgggggcgggcgctgcgcgtgccgggcggagaagcggcgcgagccgggcgctgcgaacgttcgccgcgggggtggctccggggcctgagtaggcgctgccgctgcctcagccgagggggctgggccggagcgtgcggaggagtgaggccgcaggagaccttcccgacgacccctgctccggcggggaagtgagcaaggatgattgaggaaagtgggaacaagcggaagaccatggcagagaagaggcagctgttcatagaaatgcgtgctcagaattttgatgtcatacgactatcaacttacagaacagcctgcaaattacgatttgtacaaaaacgatgcaaccttcatcttgttgatatctggaacatgattgaagccttccgagacaatggccttaatacactggaccataccaccgagatcagtgtgtcccgcctcgaaactgtcatctcctccatctactatcagttgaacaagcgccttccttctactcaccaaattagtgtggaacaatctatcagcctcctcctcaactttatgattgctgcatatgacagtgagggccgaggcaagttgacggtattttcagttaaagctatgttagcaaccatgtgtggtggaaaaatgctggacaaattgagatatgttttctcccagatgtcagattccaatggcttaatgatatttagcaagtttgaccagtttctgaaggaagttctgaagctcccaacagctgtctttgaagggccatcttttggttacacagagcactcagtccgcacctgttttccacagcagagaaagataatgctaaatatgtttttagacacaatgatggctgaccctcctccccagtgccttgtctggctacctctcatgcacaggcttgcccatgttgagaatgtcttccatcccgtggagtgctcctactgccgatgtgagagtatgatgggtttccggtaccgatgccagcagtgccacaactatcagctctgccagaattgcttttggcgtggccatgccggcggccctcacagcaaccagcaccagatgaaggagcattcctcttggaaatctcctgcaaagaagctgagccatgcaattagtaaatctttggggtgtgtacccacgagagaacccccgcatcctgtttttcctgagcaaccagagaaaccacttgaccttgcacatatagttcctcctcgccctctgactaatatgaatgacaccatggttagccacatgtcctctggagtgcccactcccaccaagaggttacagtatagccaggatatacccagtcacttggccgatgagcatgcgctgatagcctcctatgtggcccgtctgcagcactgtgcacgtgttctggacagtcctagccgactggatgaggaacaccgtcttatagctcgctatgctgcccggctggctgcagaagcaggaaacgtgactcgtcctcccactgacttgagctttaactttgatgccaacaaacaacaaagacagcttattgcagaactggaaaacaaaaacagagagatcctgcaggagattcagcgtctccgcctggaacacgagcaggcctcccagcccacccctgagaaggcacagcagaaccccacgctgctggcagagctgcggctgctgaggcaaaggaaggatgaactggagcagaggatgtcggccctgcaggagagcaggcgggagctgatggtccagctggaagagctgatgaagttgctgaaggaagaagcaggctcaggccacagggtcaccacatacatcgcccacccatggaggcggccggccaatgcccatgccagtgcgctccacgtctgccggctccacccccacccactgtccgcaggactcgctgagcggagtcgggggagacgtgcaggaggccttcgcacaaggtacgaggagaaacctccgcaatgacctgctggtggcagctgactccatcaccaacaccatgtcatctttccaccgcacacctggaccaggcttgcaggctgccagacgtcactccacccgccagggagaggggagccagagccggtgggaagcggggaggggctgcgtggcacagctagtgggcctccccctgcacagccctgcatgtactagcaccttcatcactcccctcagggcatggtctcatctccgcatcaggaattcacctggaggttgaaaagagaaaagaaaaagcaccaaaaaaaaaaaaaaaaaaaaaaaaaaaaaaaaaaaaaaaaaaaaanaaaaaaaaaaaaaaaaaaaaaanaaaaaaaaaaaaaaaaaaaaaaaaagagagagggggcgcgcccccaaaaaatccccccggggggggcgccacatacgcagccgcacccgattctgtcgacaaaaggggcgcccctattgtggagggagttttatatatatcacatggaaggcgcagcggcgcccccgtttatataaaaaccgcctgtcactgagggagaaaaaacgacgctctctaacgtgatataaacatcttgggaagagcacactcctaccatcttcgcggaggggacggacacaactggtggggcaccacacacccccgccaaaaaagacatatacatacaccctctcgtagggggagaactaaatataacaaaataaacgcggcggggactgagctggggtcagcacacaaccactacccctacatatatgccgccgccgccggagagaacaaacatctgctcgccctcagaggaagggatacatatatatacgaagaacaatttctacagggg

SEQ ID NO: 290331 - DNA, 1649 bp, Homo sapiens
agcggcggggggcgcgcgcccgcccatccgccctccgccctccgccctcgcgccctcgcgccgggggcgggcgctgcgcgtgccgggcggagaagcggcgcgagccgggcgctgcgaacgttcgccgcgggggtggctccggggcctgagtaggcgctgccgctgcctcagccgagggggctgggccggagcgtgcggaggagtgaggccgcaggagaccttcccgacgacccctgctccggcggggaagtgagcaaggatgattgaggaaagtgggaacaagcggaagaccatggcagagaagaggcagctgttcatagaaatgcgtgctcagaattttgatgtcatacgactatcaacttacagaacagcctgcaaattacgatttgtacaaaaacgatgcaaccttcatcttgttgatatctggaacatgattgaagccttccgagacaatggccttaatacactggaccataccaccgagatcagtgtgtcccgcctcgaaactgtcatctcctccatctactatcagttgaacaagcgccttccttctactcaccaaattagtgtggaacaatctatcagcctcctcctcaactttatgattgctgcatatgacagtgagggccgaggcaagttgacggtattttcagttaaagctatgttagcaaccatgtgtggtggaaaaatgctggacaaattgagatatgttttctcccagatgtcagattccaatggcttaatgatatttagcaagtttgaccagtttctgaaggaagttctgaagctcccaacagctgtctttgaagggccatcttttggttacacagagcactcagtccgcacctgttttccacagcagagaaagataatgctaaatatgtttttagacacaatgatggctgaccctcctccccagtgccttgtctggctacctctcatgcacaggcttgcccatgttgagaatgtcttccatcccgtggagtgctcctactgccgatgtgagagtatgatgggtttccggtaccgatgccagcagtgccacaactatcagctctgccagaattgcttttggcgtggccatgccggcggccctcacagcaaccagcaccagatgaaggagcattcctcttggaaatctcctgcaaagaagctgagccatgcaattagtaaatctttggggtgtgtacccacgagagaacccccgcatcctgtttttcctgagcaaccagagaaaccacttgaccttgcacatatagttcctcctcgccctctgactaatatgaatgacaccatggttagccacatgtcctctggagtgcccactcccaccaagagtgttctggacagtcctagccgactggatgaggaacaccgtcttatagctcgctatgctgcccggctggctgcagaagcaggaaacgtgactcgtcctcccactgacttgagctttaactttgatgccaacaaacaacaaagacagcttattgcagaactggaaaacaaaaacagagagatcctgcaggagattcagcgtctccgcctggaacacgagcaggcctcccagcccacccctgagaaggcacagcagaaccccacgctgctggcagagctgcggctgctgaggtgagtagggacactctaccact

SEQ ID NO: 290332 - DNA, 1437 bp, Homo sapiens
agcggcggggggcgcgcgcccgcccatccgccctccgccctccgccctcgcgccctcgcgccgggggcgggcgctgcgcgtgccgggcggagaagcggcgcgagccgggcgctgcgaacgttcgccgcgggggtggctccggggcctgagtaggcgctgccgctgcctcagccgagggggctgggccggagcgtgcggaggagtgaggccgcaggagaccttcccgacgacccctgctccggcggggaagtgagcaaggatgattgaggaaagtgggaacaagcggaagaccatggcagagaagaggcagctgttcatagaaatgcgtgctcagaattttgatgtcatacgactatcaacttacagaacagcctgcaaattacgatttgtacaaaaacgatgcaaccttcatcttgttgatatctggaacatgattgaagccttccgagacaatggccttaatacactggaccataccaccgagatcagtgtgtcccgcctcgaaactgtcatctcctccatctactatcagttgaacaagcgccttccttctactcaccaaattagtgtggaacaatctatcagcctcctcctcaactttatgattgctgcatatgacagtgagggccgaggcaagttgacggtattttcagttaaagctatgttagcaaccatgtgtggtggaaaaatgctggacaaattgagatatgttttctcccagatgtcagattccaatggcttaatgatatttagcaagtttgaccagtttctgaaggaagttctgaagctcccaacagctgtctttgaagggccatcttttggttacacagagcactcagtccgcacctgttttccacagcagagaaagataatgctaaatatgtttttagacacaatgatggctgaccctcctccccagtgccttgtctggctacctctcatgcacaggcttgcccatgttgagaatgtcttccatcccgtggagtgctcctactgccgatgtgagagtatgatgggtttccggtaccgatgccagcagtgccacaactatcagctctgccagaattgcttttggcgtggccatgccggcggccctcacagcaaccagcaccagatgaaggagcattcctcttggcaccagagctgcactggagagtgcatcttctgcttccatgtgtgggaagatcactgtgttctctgtgacccagtagtgtgaattgcttatctgtttctgcattaactcaaatttatcagtgattattgcctgaatacctcatgctttctgagatctacaggtacagatttagggttgaactctttctctaaataaatttaatccatgtgtgttatatgttgtatatcttcatttagtgactacgaaatgtctagctatgaaatgtgcatgttaattactcattaagcctttggatcgccttt

SEQ ID NO: 290333 - DNA, 1163 bp, Homo sapiens
agcggcggggggcgcgcgcccgcccatccgccctccgccctccgccctcgcgccctcgcgccgggggcgggcgctgcgcgtgccgggcggagaagcggcgcgagccgggcgctgcgaacgttcgccgcgggggtggctccggggcctgagtaggcgctgccgctgcctcagccgagggggctgggccggagcgtgcggaggagtgaggccgcaggagaccttcccgacgacccctgctccggcggggaagtgagcaaggatgattgaggaaagtgggaacaagcggaagaccatggcagagaagaggcagctgttcatagaaatgcgtgctcagaattttgatgtcatacgactatcaacttacagaacagcctgcaaattacgatttgtacaaaaacgatgcaaccttcatcttgttgatatctggaacatgattgaagccttccgagacaatggccttaatacactggaccataccaccgagatcagtgtgtcccgcctcgaaactgtcatctcctccatctactatcagttgaacaagcgccttccttctactcaccaaattagtgtggaacaatctatcagcctcctcctcaactttatgattgctgcatatgacagtgagggccgaggcaagttgacggtattttcagttaaagctatgttagcaaccatgtgtggtggaaaaatgctggacaaattgagatatgttttctcccagatgtcagattccaatggcttaatgatatttagcaagtttgaccagtttctgaaggaagttctgaagctcccaacagctgtctttgaagggccatcttttggttacacagagcactcagtccgcacctgttttccacagcaggacgcattgagaagtactcaatatcacttctccggtaactcctgccaagaaagcataacctgaatctcatcccaaggaaacatcagacaaactccaatgaaggaatttctacaacctaactgaactttacacttcaaaagtgtcaataatatgaaagattaaaaaagatgaaatgttctaggttaaaagagtttaaagagacatgaaaagctgaatgaactcacaagccaggattttctgttgctataacggacgttattgggacaattggaaaaatctgaataaagtttatagactggat

SEQ ID NO: 290334 - DNA, 1067 bp, Homo sapiens
agcggcggggggcgcgcgcccgcccatccgccctccgccctccgccctcgcgccctcgcgccgggggcgggcgctgcgcgtgccgggcggagaagcggcgcgagccgggcgctgcgaacgttcgccgcgggggtggctccggggcctgagtaggcgctgccgctgcctcagccgagggggctgggccggagcgtgcggaggagtgaggccgcaggagaccttcccgacgacccctgctccggcggggaagtgagcaaggatgattgaggaaagtgggaacaagcggaagaccatggcagagaagaggcagctgttcatagaaatgcgtgctcagaattttgatgtcatacgactatcaacttacagaacagcctgcaaattacgatttgtacaaaaacgatgcaaccttcatcttgttgatatctggaacatgattgaagccttccgagacaatggccttaatacactggaccataccaccgagatcagtgtgtcccgcctcgaaactgtcatctcctccatctactatcagttgaacaagcgccttccttctactcaccaaattagtgtggaacaatctatcagcctcctcctcaactttatgattgctgcatatgacagtgagggccgaggcaagttgacggtattttcagttaaagctatgttagcaaccatgtgtggtggaaaaatgctggacaaattgagatatgttttctcccagatgtcagattccaatggcttaatgatatttagcaagtttgaccacaccagagctgcactggagagtgcatcttctgcttccatgtgtgggaagatcactgtgttctctgtgacccagtagtgtgaattgcttatctgtttctgcattaactcaaatttatcagtgattattgcctgaatacctcatgctttctgagatctacaggtacagatttagggttgaactctttctctaaataaatttaatccatgtgtgttatatgttgtatatcttcatttagtgactacgaaatgtctagctatgaaatgtgcatgttaattactcattaagcctttggatcgccttt

SEQ ID NO: 290335 - DNA, 329 bp, Homo sapiens
cgagtaacgggagaagcaaggaagcccctggggtgggttggtcagggaagcccctttgagatagtctggggcatgagaagacctggccgtgacctcagtgtgttgtttctgcccatgctgccacaggttagcagaggagccggacacagaggaagctcaggtgagtacaaagagtcctctgcctccccacggcccctccctccttcctcagcatcttcccttcccctcccttcctgcagtcacaggtccctagccagggcagtcctaacaggtgaagatgcaagagcccaactgtcccttccctttgcccaccccagccatgtgccctc

SEQ ID NO: 290336 - DNA, 2749 bp, Homo sapiens
agcggcggggggcgcgcgcccgcccatccgccctccgccctccgccctcgcgccctcgcgccgggggcgggcgctgcgcgtgccgggcggagaagcggcgcgagccgggcgctgcgaacgttcgccgcgggggtggctccggggcctgagtaggcgctgccgctgcctcagccgagggggctgggccggagcgtgcggaggagtgaggccgcaggagaccttcccgacgacccctgctccggcggggaagtgagcaaggatgattgaggaaagtgggaacaagcggaagaccatggcagagaagaggcagctgttcatagaaatgcgtgctcagaattttgatgtcatacgactatcaacttacagaacagcctgcaaattacgatttgtacaaaaacgatgcaaccttcatcttgttgatatctggaacatgattgaagccttccgagacaatggccttaatacactggaccataccaccgagatcagtgtgtcccgcctcgaaactgtcatctcctccatctactatcagttgaacaagcgccttccttctactcaccaaattagtgtggaacaatctatcagcctcctcctcaactttatgattgctgcatatgacagtgagggccgaggcaagttgacggtattttcagttaaagctatgttagcaaccatgtgtggtggaaaaatgctggacaaattgagatatgttttctcccagatgtcagattccaatggcttaatgatatttagcaagtttgaccagtttctgaaggaagttctgaagctcccaacagctgtctttgaagggccatcttttggttacacagagcactcagtccgcacctgttttccacagcagagaaagataatgctaaatatgtttttagacacaatgatggctgaccctcctccccagtgccttgtctggctacctctcatgcacaggcttgcccatgttgagaatgtcttccatcccgtggagtgctcctactgccgatgtgagagtatgatgggtttccggtaccgatgccagcagtgccacaactatcagctctgccagaattgcttttggcgtggccatgccggcggccctcacagcaaccagcaccagatgaaggagcattcctcttggaaatctcctgcaaagaagctgagccatgcaattagtaaatctttggggtgtgtacccacgagagaacccccgcatcctgtttttcctgagcaaccagagaaaccacttgaccttgcacatatagttcctcctcgccctctgactaatatgaatgacaccatggttagccacatgtcctctggagtgcccactcccaccaagaggttacagtatagccaggatatacccagtcacttggccgatgagcatgcgctgatagcctcctatgtggcccgtctgcagcactgtgcacgtgttctggacagtcctagccgactggatgaggaacaccgtcttatagctcgctatgctgcccggctggctgcagaagcaggaaacgtgactcgtcctcccactgacttgagctttaactttgatgccaacaaacaacaaagacagcttattgcagaactggaaaacaaaaacagagagatcctgcaggagattcagcgtctccgcctggaacacgagcaggcctcccagcccacccctgagaaggcacagcagaaccccacgctgctggcagagctgcggctgctgaggcaaaggaaggatgaactggagcagaggatgtcggccctgcaggagagcaggcgggagctgatggtccagctggaagagctgatgaagttgctgaaggaaggaggaagagcaaaagcaggcagtaagtgaacttcggaatttcccgccggactctcgctcctttgcacgttcttcctttcctcatataaatgtttctcctcttctccccgcacatcatctctgaagagggttttatgtgtaaaacccccagcggttctccccatggtgttgtaaaatggcctaaaagttcaaggcatgtttacccagtagagcatgttcttacttaaaaccagagcttgtaagtacccatctgttgtgcgcattgaagtgtgcatgattagccaggctaccattgcattttcctgctctttcattctctgttgttgtgtgtctggagtgattttaattgcttgaaacaactttcagggtgctggggtgacctcatgtcatgaatgaatgtgcatgaaaatgaggacttcttttgctaactatagatgtcctttaacaaaattactgacgacgactgagacactgactccacttgcaatgatttcctgttcagaacctactccagacggagctcgggtttttctgagctgtgtggctattgcatggtgttcgggggaggtttatgtttgtttctgtttatcctgatagccactgacccactcaagaaagtcaattgcaggcttatctacaatattagcaccatatgtttatataacatagtaagatttcaaagcacacattttttaagctgaagctgagttttcgtttaccttggagcttttttatcctttgggagataaatacaaaacgtttaatttttaaaatttgcctttttttttttttccgagactccgtctccaaaaacaaacaaacaaaaaaaaactaccatcagagtgaacaggcaacctacagaatgggagaaaatttttgcaatctactcatctgacaaagggctaatatccagaatctacaaagaactcaaac

SEQ ID NO: 290337 - DNA, 2858 bp, Homo sapiens
  misc_feature (2336)..(2336): n is a, c, g, or t
  misc_feature (2359)..(2359): n is a, c, g, or t
agcggcggggggcgcgcgcccgcccatccgccctccgccctccgccctcgcgccctcgcgccgggggcgggcgctgcgcgtgccgggcggagaagcggcgcgagccgggcgctgcgaacgttcgccgcgggggtggctccggggcctgagtaggcgctgccgctgcctcagccgagggggctgggccggagcgtgcggaggagtgaggccgcaggagaccttcccgacgacccctgctccggcggggaagtgagcaaggatgattgaggaaagtgggaacaagcggaagaccatggcagagaagaggcagctgttcatagaaatgcgtgctcagaattttgatgtcatacgactatcaacttacagaacagcctgcaaattacgatttgtacaaaaacgatgcaaccttcatcttgttgatatctggaacatgattgaagccttccgagacaatggccttaatacactggaccataccaccgagatcagtgtgtcccgcctcgaaactgtcatctcctccatctactatcagttgaacaagcgccttccttctactcaccaaattagtgtggaacaatctatcagcctcctcctcaactttatgattgctgcatatgacagtgagggccgaggcaagttgacggtattttcagttaaagctatgttagcaaccatgtgtggtggaaaaatgctggacaaattgagatatgttttctcccagatgtcagattccaatggcttaatgatatttagcaagtttgaccagtttctgaaggaagttctgaagctcccaacagctgtctttgaagggccatcttttggttacacagagcactcagtccgcacctgttttccacagcagagaaagataatgctaaatatgtttttagacacaatgatggctgaccctcctccccagtgccttgtctggctacctctcatgcacaggcttgcccatgttgagaatgtcttccatcccgtggagtgctcctactgccgatgtgagagtatgatgggtttccggtaccgatgccagcagtgccacaactatcagctctgccagaattgcttttggcgtggccatgccggcggccctcacagcaaccagcaccagatgaaggagcattcctcttggaaatctcctgcaaagaagctgagccatgcaattagtaaatctttggggtgtgtacccacgagagaacccccgcatcctgtttttcctgagcaaccagagaaaccacttgaccttgcacatatagttcctcctcgccctctgactaatatgaatgacaccatggttagccacatgtcctctggagtgcccactcccaccaagagtgttctggacagtcctagccgactggatgaggaacaccgtcttatagctcgctatgctgcccggctggctgcagaagcaggaaacgtgactcgtcctcccactgacttgagctttaactttgatgccaacaaacaacaaagacagcttattgcagaactggaaaacaaaaacagagagatcctgcaggagattcagcgtctccgcctggaacacgagcaggcctcccagcccacccctgagaaggcacagcagaaccccacgctgctggcagagctgcggctgctgaggcaaaggaaggatgaactggagcagaggatgtcggccctgcaggagagcaggcgggagctgatggtccagctggaagagctgatgaagttgctgaaggaagaagcaggctcaggccacagggtcaccacatacatcgcccacccatggaggcggccggccaatgcccatgccagtgcgctccacgtctgccggctccacccccacccactgtccgcaggactcgctgagcggagtcgggggagacgtgcaggaggccttcgcacaagcagaggaaggtgcagaggaagaagaagagaagatgcagaatgggaaagacagaggttagcagaggagccggacacagaggaagctcaggcacagaggacgaggagcaagctggcgccgacatggcgaaggcaaggtcttcccccagaggcacattcctctccatctttccaccgcacacctggaccaggcttgcaggctgccagacgtcactccacccgccagggagaggggagccagagccggtgggaagcggggaggggctgcgtggcacagctagtgggcctccccctgcacagccctgcatgtactagcaccttcatcactcccctcagggcatggtctcatctccgcatcaggaattcacctggaggttgaaaagagaaaagaaaaagcaccaaaaaaaaaaaaaaaaaaaaaaaaaaaaaaaaaaaaaaaaaaaaanaaaaaaaaaaaaaaaaaaaaaanaaaaaaaaaaaaaaaaaaaaaaaaagagagagggggcgcgcccccaaaaaatccccccggggggggcgccacatacgcagccgcacccgattctgtcgacaaaaggggcgcccctattgtggagggagttttatatatatcacatggaaggcgcagcggcgcccccgtttatataaaaaccgcctgtcactgagggagaaaaaacgacgctctctaacgtgatataaacatcttgggaagagcacactcctaccatcttcgcggaggggacggacacaactggtggggcaccacacacccccgccaaaaaagacatatacatacaccctctcgtagggggagaactaaatataacaaaataaacgcggcggggactgagctggggtcagcacacaaccactacccctacatatatgccgccgccgccggagagaacaaacatctgctcgccctcagaggaagggatacatatatatacgaagaacaatttctacagggg

SEQ ID NO: 290338 - DNA, 2948 bp, Homo sapiens
  misc_feature (2426)..(2426): n is a, c, g, or t
  misc_feature (2449)..(2449): n is a, c, g, or t
agcggcggggggcgcgcgcccgcccatccgccctccgccctccgccctcgcgccctcgcgccgggggcgggcgctgcgcgtgccgggcggagaagcggcgcgagccgggcgctgcgaacgttcgccgcgggggtggctccggggcctgagtaggcgctgccgctgcctcagccgagggggctgggccggagcgtgcggaggagtgaggccgcaggagaccttcccgacgacccctgctccggcggggaagtgagcaaggatgattgaggaaagtgggaacaagcggaagaccatggcagagaagaggcagctgttcatagaaatgcgtgctcagaattttgatgtcatacgactatcaacttacagaacagcctgcaaattacgatttgtacaaaaacgatgcaaccttcatcttgttgatatctggaacatgattgaagccttccgagacaatggccttaatacactggaccataccaccgagatcagtgtgtcccgcctcgaaactgtcatctcctccatctactatcagttgaacaagcgccttccttctactcaccaaattagtgtggaacaatctatcagcctcctcctcaactttatgattgctgcatatgacagtgagggccgaggcaagttgacggtattttcagttaaagctatgttagcaaccatgtgtggtggaaaaatgctggacaaattgagatatgttttctcccagatgtcagattccaatggcttaatgatatttagcaagtttgaccagtttctgaaggaagttctgaagctcccaacagctgtctttgaagggccatcttttggttacacagagcactcagtccgcacctgttttccacagcagagaaagataatgctaaatatgtttttagacacaatgatggctgaccctcctccccagtgccttgtctggctacctctcatgcacaggcttgcccatgttgagaatgtcttccatcccgtggagtgctcctactgccgatgtgagagtatgatgggtttccggtaccgatgccagcagtgccacaactatcagctctgccagaattgcttttggcgtggccatgccggcggccctcacagcaaccagcaccagatgaaggagcattcctcttggaaatctcctgcaaagaagctgagccatgcaattagtaaatctttggggtgtgtacccacgagagaacccccgcatcctgtttttcctgagcaaccagagaaaccacttgaccttgcacatatagttcctcctcgccctctgactaatatgaatgacaccatggttagccacatgtcctctggagtgcccactcccaccaagaggttacagtatagccaggatatacccagtcacttggccgatgagcatgcgctgatagcctcctatgtggcccgtctgcagcactgtgcacgtgttctggacagtcctagccgactggatgaggaacaccgtcttatagctcgctatgctgcccggctggctgcagaagcaggaaacgtgactcgtcctcccactgacttgagctttaactttgatgccaacaaacaacaaagacagcttattgcagaactggaaaacaaaaacagagagatcctgcaggagattcagcgtctccgcctggaacacgagcaggcctcccagcccacccctgagaaggcacagcagaaccccacgctgctggcagagctgcggctgctgaggcaaaggaaggatgaactggagcagaggatgtcggccctgcaggagagcaggcgggagctgatggtccagctggaagagctgatgaagttgctgaaggaagaagcaggctcaggccacagggtcaccacatacatcgcccacccatggaggcggccggccaatgcccatgccagtgcgctccacgtctgccggctccacccccacccactgtccgcaggactcgctgagcggagtcgggggagacgtgcaggaggccttcgcacaagcagaggaaggtgcagaggaagaagaagagaagatgcagaatgggaaagacagaggttagcagaggagccggacacagaggaagctcaggcacagaggacgaggagcaagctggcgccgacatggcgaaggcaaggtcttcccccagaggcacattcctctccatctttccaccgcacacctggaccaggcttgcaggctgccagacgtcactccacccgccagggagaggggagccagagccggtgggaagcggggaggggctgcgtggcacagctagtgggcctccccctgcacagccctgcatgtactagcaccttcatcactcccctcagggcatggtctcatctccgcatcaggaattcacctggaggttgaaaagagaaaagaaaaagcaccaaaaaaaaaaaaaaaaaaaaaaaaaaaaaaaaaaaaaaaaaaaaanaaaaaaaaaaaaaaaaaaaaaanaaaaaaaaaaaaaaaaaaaaaaaaagagagagggggcgcgcccccaaaaaatccccccggggggggcgccacatacgcagccgcacccgattctgtcgacaaaaggggcgcccctattgtggagggagttttatatatatcacatggaaggcgcagcggcgcccccgtttatataaaaaccgcctgtcactgagggagaaaaaacgacgctctctaacgtgatataaacatcttgggaagagcacactcctaccatcttcgcggaggggacggacacaactggtggggcaccacacacccccgccaaaaaagacatatacatacaccctctcgtagggggagaactaaatataacaaaataaacgcggcggggactgagctggggtcagcacacaaccactacccctacatatatgccgccgccgccggagagaacaaacatctgctcgccctcagaggaagggatacatatatatacgaagaacaatttctacagggg

SEQ ID NO: 290339 - DNA, 2225 bp, Homo sapiens
  misc_feature (1703)..(1703): n is a, c, g, or t
  misc_feature (1726)..(1726): n is a, c, g, or t
catgagctcgcccctggtcttggctgacaaattgagatatgttttctcccagatgtcagattccaatggcttaatgatatttagcaagtttgaccagtttctgaaggaagttctgaagctcccaacagctgtctttgaagggccatcttttggttacacagagcactcagtccgcacctgttttccacagcagagaaagataatgctaaatatgtttttagacacaatgatggctgaccctcctccccagtgccttgtctggctacctctcatgcacaggcttgcccatgttgagaatgtcttccatcccgtggagtgctcctactgccgatgtgagagtatgatgggtttccggtaccgatgccagcagtgccacaactatcagctctgccagaattgcttttggcgtggccatgccggcggccctcacagcaaccagcaccagatgaaggagcattcctcttggaaatctcctgcaaagaagctgagccatgcaattagtaaatctttggggtgtgtacccacgagagaacccccgcatcctgtttttcctgagcaaccagagaaaccacttgaccttgcacatatagttcctcctcgccctctgactaatatgaatgacaccatggttagccacatgtcctctggagtgcccactcccaccaagagtgttctggacagtcctagccgactggatgaggaacaccgtcttatagctcgctatgctgcccggctggctgcagaagcaggaaacgtgactcgtcctcccactgacttgagctttaactttgatgccaacaaacaacaaagacagcttattgcagaactggaaaacaaaaacagagagatcctgcaggagattcagcgtctccgcctggaacacgagcaggcctcccagcccacccctgagaaggcacagcagaaccccacgctgctggcagagctgcggctgctgaggcaaaggaaggatgaactggagcagaggatgtcggccctgcaggagagcaggcgggagctgatggtccagctggaagagctgatgaagttgctgaaggaagaagcaggctcaggccacagggtcaccacatacatcgcccacccatggaggcggccggccaatgcccatgccagtgcgctccacgtctgccggctccacccccacccactgtccgcaggactcgctgagcggagtcgggggagacgtgcaggaggccttcgcacaaggtacgaggagaaacctccgcaatgacctgctggtggcagctgactccatcaccaacaccatgtcatccctggtgaaggagctccattcaggttagcagaggagccggacacagaggaagctcaggcacagaggacgaggagcaagctggcgccgacatggcgaaggcaaggtcttcccccagaggcacattcctctccatctttccaccgcacacctggaccaggcttgcaggctgccagacgtcactccacccgccagggagaggggagccagagccggtgggaagcggggaggggctgcgtggcacagctagtgggcctccccctgcacagccctgcatgtactagcaccttcatcactcccctcagggcatggtctcatctccgcatcaggaattcacctggaggttgaaaagagaaaagaaaaagcaccaaaaaaaaaaaaaaaaaaaaaaaaaaaaaaaaaaaaaaaaaaaaanaaaaaaaaaaaaaaaaaaaaaanaaaaaaaaaaaaaaaaaaaaaaaaagagagagggggcgcgcccccaaaaaatccccccggggggggcgccacatacgcagccgcacccgattctgtcgacaaaaggggcgcccctattgtggagggagttttatatatatcacatggaaggcgcagcggcgcccccgtttatataaaaaccgcctgtcactgagggagaaaaaacgacgctctctaacgtgatataaacatcttgggaagagcacactcctaccatcttcgcggaggggacggacacaactggtggggcaccacacacccccgccaaaaaagacatatacatacaccctctcgtagggggagaactaaatataacaaaataaacgcggcggggactgagctggggtcagcacacaaccactacccctacatatatgccgccgccgccggagagaacaaacatctgctcgccctcagaggaagggatacatatatatacgaagaacaatttctacagggg

SEQ ID NO: 290340 - DNA, 2439 bp, Homo sapiens
  misc_feature (1917)..(1917): n is a, c, g, or t
  misc_feature (1940)..(1940): n is a, c, g, or t
agcggcggggggcgcgcgcccgcccatccgccctccgccctccgccctcgcgccctcgcgccgggggcgggcgctgcgcgtgccgggcggagaagcggcgcgagccgggcgctgcgaacgttcgccgcgggggtggctccggggcctgagtaggcgctgccgctgcctcagccgagggggctgggccggagcgtgcggaggagtgaggccgcaggagaccttcccgacgacccctgctccggcggggaagtgagcaaggatgattgaggaaagtgggaacaagcggaagaccatggcagagaagaggcagctgttcatagaaatgcgtgctcagaattttgatgtcatacgactatcaacttacagaacagcctgcaaattacgatttgtacaaaaacgatgcaaccagaaagataatgctaaatatgtttttagacacaatgatggctgaccctcctccccagtgccttgtctggctacctctcatgcacaggcttgcccatgttgagaatgtcttccatcccgtggagtgctcctactgccgatgtgagagtatgatgggtttccggtaccgatgccagcagtgccacaactatcagctctgccagaattgcttttggcgtggccatgccggcggccctcacagcaaccagcaccagatgaaggagcattcctcttggaaatctcctgcaaagaagctgagccatgcaattagtaaatctttggggtgtgtacccacgagagaacccccgcatcctgtttttcctgagcaaccagagaaaccacttgaccttgcacatatagttcctcctcgccctctgactaatatgaatgacaccatggttagccacatgtcctctggagtgcccactcccaccaagagtgttctggacagtcctagccgactggatgaggaacaccgtcttatagctcgctatgctgcccggctggctgcagaagcaggaaacgtgactcgtcctcccactgacttgagctttaactttgatgccaacaaacaacaaagacagcttattgcagaactggaaaacaaaaacagagagatcctgcaggagattcagcgtctccgcctggaacacgagcaggcctcccagcccacccctgagaaggcacagcagaaccccacgctgctggcagagctgcggctgctgaggcaaaggaaggatgaactggagcagaggatgtcggccctgcaggagagcaggcgggagctgatggtccagctggaagagctgatgaagttgctgaaggaagaagcaggctcaggccacagggtcaccacatacatcgcccacccatggaggcggccggccaatgcccatgccagtgcgctccacgtctgccggctccacccccacccactgtccgcaggactcgctgagcggagtcgggggagacgtgcaggaggccttcgcacaaggtacgaggagaaacctccgcaatgacctgctggtggcagctgactccatcaccaacaccatgtcatccctggtgaaggagctccattcaggttagcagaggagccggacacagaggaagctcaggcacagaggacgaggagcaagctggcgccgacatggcgaaggcaaggtcttcccccagaggcacattcctctccatctttccaccgcacacctggaccaggcttgcaggctgccagacgtcactccacccgccagggagaggggagccagagccggtgggaagcggggaggggctgcgtggcacagctagtgggcctccccctgcacagccctgcatgtactagcaccttcatcactcccctcagggcatggtctcatctccgcatcaggaattcacctggaggttgaaaagagaaaagaaaaagcaccaaaaaaaaaaaaaaaaaaaaaaaaaaaaaaaaaaaaaaaaaaaaanaaaaaaaaaaaaaaaaaaaaaanaaaaaaaaaaaaaaaaaaaaaaaaagagagagggggcgcgcccccaaaaaatccccccggggggggcgccacatacgcagccgcacccgattctgtcgacaaaaggggcgcccctattgtggagggagttttatatatatcacatggaaggcgcagcggcgcccccgtttatataaaaaccgcctgtcactgagggagaaaaaacgacgctctctaacgtgatataaacatcttgggaagagcacactcctaccatcttcgcggaggggacggacacaactggtggggcaccacacacccccgccaaaaaagacatatacatacaccctctcgtagggggagaactaaatataacaaaataaacgcggcggggactgagctggggtcagcacacaaccactacccctacatatatgccgccgccgccggagagaacaaacatctgctcgccctcagaggaagggatacatatatatacgaagaacaatttctacagggg

SEQ ID NO: 290341 - DNA, 1857 bp, Homo sapiens
  misc_feature (1335)..(1335): n is a, c, g, or t
  misc_feature (1358)..(1358): n is a, c, g, or t
caaaaaactcaagccttactggttctccctacctcctgatagctacctacctagactgcttggcagacacagttctgtaggctactttcttatcaagagttggcaattagaagaggcccttggagaggaggtgggagtgctccttaaagtcctcatcggaatggaattgctgaccgggttcattaggctatggatttgcagcaagacttggattctattgcaatcctcctcgccctctgactaatatgaatgacaccatggttagccacatgtcctctggagtgcccactcccaccaagagtgttctggacagtcctagccgactggatgaggaacaccgtcttatagctcgctatgctgcccggctggctgcagaagcaggaaacgtgactcgtcctcccactgacttgagctttaactttgatgccaacaaacaacaaagacagcttattgcagaactggaaaacaaaaacagagagatcctgcaggagattcagcgtctccgcctggaacacgagcaggcctcccagcccacccctgagaaggcacagcagaaccccacgctgctggcagagctgcggctgctgaggcaaaggaaggatgaactggagcagaggatgtcggccctgcaggagagcaggcgggagctgatggtccagctggaagagctgatgaagttgctgaaggaagaagcaggctcaggccacagggtcaccacatacatcgcccacccatggaggcggccggccaatgcccatgccagtgcgctccacgtctgccggctccacccccacccactgtccgcaggactcgctgagcggagtcgggggagacgtgcaggaggccttcgcacaaggtacgaggagaaacctccgcaatgacctgctggtggcagctgactccatcaccaacaccatgtcatccctggtgaaggagctccattcaggttagcagaggagccggacacagaggaagctcaggcacagaggacgaggagcaagctggcgccgacatggcgaaggcaaggtcttcccccagaggcacattcctctccatctttccaccgcacacctggaccaggcttgcaggctgccagacgtcactccacccgccagggagaggggagccagagccggtgggaagcggggaggggctgcgtggcacagctagtgggcctccccctgcacagccctgcatgtactagcaccttcatcactcccctcagggcatggtctcatctccgcatcaggaattcacctggaggttgaaaagagaaaagaaaaagcaccaaaaaaaaaaaaaaaaaaaaaaaaaaaaaaaaaaaaaaaaaaaaanaaaaaaaaaaaaaaaaaaaaaanaaaaaaaaaaaaaaaaaaaaaaaaagagagagggggcgcgcccccaaaaaatccccccggggggggcgccacatacgcagccgcacccgattctgtcgacaaaaggggcgcccctattgtggagggagttttatatatatcacatggaaggcgcagcggcgcccccgtttatataaaaaccgcctgtcactgagggagaaaaaacgacgctctctaacgtgatataaacatcttgggaagagcacactcctaccatcttcgcggaggggacggacacaactggtggggcaccacacacccccgccaaaaaagacatatacatacaccctctcgtagggggagaactaaatataacaaaataaacgcggcggggactgagctggggtcagcacacaaccactacccctacatatatgccgccgccgccggagagaacaaacatctgctcgccctcagaggaagggatacatatatatacgaagaacaatttctacagggg

SEQ ID NO: 290342 - DNA, 1571 bp, Homo sapiens
agcggcggggggcgcgcgcccgcccatccgccctccgccctccgccctcgcgccctcgcgccgggggcgggcgctgcgcgtgccgggcggagaagcggcgcgagccgggcgctgcgaacgttcgccgcgggggtggctccggggcctgagtaggcgctgccgctgcctcagccgagggggctgggccggagcgtgcggaggagtgaggccgcaggagaccttcccgacgacccctgctccggcggggaagtgagcaaggatgattgaggaaagtgggaacaagcggaagaccatggcagagaagaggcagctgttcatagaaatgcgtgctcagaattttgatgtcatacgactatcaacttacagaacagcctgcaaattacgatttgtacaaaaacgatgcaaccttcatcttgttgatatctggaacatgattgaagccttccgagacaatggccttaatacactggaccataccaccgagatcagtgtgtcccgcctcgaaactgtcatctcctccatctactatcagttgaacaagcgccttccttctactcaccaaattagtgtggaacaatctatcagcctcctcctcaactttatgattgctgcatatgacagtgagggccgaggcaagttgacggtattttcagttaaagctatgttagcaaccatgtgtggtggaaaaatgctggacaaattgagatatgttttctcccagatgtcagattccaatggcttaatgatatttagcaagtttgaccagtttctgaaggaagttctgaagctcccaacagctgtctttgaagggccatcttttggttacacagagcactcagtccgcacctgttttccacagcagagaaagataatgctaaatatgtttttagacacaatgatggctgaccctcctccccagtgccttgtctggctacctctcatgcacaggcttgcccatgttgagaatgtcttccatcccgtggagtgctcctactgccgatgtgagagtatgatgggtttccggtaccgatgccagcagtgccacaactatcagctctgccagaattgcttttggcgtggccatgccggcggccctcacagcaaccagcaccagatgaaggagcattcctcttggttgtgtttcatctgtgtcctgagtgttaatctgtttgatcagtaacagcacctgggccagtttcctcatggatgcctaccaaataaggggtgtgatatagtaaaatcttaacactaacatttatgccaggatggcaagaatgttgtgcttcatcacttgattttaaaagcagaatttttaaaaattccaggaaacaaagatagtacatttgaaatggtctcttttattcagtaaaatggaatgttgcagtgctctcttttcaaagcaaaaagtgagtttctttttattttaaaactgtacaggctgggcacgatggctcacacctgtaatcccagcactttgggaggccgaggcaggcggatcacgaggtcaggagatcgagatcatcctggctgacacagtgaaaccccgtctctactaaaaatacaaaaaaaaa

SEQ ID NO: 290343 - DNA, 1387 bp, Homo sapiens
  misc_feature (865)..(865): n is a, c, g, or t
  misc_feature (888)..(888): n is a, c, g, or t
gcaaggctggacagcaatggccctcagagaacagaacaggctcaggaggggccaggcagtgctcgagcctcgggtgagcaagcgcagggcttttcaaagcagaccatctgcaggagggggaccgccctcactcaaggcgcagtcatgttcccttggggaactttcagagctgagtgggctttgcccccctcatgtaactgctccctggatttaaggagttttgattccattttttaatgactttccttctcctgagaagcatctgtctccatggctgcctcgggttggctacagtagtagaaagtatgactctaccctgctgtcatacctgggtgggaaaagtcaacaaacgagtaacgggagaagcaaggaagcccctggggtgggttggtcagggaagcccctttgagatagtctggggcatgagaagacctggccgtgacctcagtgtgttgtttctgcccatgctgccacaggttagcagaggagccggacacagaggaagctcaggcacagaggacgaggagcaagctggcgccgacatggcgaaggcaaggtcttcccccagaggcacattcctctccatctttccaccgcacacctggaccaggcttgcaggctgccagacgtcactccacccgccagggagaggggagccagagccggtgggaagcggggaggggctgcgtggcacagctagtgggcctccccctgcacagccctgcatgtactagcaccttcatcactcccctcagggcatggtctcatctccgcatcaggaattcacctggaggttgaaaagagaaaagaaaaagcaccaaaaaaaaaaaaaaaaaaaaaaaaaaaaaaaaaaaaaaaaaaaaanaaaaaaaaaaaaaaaaaaaaaanaaaaaaaaaaaaaaaaaaaaaaaaagagagagggggcgcgcccccaaaaaatccccccggggggggcgccacatacgcagccgcacccgattctgtcgacaaaaggggcgcccctattgtggagggagttttatatatatcacatggaaggcgcagcggcgcccccgtttatataaaaaccgcctgtcactgagggagaaaaaacgacgctctctaacgtgatataaacatcttgggaagagcacactcctaccatcttcgcggaggggacggacacaactggtggggcaccacacacccccgccaaaaaagacatatacatacaccctctcgtagggggagaactaaatataacaaaataaacgcggcggggactgagctggggtcagcacacaaccactacccctacatatatgccgccgccgccggagagaacaaacatctgctcgccctcagaggaagggatacatatatatacgaagaacaatttctacagggg

SEQ ID NO: 290344 - DNA, 602 bp, Homo sapiens
ctagaggatccccccattccattccagcgtcccttctcaggtggaaggtatcgctggtttttagagagatggtggcataagaggagtctgggagaccacacccctaagcttcatcttgcttctgctgctaactttggaggggttgccctttcagggagggatgcctgctggctgccctgatctctctgtggaggaaggcacagagtatgtgggcggtgatctcaagtttagtcgtgggactcaggatttagagggaacgagggctcagagaggtggcacagatttgcctgtattattcaggttttttgttttgtcctcttcagatttttttttttttgcggggggggcagagggggatagtcatccattctaccccaatccccagtttcccagtgggttgggtggaggaaaggagggacaggaggctctaggagttatgtgggttcctgaaggagcaatcttgatctgaaccagatggttcactgcttcagcaacccccttcccagccctcccccttggctgtgaattggatgcttttaaccttgtaacttgagaatggaggaagggaggccagggggccaactgtctgtgtgggtgtttat

SEQ ID NO: 290345 - DNA, 806 bp, Homo sapiens
acctggtagcactacatggctcgcagctatggcactggacacacagatctaggacattttcatcatcacagaaagttctattggacagcactgaatagcacgagcccatttttataattaaaaaaaagggtgtacacttataaaagcagcagaaatatttggaaggaaaccatgcccctgctctgaaagaacaggacggtagagcaagaagaaaatgaagcaggctgggactccctgagcagcgcagcccctttacagaaaacctgtttgaagaggcatcaaaactgttcatcttggccggaagcggtggctcatgcctgtaatcccagcacttcgggaggctgagaatctaaatcccatgaagacagggacactgctttgctgcctgctatgtctccagcacttagaacagtgcctggcacatcacagagcctcaataatatttgctgaatgaatgagcagcaccccgccctttaacagtggagagaaaccatcatcgacgaaggatctataccagagctgcaactgccaccagcgacccaagacagagaaatgccaccttgcgttactaaagggctcatgacaccatatacaacagctgaatccccaagaggagtgtggctgaggagtgagacgaaggtctctgggacactttcagaaggatgagactttgtccagccagtcctcattatgccaggcaaaggaactgcctgtactcataactgtggaaggggaaccacataccatgggcaggtggtccatgggggcagtgattaagagcaagtcctagaactcacactgccttt

SEQ ID NO: 290346 - DNA, 2705 bp, Homo sapiens
tgccaccgtcttctgtctctacctccctcctggctggccaatggctctgtgttcctgggcctgctgctggctgtccagagtaggggttgcttagagctgtgtgcatccctgcgggtggtgtgggagtgggcggttgtctaaaggcaggtcccctctactgataaacaaggaccggagatagacctagaggctgacattcttggctcccccagcctacaccccccccacctcgatttcccacagagccctagggacgggtagccagctctgtggcatggtatctggaggcaggccagcaacctgatgtgcatgccacggcccgtccctctccccactcagagctgcagtagcctggaggttcagagagccgggctactctgagaagaagacaccaagtggattctgcttcccctgggacagcactgagcgagtgtggagagaggtacagccctcggcctacaagctctttagtcttgaaagcgccacaagcagcagctgctgagccatggctgaaggggaaatcaccaccttcacagccctgaccgagaagtttaatctgcctccagggaattacaagaagcccaaactcctctactgtagcaacgggggccacttcctgaggatccttccggatggcacagtggatgggacaagggacaggagcgaccagcacattcagctgcagctcagtgcggaaagcgtgggggaggtgtatataaagagtaccgagactggccagtacttggccatggacaccgacgggcttttatacggctcacagacaccaaatgaggaatgtttgttcctggaaaggctggaggagaaccattacaacacctatatatccaagaagcatgcagagaagaattggtttgttggcctcaagaagaatgggagctgcaaacgcggtcctcggactcactatggccagaaagcaatcttgtttctccccctgccagtctcttctgattaaagagatctgttctgggtgttgaccactccagagaagtttcgaggggtcctcacctggttgacccaaaaatgttcccttgaccattggctgcgctaacccccagcccacagagcctgaatttgtaagcaacttgcttctaaatgcccagttcacttctttgcagagccttttacccctgcacagtttagaacagagggaccaaattgcttctaggagtcaactggctggccagtctgggtctgggtttggatctccaattgcctcttgcaggctgagtccctccatgcaaaagtggggctaaatgaagtgtgttaaggggtcggctaagtgggacattagtaactgcacactatttccctctactgagtaaaccctatctgtgattcccccaaacatctggcatggctcccttttgtccttcctgtgccctgcaaatattagcaaagaagcttcatgccaggttaggaaggcagcattccatgaccagaaacagggacaaagaaatccccccttcagaacagaggcatttaaaatggaaaagagagattggattttggtgggtaacttagaaggatggcatctccatgtagaataaatgaagaaagggaggcccagccgcaggaaggcagaataaatccttgggagtcattaccacgccttgaccttcccaaggttactcagcagcagagagccctgggtgacttcaggtggagagcactagaagtggtttcctgataacaagcaaggatatcagagctgggaaattcatgtggatctggggactgagtgtgggagtgcagagaaagaaagggaaactggctgaggggataccataaaaagaggatgatttcagaaggagaaggaaaaagaaagtaatgccacacattgtgcttggcccctggtaagcagaggctttggggtcctagcccagtgcttctccaacactgaagtgcttgcagatcatctggggacctggtttgaatggagattctgattcagtgggttgggggcagagtttctgcagttccatcaggtcccccccaggtgcaggtgctgacaatactgctgccttacccgccatacattaaggagcagggtcctggtcctaaagagttattcaaatgaaggtggttcgacgccccgaacctcacctgacctcaactaacccttaaaaatgcacacctcatgagtctacctgagcattcaggcagcactgacaatagttatgcctgtactaaggagcatgattttaagaggctttggcccaatgcctataaaatgcccatttcgaagatatacaaaaacatacttcaaaaatgttaaacccttaccaacagcttttcccaggagaccatttgtattaccattacttgtataaatacacttcctgcttaaacttgacccaggtggctagcaaattagaaacaccattcatctctaacatatgatactgatgccatgtaaaggcctttaataagtcattgaaatttactgtgagactgtatgttttaattgcatttaaaaatatatagcttgaaagcagttaaactgattagtattcaggcactgagaatgatagtaataggatacaatgtataagctactcacttatctgatacttatttacctataaaatgagatttttgttttccactgtgctattacaaattttcttttgaaagtaggaactcttaagcaatggtaattgtgaataaaaattgatgagagtgtt

SEQ ID NO: 290347 - DNA, 3947 bp, Homo sapiens
tccccaaggctaggaggccaacctactaacaggtgggtgggtatggtgtgtggtttcactcagttcttctcatggggtttctctgagctccattcataccagaaagggagcaggagagagaggacaagtggatccaacagccttcgctccaggggaatcagggcatcgcctccttttctgggaggacactcccttctgatggtgaatgggaactcccttcctcctgcagcagcctgcctgcagctgtcctggtagaacagtgtggacattgcagaagctgtcactgccccagaaagaaagcaccccagagccaaggcaaagagtcttgaaagcgccacaagcagcagctgctgagccatggctgaaggggaaatcaccaccttcacagccctgaccgagaagtttaatctgcctccagggaattacaagaagcccaaactcctctactgtagcaacgggggccacttcctgaggatccttccggatggcacagtggatgggacaagggacaggagcgaccagcacattcagctgcagctcagtgcggaaagcgtgggggaggtgtatataaagagtaccgagactggccagtacttggccatggacaccgacgggcttttatacggctcacagacaccaaatgaggaatgtttgttcctggaaaggctggaggagaaccattacaacacctatatatccaagaagcatgcagagaagaattggtttgttggcctcaagaagaatgggagctgcaaacgcggtcctcggactcactatggccagaaagcaatcttgtttctccccctgccagtctcttctgattaaagagatctgttctgggtgttgaccactccagagaagtttcgaggggtcctcacctggttgacccaaaaatgttcccttgaccattggctgcgctaacccccagcccacagagcctgaatttgtaagcaacttgcttctaaatgcccagttcacttctttgcagagccttttacccctgcacagtttagaacagagggaccaaattgcttctaggagtcaactggctggccagtctgggtctgggtttggatctccaattgcctcttgcaggctgagtccctccatgcaaaagtggggctaaatgaagtgtgttaaggggtcggctaagtgggacattagtaactgcacactatttccctctactgagtaaaccctatctgtgattcccccaaacatctggcatggctcccttttgtccttcctgtgccctgcaaatattagcaaagaagcttcatgccaggttaggaaggcagcattccatgaccagaaacagggacaaagaaatccccccttcagaacagaggcatttaaaatggaaaagagagattggattttggtgggtaacttagaaggatggcatctccatgtagaataaatgaagaaagggaggcccagccgcaggaaggcagaataaatccttgggagtcattaccacgccttgaccttcccaaggttactcagcagcagagagccctgggtgacttcaggtggagagcactagaagtggtttcctgataacaagcaaggatatcagagctgggaaattcatgtggatctggggactgagtgtgggagtgcagagaaagaaagggaaactggctgaggggataccataaaaagaggatgatttcagaaggagaaggaaaaagaaagtaatgccacacattgtgcttggcccctggtaagcagaggctttggggtcctagcccagtgcttctccaacactgaagtgcttgcagatcatctggggacctggtttgaatggagattctgattcagtgggttgggggcagagtttctgcagttccatcaggtcccccccaggtgcaggtgctgacaatactgctgccttacccgccatacattaaggagcagggtcctggtcctaaagagttattcaaatgaaggtggttcgacgccccgaacctcacctgacctcaactaacccttaaaaatgcacacctcatgagtctacctgagcattcaggcagcactgacaatagttatgcctgtactaaggagcatgattttaagaggctttggcccaatgcctataaaatgcccatttcgaagatatacaaaaacatacttcaaaaatgttaaacccttaccaacagcttttcccaggagaccatttgtattaccattacttgtataaatacacttcctgcttaaacttgacccaggtggctagcaaattagaaacaccattcatctctaacatatgatactgatgccatgtaaaggcctttaataagtcattgaaatttactgtgagactgtatgttttaattgcatttaaaaatatatagcttgaaagcagttaaactgattagtattcaggcactgagaatgatagtaataggatacaatgtataagctactcacttatctgatacttatttacctataaaatgagatttttgttttccactgtgctattacaaattttcttttgaaagtaggaactcttaagcaatggtaattgtgaataaaaattgatgagagtgttagctcctgtttcatatgaaattgaagtaattgttaactaaaaacaattccttagtaactgaactgtcatatttagaatggaaggaaaatgacagtttgtgaaagttcaaagcaatagtgcaattgaagaattgacctaagtaagctgacattatggttaataatagtattttagatttgtgcagcaaaataatttcataacttttttgtttttgttacttggataagatcaatctgttttattttagtaaatctttgcaggcaagttagagaaaatgcagtgtggcttaacgtctctttagtatgaagatttggccagaaaaagatacccagagaggaaatctaagataattataatggtccatactttttattgtatgaatcaaactcaagcataacattggccaaggaaaattaaataccattgctaacttgtgaaatggaagtctgtgatttcggagatgcaaagcattgtagtaaaaacaccaatgtgacctcgaccatctcagcccagatatcattcatatatctgttcaatgactattaaggtgcctactgtgtgctaggcactgtactggatactggggaccttgtctgtctggtttgctgctgtatcttctcccagggcattatatttatgatgaaagatgctgtggattcaattctttcagtcaagaataaacacagactttgtaggttcctgctgaataaagcaaatcccagaaacccagattttggaagaatcagcaacccccagcataaaataaacccctatcaaaatgtcagaggacatggcaaggtaaacttagcattttcaactttagaaccgggtcagcttcagggggactgctttcaaatcagccaaagagcctgtcagatcttcttagaaggaagaggttggtagttccctgctctgttttgaacatgctctagtttattaacctggggacattcccattgctgtcttaagtaagtctcatagccagctcctgtcacgtgactctcatatggattcattttcgggccagctctgaacaaagcatcatgaacatatgtgcttttggtcgtttgcaatgtgatggtggtggaggtaggtattggtttccttggaaggcatgataagaaagattcacaatggccaacagtgtgtatgaacaaaaaactgattggagcatcagctagtactgaaggtccttgctttgtgtcagaggcaaaggaacccaaggcgccaagtcctcagccttgagtgtactgctgacaactaaactcacaggctgcaaagcagacctctgatgaagatgcctgttatttcacatcactgtctttttgtgtatcatagtctgcaccttacaaatattaataaatgttccaataataggtgaaaaaaaaaa

SEQ ID NO: 290348 - DNA, 3713 bp, Homo sapiens
agactcttgggggattccttagtgagtgagttcactgctcaaagaagggctttgccacttctgcagggaagccagccacgggccagcagtcttgaaagcgccacaagcagcagctgctgagccatggctgaaggggaaatcaccaccttcacagccctgaccgagaagtttaatctgcctccagggaattacaagaagcccaaactcctctactgtagcaacgggggccacttcctgaggatccttccggatggcacagtggatgggacaagggacaggagcgaccagcacattcagctgcagctcagtgcggaaagcgtgggggaggtgtatataaagagtaccgagactggccagtacttggccatggacaccgacgggcttttatacggctcacagacaccaaatgaggaatgtttgttcctggaaaggctggaggagaaccattacaacacctatatatccaagaagcatgcagagaagaattggtttgttggcctcaagaagaatgggagctgcaaacgcggtcctcggactcactatggccagaaagcaatcttgtttctccccctgccagtctcttctgattaaagagatctgttctgggtgttgaccactccagagaagtttcgaggggtcctcacctggttgacccaaaaatgttcccttgaccattggctgcgctaacccccagcccacagagcctgaatttgtaagcaacttgcttctaaatgcccagttcacttctttgcagagccttttacccctgcacagtttagaacagagggaccaaattgcttctaggagtcaactggctggccagtctgggtctgggtttggatctccaattgcctcttgcaggctgagtccctccatgcaaaagtggggctaaatgaagtgtgttaaggggtcggctaagtgggacattagtaactgcacactatttccctctactgagtaaaccctatctgtgattcccccaaacatctggcatggctcccttttgtccttcctgtgccctgcaaatattagcaaagaagcttcatgccaggttaggaaggcagcattccatgaccagaaacagggacaaagaaatccccccttcagaacagaggcatttaaaatggaaaagagagattggattttggtgggtaacttagaaggatggcatctccatgtagaataaatgaagaaagggaggcccagccgcaggaaggcagaataaatccttgggagtcattaccacgccttgaccttcccaaggttactcagcagcagagagccctgggtgacttcaggtggagagcactagaagtggtttcctgataacaagcaaggatatcagagctgggaaattcatgtggatctggggactgagtgtgggagtgcagagaaagaaagggaaactggctgaggggataccataaaaagaggatgatttcagaaggagaaggaaaaagaaagtaatgccacacattgtgcttggcccctggtaagcagaggctttggggtcctagcccagtgcttctccaacactgaagtgcttgcagatcatctggggacctggtttgaatggagattctgattcagtgggttgggggcagagtttctgcagttccatcaggtcccccccaggtgcaggtgctgacaatactgctgccttacccgccatacattaaggagcagggtcctggtcctaaagagttattcaaatgaaggtggttcgacgccccgaacctcacctgacctcaactaacccttaaaaatgcacacctcatgagtctacctgagcattcaggcagcactgacaatagttatgcctgtactaaggagcatgattttaagaggctttggcccaatgcctataaaatgcccatttcgaagatatacaaaaacatacttcaaaaatgttaaacccttaccaacagcttttcccaggagaccatttgtattaccattacttgtataaatacacttcctgcttaaacttgacccaggtggctagcaaattagaaacaccattcatctctaacatatgatactgatgccatgtaaaggcctttaataagtcattgaaatttactgtgagactgtatgttttaattgcatttaaaaatatatagcttgaaagcagttaaactgattagtattcaggcactgagaatgatagtaataggatacaatgtataagctactcacttatctgatacttatttacctataaaatgagatttttgttttccactgtgctattacaaattttcttttgaaagtaggaactcttaagcaatggtaattgtgaataaaaattgatgagagtgttagctcctgtttcatatgaaattgaagtaattgttaactaaaaacaattccttagtaactgaactgtcatatttagaatggaaggaaaatgacagtttgtgaaagttcaaagcaatagtgcaattgaagaattgacctaagtaagctgacattatggttaataatagtattttagatttgtgcagcaaaataatttcataacttttttgtttttgttacttggataagatcaatctgttttattttagtaaatctttgcaggcaagttagagaaaatgcagtgtggcttaacgtctctttagtatgaagatttggccagaaaaagatacccagagaggaaatctaagataattataatggtccatactttttattgtatgaatcaaactcaagcataacattggccaaggaaaattaaataccattgctaacttgtgaaatggaagtctgtgatttcggagatgcaaagcattgtagtaaaaacaccaatgtgacctcgaccatctcagcccagatatcattcatatatctgttcaatgactattaaggtgcctactgtgtgctaggcactgtactggatactggggaccttgtctgtctggtttgctgctgtatcttctcccagggcattatatttatgatgaaagatgctgtggattcaattctttcagtcaagaataaacacagactttgtaggttcctgctgaataaagcaaatcccagaaacccagattttggaagaatcagcaacccccagcataaaataaacccctatcaaaatgtcagaggacatggcaaggtaaacttagcattttcaactttagaaccgggtcagcttcagggggactgctttcaaatcagccaaagagcctgtcagatcttcttagaaggaagaggttggtagttccctgctctgttttgaacatgctctagtttattaacctggggacattcccattgctgtcttaagtaagtctcatagccagctcctgtcacgtgactctcatatggattcattttcgggccagctctgaacaaagcatcatgaacatatgtgcttttggtcgtttgcaatgtgatggtggtggaggtaggtattggtttccttggaaggcatgataagaaagattcacaatggccaacagtgtgtatgaacaaaaaactgattggagcatcagctagtactgaaggtccttgctttgtgtcagaggcaaaggaacccaaggcgccaagtcctcagccttgagtgtactgctgacaactaaactcacaggctgcaaagcagacctctgatgaagatgcctgttatttcacatcactgtctttttgtgtatcatagtctgcaccttacaaatattaataaatgttccaataataggtgaaaaaaaaaa

SEQ ID NO: 290349 - DNA, 2782 bp, Homo sapiens
tccccaaggctaggaggccaacctactaacaggtgggtgggtatggtgtgtggtttcactcagttcttctcatggggtttctctgagctccattcataccagaaagggagcaggagagagaggacaagtggatccaacagccttcgctccaggggaatcagggcatcgcctccttttctgggaggacactcccttctgatggtgaatgggaactcccttcctcctgcagcagcctgcctgcagctgtcctggtagaacagtgtggacattgcagaagctgtcactgccccagaaagaaagcaccccagagccaaggcaaagagcttcccaaggttactcagcagcagagagccctgggtgacttcaggtggagagcactagaagtggtttcctgataacaagcaaggatatcagagctgggaaattcatgtggatctggggactgagtgtgggagtgcagagaaagaaagggaaactggctgaggggataccataaaaagaggatgatttcagaaggagaaggaaaaagaaagtaatgccacacattgtgcttggcccctggtaagcagaggctttggggtcctagcccagtgcttctccaacactgaagtgcttgcagatcatctggggacctggtttgaatggagattctgattcagtgggttgggggcagagtttctgcagttccatcaggtcccccccaggtgcaggtgctgacaatactgctgccttacccgccatacattaaggagcagggtcctggtcctaaagagttattcaaatgaaggtggttcgacgccccgaacctcacctgacctcaactaacccttaaaaatgcacacctcatgagtctacctgagcattcaggcagcactgacaatagttatgcctgtactaaggagcatgattttaagaggctttggcccaatgcctataaaatgcccatttcgaagatatacaaaaacatacttcaaaaatgttaaacccttaccaacagcttttcccaggagaccatttgtattaccattacttgtataaatacacttcctgcttaaacttgacccaggtggctagcaaattagaaacaccattcatctctaacatatgatactgatgccatgtaaaggcctttaataagtcattgaaatttactgtgagactgtatgttttaattgcatttaaaaatatatagcttgaaagcagttaaactgattagtattcaggcactgagaatgatagtaataggatacaatgtataagctactcacttatctgatacttatttacctataaaatgagatttttgttttccactgtgctattacaaattttcttttgaaagtaggaactcttaagcaatggtaattgtgaataaaaattgatgagagtgttagctcctgtttcatatgaaattgaagtaattgttaactaaaaacaattccttagtaactgaactgtcatatttagaatggaaggaaaatgacagtttgtgaaagttcaaagcaatagtgcaattgaagaattgacctaagtaagctgacattatggttaataatagtattttagatttgtgcagcaaaataatttcataacttttttgtttttgttacttggataagatcaatctgttttattttagtaaatctttgcaggcaagttagagaaaatgcagtgtggcttaacgtctctttagtatgaagatttggccagaaaaagatacccagagaggaaatctaagataattataatggtccatactttttattgtatgaatcaaactcaagcataacattggccaaggaaaattaaataccattgctaacttgtgaaatggaagtctgtgatttcggagatgcaaagcattgtagtaaaaacaccaatgtgacctcgaccatctcagcccagatatcattcatatatctgttcaatgactattaaggtgcctactgtgtgctaggcactgtactggatactggggaccttgtctgtctggtttgctgctgtatcttctcccagggcattatatttatgatgaaagatgctgtggattcaattctttcagtcaagaataaacacagactttgtaggttcctgctgaataaagcaaatcccagaaacccagattttggaagaatcagcaacccccagcataaaataaacccctatcaaaatgtcagaggacatggcaaggtaaacttagcattttcaactttagaaccgggtcagcttcagggggactgctttcaaatcagccaaagagcctgtcagatcttcttagaaggaagaggttggtagttccctgctctgttttgaacatgctctagtttattaacctggggacattcccattgctgtcttaagtaagtctcatagccagctcctgtcacgtgactctcatatggattcattttcgggccagctctgaacaaagcatcatgaacatatgtgcttttggtcgtttgcaatgtgatggtggtggaggtaggtattggtttccttggaaggcatgataagaaagattcacaatggccaacagtgtgtatgaacaaaaaactgattggagcatcagctagtactgaaggtccttgctttgtgtcagaggcaaaggaacccaaggcgccaagtcctcagccttgagtgtactgctgacaactaaactcacaggctgcaaagcagacctctgatgaagatgcctgttatttcacatcactgtctttttgtgtatcatagtctgcaccttacaaatattaataaatgttccaataataggtgaaaaaaaaaa

SEQ ID NO: 290350 - DNA, 4095 bp, Homo sapiens
tgccaccgtcttctgtctctacctccctcctggctggccaatggctctgtgttcctgggcctgctgctggctgtccagagtaggggttgcttagagctgtgtgcatccctgcgggtggtgtgggagtgggcggttgtctaaaggcaggtcccctctactgataaacaaggaccggagatagacctagaggctgacattcttggctcccccagcctacaccccccccacctcgatttcccacagagccctagggacgggtagccagctctgtggcatggtatctggaggcaggccagcaacctgatgtgcatgccacggcccgtccctctccccactcagagctgcagtagcctggaggttcagagagccgggctactctgagaagaagacaccaagtggattctgcttcccctgggacagcactgagcgagtgtggagagaggtacagccctcggcctacaagctctttagtcttgaaagcgccacaagcagcagctgctgagccatggctgaaggggaaatcaccaccttcacagccctgaccgagaagtttaatctgcctccagggaattacaagaagcccaaactcctctactgtagcaacgggggccacttcctgaggatccttccggatggcacagtggatgggacaagggacaggagcgaccagcacattcagctgcagctcagtgcggaaagcgtgggggaggtgtatataaagagtaccgagactggccagtacttggccatggacaccgacgggcttttatacggctcacagacaccaaatgaggaatgtttgttcctggaaaggctggaggagaaccattacaacacctatatatccaagaagcatgcagagaagaattggtttgttggcctcaagaagaatgggagctgcaaacgcggtcctcggactcactatggccagaaagcaatcttgtttctccccctgccagtctcttctgattaaagagatctgttctgggtgttgaccactccagagaagtttcgaggggtcctcacctggttgacccaaaaatgttcccttgaccattggctgcgctaacccccagcccacagagcctgaatttgtaagcaacttgcttctaaatgcccagttcacttctttgcagagccttttacccctgcacagtttagaacagagggaccaaattgcttctaggagtcaactggctggccagtctgggtctgggtttggatctccaattgcctcttgcaggctgagtccctccatgcaaaagtggggctaaatgaagtgtgttaaggggtcggctaagtgggacattagtaactgcacactatttccctctactgagtaaaccctatctgtgattcccccaaacatctggcatggctcccttttgtccttcctgtgccctgcaaatattagcaaagaagcttcatgccaggttaggaaggcagcattccatgaccagaaacagggacaaagaaatccccccttcagaacagaggcatttaaaatggaaaagagagattggattttggtgggtaacttagaaggatggcatctccatgtagaataaatgaagaaagggaggcccagccgcaggaaggcagaataaatccttgggagtcattaccacgccttgaccttcccaaggttactcagcagcagagagccctgggtgacttcaggtggagagcactagaagtggtttcctgataacaagcaaggatatcagagctgggaaattcatgtggatctggggactgagtgtgggagtgcagagaaagaaagggaaactggctgaggggataccataaaaagaggatgatttcagaaggagaaggaaaaagaaagtaatgccacacattgtgcttggcccctggtaagcagaggctttggggtcctagcccagtgcttctccaacactgaagtgcttgcagatcatctggggacctggtttgaatggagattctgattcagtgggttgggggcagagtttctgcagttccatcaggtcccccccaggtgcaggtgctgacaatactgctgccttacccgccatacattaaggagcagggtcctggtcctaaagagttattcaaatgaaggtggttcgacgccccgaacctcacctgacctcaactaacccttaaaaatgcacacctcatgagtctacctgagcattcaggcagcactgacaatagttatgcctgtactaaggagcatgattttaagaggctttggcccaatgcctataaaatgcccatttcgaagatatacaaaaacatacttcaaaaatgttaaacccttaccaacagcttttcccaggagaccatttgtattaccattacttgtataaatacacttcctgcttaaacttgacccaggtggctagcaaattagaaacaccattcatctctaacatatgatactgatgccatgtaaaggcctttaataagtcattgaaatttactgtgagactgtatgttttaattgcatttaaaaatatatagcttgaaagcagttaaactgattagtattcaggcactgagaatgatagtaataggatacaatgtataagctactcacttatctgatacttatttacctataaaatgagatttttgttttccactgtgctattacaaattttcttttgaaagtaggaactcttaagcaatggtaattgtgaataaaaattgatgagagtgttagctcctgtttcatatgaaattgaagtaattgttaactaaaaacaattccttagtaactgaactgtcatatttagaatggaaggaaaatgacagtttgtgaaagttcaaagcaatagtgcaattgaagaattgacctaagtaagctgacattatggttaataatagtattttagatttgtgcagcaaaataatttcataacttttttgtttttgttacttggataagatcaatctgttttattttagtaaatctttgcaggcaagttagagaaaatgcagtgtggcttaacgtctctttagtatgaagatttggccagaaaaagatacccagagaggaaatctaagataattataatggtccatactttttattgtatgaatcaaactcaagcataacattggccaaggaaaattaaataccattgctaacttgtgaaatggaagtctgtgatttcggagatgcaaagcattgtagtaaaaacaccaatgtgacctcgaccatctcagcccagatatcattcatatatctgttcaatgactattaaggtgcctactgtgtgctaggcactgtactggatactggggaccttgtctgtctggtttgctgctgtatcttctcccagggcattatatttatgatgaaagatgctgtggattcaattctttcagtcaagaataaacacagactttgtaggttcctgctgaataaagcaaatcccagaaacccagattttggaagaatcagcaacccccagcataaaataaacccctatcaaaatgtcagaggacatggcaaggtaaacttagcattttcaactttagaaccgggtcagcttcagggggactgctttcaaatcagccaaagagcctgtcagatcttcttagaaggaagaggttggtagttccctgctctgttttgaacatgctctagtttattaacctggggacattcccattgctgtcttaagtaagtctcatagccagctcctgtcacgtgactctcatatggattcattttcgggccagctctgaacaaagcatcatgaacatatgtgcttttggtcgtttgcaatgtgatggtggtggaggtaggtattggtttccttggaaggcatgataagaaagattcacaatggccaacagtgtgtatgaacaaaaaactgattggagcatcagctagtactgaaggtccttgctttgtgtcagaggcaaaggaacccaaggcgccaagtcctcagccttgagtgtactgctgacaactaaactcacaggctgcaaagcagacctctgatgaagatgcctgttatttcacatcactgtctttttgtgtatcatagtctgcaccttacaaatattaataaatgttccaataataggtgaaaaaaaaaa

SEQ ID NO: 290351 - DNA, 3669 bp, Homo sapiens
aaaaaatactgttggcagcagcacaatgtttgggctaagacctggtcttgaaagcgccacaagcagcagctgctgagccatggctgaaggggaaatcaccaccttcacagccctgaccgagaagtttaatctgcctccagggaattacaagaagcccaaactcctctactgtagcaacgggggccacttcctgaggatccttccggatggcacagtggatgggacaagggacaggagcgaccagcacattcagctgcagctcagtgcggaaagcgtgggggaggtgtatataaagagtaccgagactggccagtacttggccatggacaccgacgggcttttatacggctcacagacaccaaatgaggaatgtttgttcctggaaaggctggaggagaaccattacaacacctatatatccaagaagcatgcagagaagaattggtttgttggcctcaagaagaatgggagctgcaaacgcggtcctcggactcactatggccagaaagcaatcttgtttctccccctgccagtctcttctgattaaagagatctgttctgggtgttgaccactccagagaagtttcgaggggtcctcacctggttgacccaaaaatgttcccttgaccattggctgcgctaacccccagcccacagagcctgaatttgtaagcaacttgcttctaaatgcccagttcacttctttgcagagccttttacccctgcacagtttagaacagagggaccaaattgcttctaggagtcaactggctggccagtctgggtctgggtttggatctccaattgcctcttgcaggctgagtccctccatgcaaaagtggggctaaatgaagtgtgttaaggggtcggctaagtgggacattagtaactgcacactatttccctctactgagtaaaccctatctgtgattcccccaaacatctggcatggctcccttttgtccttcctgtgccctgcaaatattagcaaagaagcttcatgccaggttaggaaggcagcattccatgaccagaaacagggacaaagaaatccccccttcagaacagaggcatttaaaatggaaaagagagattggattttggtgggtaacttagaaggatggcatctccatgtagaataaatgaagaaagggaggcccagccgcaggaaggcagaataaatccttgggagtcattaccacgccttgaccttcccaaggttactcagcagcagagagccctgggtgacttcaggtggagagcactagaagtggtttcctgataacaagcaaggatatcagagctgggaaattcatgtggatctggggactgagtgtgggagtgcagagaaagaaagggaaactggctgaggggataccataaaaagaggatgatttcagaaggagaaggaaaaagaaagtaatgccacacattgtgcttggcccctggtaagcagaggctttggggtcctagcccagtgcttctccaacactgaagtgcttgcagatcatctggggacctggtttgaatggagattctgattcagtgggttgggggcagagtttctgcagttccatcaggtcccccccaggtgcaggtgctgacaatactgctgccttacccgccatacattaaggagcagggtcctggtcctaaagagttattcaaatgaaggtggttcgacgccccgaacctcacctgacctcaactaacccttaaaaatgcacacctcatgagtctacctgagcattcaggcagcactgacaatagttatgcctgtactaaggagcatgattttaagaggctttggcccaatgcctataaaatgcccatttcgaagatatacaaaaacatacttcaaaaatgttaaacccttaccaacagcttttcccaggagaccatttgtattaccattacttgtataaatacacttcctgcttaaacttgacccaggtggctagcaaattagaaacaccattcatctctaacatatgatactgatgccatgtaaaggcctttaataagtcattgaaatttactgtgagactgtatgttttaattgcatttaaaaatatatagcttgaaagcagttaaactgattagtattcaggcactgagaatgatagtaataggatacaatgtataagctactcacttatctgatacttatttacctataaaatgagatttttgttttccactgtgctattacaaattttcttttgaaagtaggaactcttaagcaatggtaattgtgaataaaaattgatgagagtgttagctcctgtttcatatgaaattgaagtaattgttaactaaaaacaattccttagtaactgaactgtcatatttagaatggaaggaaaatgacagtttgtgaaagttcaaagcaatagtgcaattgaagaattgacctaagtaagctgacattatggttaataatagtattttagatttgtgcagcaaaataatttcataacttttttgtttttgttacttggataagatcaatctgttttattttagtaaatctttgcaggcaagttagagaaaatgcagtgtggcttaacgtctctttagtatgaagatttggccagaaaaagatacccagagaggaaatctaagataattataatggtccatactttttattgtatgaatcaaactcaagcataacattggccaaggaaaattaaataccattgctaacttgtgaaatggaagtctgtgatttcggagatgcaaagcattgtagtaaaaacaccaatgtgacctcgaccatctcagcccagatatcattcatatatctgttcaatgactattaaggtgcctactgtgtgctaggcactgtactggatactggggaccttgtctgtctggtttgctgctgtatcttctcccagggcattatatttatgatgaaagatgctgtggattcaattctttcagtcaagaataaacacagactttgtaggttcctgctgaataaagcaaatcccagaaacccagattttggaagaatcagcaacccccagcataaaataaacccctatcaaaatgtcagaggacatggcaaggtaaacttagcattttcaactttagaaccgggtcagcttcagggggactgctttcaaatcagccaaagagcctgtcagatcttcttagaaggaagaggttggtagttccctgctctgttttgaacatgctctagtttattaacctggggacattcccattgctgtcttaagtaagtctcatagccagctcctgtcacgtgactctcatatggattcattttcgggccagctctgaacaaagcatcatgaacatatgtgcttttggtcgtttgcaatgtgatggtggtggaggtaggtattggtttccttggaaggcatgataagaaagattcacaatggccaacagtgtgtatgaacaaaaaactgattggagcatcagctagtactgaaggtccttgctttgtgtcagaggcaaaggaacccaaggcgccaagtcctcagccttgagtgtactgctgacaactaaactcacaggctgcaaagcagacctctgatgaagatgcctgttatttcacatcactgtctttttgtgtatcatagtctgcaccttacaaatattaataaatgttccaataataggtgaaaaaaaaaa

SEQ ID NO: 290352 - DNA, 3689 bp, Homo sapiens
tgccaccgtcttctgtctctacctccctcctggctggccaatggctctgtgttcctgggcctgctgctggctgtccagagtaggggttgcttagagctgtgtgcatccctgcgggtggtgtgggagtgggcggttgtctaaaggcaggtcccctctactgataaacaaggaccggagatagacctagaggctgacattcttggctcccccagcctacaccccccccacctcgatttcccacagagccctagggacgggtagccagctctgtggcatggtatctggaggcaggccagcaacctgatgtgcatgccacggcccgtccctctccccactcagagctgcagtagcctggaggttcagagagccgggctactctgagaagaagacaccaagtggattctgcttcccctgggacagcactgagcgagtgtggagagaggtacagccctcggcctacaagctctttagtcttgaaagcgccacaagcagcagctgctgagccatggctgaaggggaaatcaccaccttcacagccctgaccgagaagtttaatctgcctccagggaattacaagaagcccaaactcctctactgtagcaacgggggccacttcctgaggatccttccggatggcacagtggatgggacaagggacaggagcgaccagcacattcagctgcagctcagtgcggaaagcgtgggggaggtgtatataaagagtaccgagactggccagtacttggccatggacaccgacgggcttttatacggctcacagacaccaaatgaggaatgtttgttcctggaaaggctggaggagaaccattacaacacctatatatccaagaagcatgcagagaagaattggtttgttggcctcaagaagaatgggagctgcaaacgcggtcctcggactcactatggccagaaagcaatcttgtttctccccctgccagtctcttctgattaaagagatctgttctgggtgttgaccactccagagaagtttcgaggggtcctcacctggttgacccaaaaatgttcccttgaccattggctgcgctaacccccagcccacagagcctgaatttgtaagcaacttgcttctaaatgcccagttcacttctttgcagagccttttacccctgcacagtttagaacagagggaccaaattgcttctaggagtcaactggctggccagtctgggtctgggtttggatctccaattgcctcttgcaggctgagtccctccatgcaaaagtggggctaaatgaagtgtgttaaggggtcggctaagtgggacattagtaactgcacactatttccctctactgagtaaaccctatctgtgattcccccaaacatctggcatggctcccttttgtccttcctgtgccctgcaaatattagcaaagaagcttcatgccaggttaggaaggcagcattccatgaccagaaacagggacaaagaaatccccccttcagaacagaggcatttaaaatggaaaagagagattggattttggtgggtaacttagaaggatggcatctccatgtagaataaatgaagaaagggaggcccagccgcaggaaggcagaataaatccttgggagtcattaccacgccttgaccttcccaaggttactcagcagcagagagccctgggtgacttcaggtggagagcactagaagtggtttcctgataacaagcaaggatatcagagctgggaaattcatgtggatctggggactgagtgtgggagtgcagagaaagaaagggaaactggctgaggggataccataaaaagaggatgatttcagaaggagaaggaaaaagaaagtaatgccacacattgtgcttggcccctggtaagcagaggctttggggtcctagcccagtgcttctccaacactgaagtgcttgcagatcatctggggacctggtttgaatggagattctgattcagtgggttgggggcagagtttctgcagttccatcaggtcccccccaggtgcaggtgctgacaatactgctgccttacccgccatacattaaggagcagggtcctggtcctaaagagttattcaaatgaaggtggttcgacgccccgaacctcacctgacctcaactaacccttaaaaatgcacacctcatgagtctacctgagcattcaggcagcactgacaatagttatgcctgtactaaggagcatgattttaagaggctttggcccaatgcctataaaatgcccatttcgaagatatacaaaaacatacttcaaaaatgttaaacccttaccaacagcttttcccaggagaccatttgtattaccattacttgtataaatacacttcctgcttaaacttgacccaggtggctagcaaattagaaacaccattcatctctaacatatgatactgatgccatgtaaaggcctttaataagtcattgaaatttactgtgagactgtatgttttaattgcatttaaaaatatatagcttgaaagcagttaaactgattagtattcaggcactgagaatgatagtaataggatacaatgtataagctactcacttatctgatacttatttacctataaaatgagatttttgttttccactgtgctattacaaattttcttttgaaagtaggaactcttaagcaatggtaattgtgaataaaaattgatgagagtgttagctcctgtttcatatgaaattgaagtaattgttaactaaaaacaattccttagtaactgaactgtcatatttagaatggaaggaaaatgacagtttgtgaaagttcaaagcaatagtgcaattgaagaattgacctaagtaagctgacattatggttaataatagtattttagatttgtgcagcaaaataatttcataacttttttgtttttgttacttggataagatcaatctgttttattttagtaaatctttgcaggcaagttagagaaaatgcagtgtggcttaacgtctctttagtatgaagatttggccagaaaaagatacccagagaggaaatctaagataattataatggtccatactttttattgtatgaatcaaactcaagcataacattggccaaggaaaattaaataccattgctaacttgtgaaatggaagtctgtgatttcggagatgcaaagcattgtagtaaaaacaccaatgtgacctcgaccatctcagcccagatatcattcatatatctgttcaatgactattaaggtgcctactgtgtgctaggcactgtactggatactggggaccttgtctgtctggtttgctgctgtatcttctcccagggcattatatttatgatgaaagatgctgtggattcaattctttcagtcaagaataaacacagactttgtaggttcctgctgaataaagcaaatcccagaaacccagattttggaagaatcagcaacccccagcataaaataaacccctatcaaaatgtcagaggacatggcaaggtaaacttagcattttcaactttagaaccgggtcagcttgagtgtactgctgacaactaaactcacaggctgcaaagcagacctctgatgaagatgcctgttatttcacatcactgtctttttgtgtatcatagtctgcaccttacaaatattaataaatgttccaataataggtgaaaaaaaaaa

SEQ ID NO: 290353 - DNA, 2422 bp, Homo sapiens
agcggagagcgccgccgccgccgctgctgcagcagcagctgctctgcaaagtggtggccggggccaggtccggggtgccctccctcccaccttctcacgccatgagccagggaagtccgggggtacctgggccccacatgatgtaccgacacgaaggagaaggaaaaagaaagtaatgccacacattgtgcttggcccctggtaagcagaggctttggggtcctagcccagtgcttctccaacactgaagtgcttgcagatcatctggggacctggtttgaatggagattctgattcagtgggttgggggcagagtttctgcagttccatcaggtcccccccaggtgcaggtgctgacaatactgctgccttacccgccatacattaaggagcagggtcctggtcctaaagagttattcaaatgaaggtggttcgacgccccgaacctcacctgacctcaactaacccttaaaaatgcacacctcatgagtctacctgagcattcaggcagcactgacaatagttatgcctgtactaaggagcatgattttaagaggctttggcccaatgcctataaaatgcccatttcgaagatatacaaaaacatacttcaaaaatgttaaacccttaccaacagcttttcccaggagaccatttgtattaccattacttgtataaatacacttcctgcttaaacttgacccaggtggctagcaaattagaaacaccattcatctctaacatatgatactgatgccatgtaaaggcctttaataagtcattgaaatttactgtgagactgtatgttttaattgcatttaaaaatatatagcttgaaagcagttaaactgattagtattcaggcactgagaatgatagtaataggatacaatgtataagctactcacttatctgatacttatttacctataaaatgagatttttgttttccactgtgctattacaaattttcttttgaaagtaggaactcttaagcaatggtaattgtgaataaaaattgatgagagtgttagctcctgtttcatatgaaattgaagtaattgttaactaaaaacaattccttagtaactgaactgtcatatttagaatggaaggaaaatgacagtttgtgaaagttcaaagcaatagtgcaattgaagaattgacctaagtaagctgacattatggttaataatagtattttagatttgtgcagcaaaataatttcataacttttttgtttttgttacttggataagatcaatctgttttattttagtaaatctttgcaggcaagttagagaaaatgcagtgtggcttaacgtctctttagtatgaagatttggccagaaaaagatacccagagaggaaatctaagataattataatggtccatactttttattgtatgaatcaaactcaagcataacattggccaaggaaaattaaataccattgctaacttgtgaaatggaagtctgtgatttcggagatgcaaagcattgtagtaaaaacaccaatgtgacctcgaccatctcagcccagatatcattcatatatctgttcaatgactattaaggtgcctactgtgtgctaggcactgtactggatactggggaccttgtctgtctggtttgctgctgtatcttctcccagggcattatatttatgatgaaagatgctgtggattcaattctttcagtcaagaataaacacagactttgtaggttcctgctgaataaagcaaatcccagaaacccagattttggaagaatcagcaacccccagcataaaataaacccctatcaaaatgtcagaggacatggcaaggtaaacttagcattttcaactttagaaccgggtcagcttcagggggactgctttcaaatcagccaaagagcctgtcagatcttcttagaaggaagaggttggtagttccctgctctgttttgaacatgctctagtttattaacctggggacattcccattgctgtcttaagtaagtctcatagccagctcctgtcacgtgactctcatatggattcattttcgggccagctctgaacaaagcatcatgaacatatgtgcttttggtcgtttgcaatgtgatggtggtggaggtaggtattggtttccttggaaggcatgataagaaagattcacaatggccaacagtgtgtatgaacaaaaaactgattggagcatcagctagtactgaaggtccttgctttgtgtcagaggcaaaggaacccaaggcgccaagtcctcagccttgagtgtactgctgacaactaaactcacaggctgcaaagcagacctctgatgaagatgcctgttatttcacatcactgtctttttgtgtatcatagtctgcaccttacaaatattaataaatgttccaataataggtgaaaaaaaaaa

SEQ ID NO: 290354 - DNA, 2601 bp, Homo sapiens
tgccaccgtcttctgtctctacctccctcctggctggccaatggctctgtgttcctgggcctgctgctggctgtccagagtaggggttgcttagagctgtgtgcatccctgcgggtggtgtgggagtgggcggttgtctaaaggcaggtcccctctactgataaacaaggaccggagatagacctagaggctgacattcttggctcccccagcctacaccccccccacctcgatttcccacagagccctagggacgggtagccagctctgtggcatggtatctggaggcaggccagcaacctgatgtgcatgccacggcccgtccctctccccactcagagctgcagtagcctggaggttcagagagccgggctactctgagaagaagacaccaagtggattctgcttcccctgggacagcactgagcgagtgtggagagaggtacagccctcggcctacaagctctttagtcttgaaagcgccacaagcagcagctgctgagccatggctgaaggggaaatcaccaccttcacagccctgaccgagaagtttaatctgcctccagggaattacaagaagcccaaactcctctactgtagcaacgggggccacttcctgaggatccttccggatggcacagtggatgggacaagggacaggagcgaccagcacacagacaccaaatgaggaatgtttgttcctggaaaggctggaggagaaccattacaacacctatatatccaagaagcatgcagagaagaattggtttgttggcctcaagaagaatgggagctgcaaacgcggtcctcggactcactatggccagaaagcaatcttgtttctccccctgccagtctcttctgattaaagagatctgttctgggtgttgaccactccagagaagtttcgaggggtcctcacctggttgacccaaaaatgttcccttgaccattggctgcgctaacccccagcccacagagcctgaatttgtaagcaacttgcttctaaatgcccagttcacttctttgcagagccttttacccctgcacagtttagaacagagggaccaaattgcttctaggagtcaactggctggccagtctgggtctgggtttggatctccaattgcctcttgcaggctgagtccctccatgcaaaagtggggctaaatgaagtgtgttaaggggtcggctaagtgggacattagtaactgcacactatttccctctactgagtaaaccctatctgtgattcccccaaacatctggcatggctcccttttgtccttcctgtgccctgcaaatattagcaaagaagcttcatgccaggttaggaaggcagcattccatgaccagaaacagggacaaagaaatccccccttcagaacagaggcatttaaaatggaaaagagagattggattttggtgggtaacttagaaggatggcatctccatgtagaataaatgaagaaagggaggcccagccgcaggaaggcagaataaatccttgggagtcattaccacgccttgaccttcccaaggttactcagcagcagagagccctgggtgacttcaggtggagagcactagaagtggtttcctgataacaagcaaggatatcagagctgggaaattcatgtggatctggggactgagtgtgggagtgcagagaaagaaagggaaactggctgaggggataccataaaaagaggatgatttcagaaggagaaggaaaaagaaagtaatgccacacattgtgcttggcccctggtaagcagaggctttggggtcctagcccagtgcttctccaacactgaagtgcttgcagatcatctggggacctggtttgaatggagattctgattcagtgggttgggggcagagtttctgcagttccatcaggtcccccccaggtgcaggtgctgacaatactgctgccttacccgccatacattaaggagcagggtcctggtcctaaagagttattcaaatgaaggtggttcgacgccccgaacctcacctgacctcaactaacccttaaaaatgcacacctcatgagtctacctgagcattcaggcagcactgacaatagttatgcctgtactaaggagcatgattttaagaggctttggcccaatgcctataaaatgcccatttcgaagatatacaaaaacatacttcaaaaatgttaaacccttaccaacagcttttcccaggagaccatttgtattaccattacttgtataaatacacttcctgcttaaacttgacccaggtggctagcaaattagaaacaccattcatctctaacatatgatactgatgccatgtaaaggcctttaataagtcattgaaatttactgtgagactgtatgttttaattgcatttaaaaatatatagcttgaaagcagttaaactgattagtattcaggcactgagaatgatagtaataggatacaatgtataagctactcacttatctgatacttatttacctataaaatgagatttttgttttccactgtgctattacaaattttcttttgaaagtaggaactcttaagcaatggtaattgtgaataaaaattgatgagagtgtt

SEQ ID NO: 290355 - DNA, 1705 bp, Homo sapiens
cgccctcccgccgcgcgctcgggatcccgaccagtcctgaccgcacgggggccgcggccacggggcgcaggggccatggtgcgcggcaggatctcccggctctcggtccgggacgtgcgcttccccacgtcgcttgggggccacggcgcggacgccatgcacacggaccctgactactcggctgcctatgtcgtcatagaaactgatgcagaagatggaatcaaggggtgtggaattaccttcactctgggaaaaggcactgaagttgttgtctgtgctgtgaatgccctcgcccaccatgtgctcaacaaggacctcaaggacattgttggtgacttcagaggcttctataggcagctcacaagtgatgggcagctcagatggattggtccagaaaagggcgtggtgcacctggcgacagcggccgtcctaaacgcggtgtgggacttgtgggccaagcaggagggaaagcctgtctggaagttacttgtggacatggatcccaggatgctggtatcctgcatagatttcaggtacatcactgatgtcctgactgaggaggatgccctagaaatactgcagaaaggtcaaattggtaaaaaagaaagagagaagcaaatgctggcacaaggataccctgcttacacgacatcgtgcgcctggctggggtactcagatgacacgttgaagcagctctgtgcccaggcgctgaaggatggctggaccaggtttaaagtaaaggtgggtgctgatctccaggatgacatgcgaagatgccaaatcatccgagacatgattggaccggaaaagactttgatgatggatgccaaccagcgctgggatgtgcctgaggcggtggagtggatgtccaagctggccaagttcaagccattgtggattgaggagccaacctcccctgatgacattctggggcacgccaccatttccaaggcactggtcccattaggaattggcattgccacaggagaacagtgccacaatagagtgatatttaagcaactcctacaggcgaaggccctgcagttcctccagattgacagttgcagactgggcagtgtcaatgagaacctctcagtattgctgatggccaaaaagtttgaaattcctgtttgcccccatgctggtggagttggcctctgtgaactggtgcagcacctgattatatttgactacatatcagtttctgcaagccttgaaaatagggtgtgtgagtatgttgaccacctgcatgagcatttcaagtatcccgtgatgatccagcgggcttcctacatgcctcccaaggatcccggctactcaacagaaatgaaggaggaatctgtaaagaaacaccagtatccagatggtgaagtttggaagaaactccttcctgctcaagaaaattaagtgctcagccccaacaacttttttctttctgaagtgaaagggcttaaaatttcttggaaatagttttacaaaaatggatttaaaaaatcctaccgatcaagatgagttcagctagaagtcataccaccctcaggaatcagctaagtaattattacttgattcttttagcaaatcaatgcacgttatcctacttaatccttaaataagtttagatttaactaacccaaagtccaggaggatgttcttacaaaaatagctatatcaagggctggcacctagacattaaactgtaatttga

SEQ ID NO: 290356 - DNA, 1963 bp, Homo sapiens
cgccctcccgccgcgcgctcgggatcccgaccagtcctgaccgcacgggggccgcggccacggggcgcaggggccatggtgcgcggcaggatctcccggctctcggtccgggacgtgcgcttccccacgtcgcttgggggccacggcgcggacgccatgcacacggaccctgactactcggctgcctatgtcgtcatagaaactgatgcagaagatggaatcaaggggtgtggaattaccttcactctgggaaaaggcactgaagttgattggtccagaaaagggcgtggtgcacctggcgacagcggccgtcctaaacgcggtgtgggacttgtgggccaagcaggagggaaagcctgtctggaagttacttgtggacatggatcccaggatgctggtatcctgcatagatttcaggtacatcactgatgtcctgactgaggaggatgccctagaaatactgcagaaaggtcaaattggtaaaaaagaaagagagaagcaaatgctggcacaaggataccctgcttacacgacatcgtgcgcctggctggggtactcagatgacacgttgaagcagctctgtgcccaggcgctgaaggatggctggaccaggtttaaagtaaaggtgggtgctgatctccaggatgacatgcgaagatgccaaatcatccgagacatgattggaccggaaaagactttgatgatggatgccaaccagcgctgggatgtgcctgaggcggtggagtggatgtccaagctggccaagttcaagccattgtggattgaggagccaacctcccctgatgacattctggggcacgccaccatttccaaggcactggtcccattaggaattggcattgccacaggagaacagtgccacaatagagtgatatttaagcaactcctacaggcgaaggccctgcagttcctccagattgacagttgcagactgggcagtgtcaatgagaacctctcagtattgctgatggccaaaaagtttgaaattcctgtttgcccccatgctggtggagttggcctctgtgaactggtgcagcacctgattatatttgactacatatcagtttctgcaagccttgaaaatagggtgtgtgagtatgttgaccacctgcatgagcatttcaagtatcccgtgatgatccagcgggcttcctacatgcctcccaaggatcccggctactcaacagaaatgaaggaggaatctgtaaagaaacaccagtatccagatggtgaagtttggaagaaactccttcctgctcaagaaaattaagtgctcagccccaacaacttttttctttctgaagtgaaagggcttaaaatttcttggaaatagttttacaaaaatggatttaaaaaatcctaccgatcaagatgagttcagctagaagtcataccaccctcaggaatcagctaaagcaaaaagaacttttacctcggcatccagcccaacccctaaagactgacaatatccttcgagctcctttgaaagcaccctaaacagccatttccattttaatagttggatgcggattgtacccttcaatctgaaagtcttcagctttgaagtcatcaattttctcaacttttcgaagaatcctgagctttgggaaaggtctgggttctcgctgaagctaaaaacaaaataaggccattattttgccataattgtacgacctgttgtaattgctcctcatgtccgtgaaacaagtacacaggatgtgatcaacaaagttctattttacaggagtatgatcctgtcgataccttgccgtaggttatgtaacatgattggagcgcaaccagctgttctcttgcacagatcgagagtgaggggtattttgtgacattacacagcatcaggagcctggtgcctcatcaggtgtaagttcttataaccactcttggcaaatttattaaagacaggaacacagtcaatctgtaa

SEQ ID NO: 290357 - DNA, 1561 bp, Homo sapiens
agctcgaactccggacctcaggtgatccacccatctcagcctcccaaagtgctgggattacagatgtgagccaccgaacctggcccagaactcttagaagtagaatctcagggttgaaagagtttttaggattttcgacagttatggtagagtattattggtcactataagatgttagtgggaatggaactactggctgttttccaactgactgttccgtcagggtggggagaggtctcagcacgaggccccgccgaaatgttggtaagtggtcagccaagtgggccgctcactcccggttcacccactgtgttcctgtcagtgaagcaaacatccccatttggcaggagaagaagctgccggaggtcacactgctagtgattggtggcccaggggtagggcagccttctttcctctgcagttcactgctccagaaccatctccagcctcatagctcaccgtggacagccctgcggtgtggcgctgatgtacagagtgatgccaggcgttcatctccccactgagctcctgctgagtgtttgcctggggccaggtcctccttccgggaagtcattttagctggaaagaacagggtgggggcgggtggcaagggatcagagcatgagcgtttgagggcttcgtcaggggcagtgaggagcctctaaaggactctacatttaggaatgacagagtcaaacaatttaacaaagccctaaaggtccctgccaggaaagaatgagccccatgtatcaccataagcaacttcttagaaacataacccacccctgtcatcccagcactttgggaggccaaggagggaggattgcttgaagccaggagctcgagatcaacctggtcaacatagtgagaccccatctctacaaaaataaaaataaattagccgggcatagtggcacatacctggagtcccagctactcaggaggctgaggcaggaggatcacataagccggggagactgaggctgcagtgagctatgatggcatcactgcactccagcctgggcaacagagtgagaccttgtctctaaaaaaagaataataaattttaaaaaacaaaatataacccaccttataattgattcaggcctcttcccctcctgtcacgttgccaggatcccaggatgctggtatcctgcatagatttcaggtacatcactgatgtcctgactgaggaggatgccctaggtgagtttggaagctttctgggatacacgatgtgcacacacagtagtggcatgctttgtttcctaaaagagtgagtgatgctttttatttcttccagaaatactgcagaaaggtcaaattggtaaaaaagaaagaggtgggttgtaagaaaattttcttcattgtttttgctaacattgtccacttttgagtgcccctgtccttttggggtacaccattgtcttcccaaatgccctgtgctgagcagctaggccctcaaatcaacattcaagtctgcatggtgaagcctgctgggtatgacctctgactgcagagtttgcttcagccactgctgaaaggaagtttggctttagga

SEQ ID NO: 290358 - DNA, 926 bp, Homo sapiens
cgccctcccgccgcgcgctcgggatcccgaccagtcctgaccgcacgggggccgcggccacggggcgcaggggccatggtgcgcggcaggatctcccggctctcggtccgggacgtgcgcttccccacgtcgcttgggggccacggcgcggacgccatgcacacggaccctgactactcggctgcctatgtcgtcatagaaactgatgcagaagatggaatcaaggggtgtggaattaccttcactctgggaaaaggcactgaagttgttgtctgtgctgtgaatgccctcgcccaccatgtgctcaacaaggacctcaaggacattgttggtgacttcagaggcttctataggcagctcacaagtgatgggcagctcagatggattggtccagaaaagggcgtggtgcacctggcgacagcggccgtcctaaacgcggtgtgggacttgtgggccaagcaggagggaaagcctgtctggaagttacttgtggacatggatcccaggatgctggtatcctgcatagatttcaggtacatcactgatgtcctgactgaggaggatgccctaggtgagtttggaagctttctgggatacacgatgtgcacacacagtagtggcatgctttgtttcctaaaagagtgagtgatgctttttatttcttccagaaatactgcagaaaggtcaaattggtaaaaaagaaagaggtgggttgtaagaaaattttcttcattgtttttgctaacattgtccacttttgagtgcccctgtccttttggggtacaccattgtcttcccaaatgccctgtgctgagcagctaggccctcaaatcaacattcaagtctgcatggtgaagcctgctgggtatgacctctgactgcagagtttgcttcagccactgctgaaaggaagtttggctttagga

SEQ ID NO: 290359 - DNA, 566 bp, Homo sapiens
tgacgggattgcaggcataagctataagccaccatgcctggcctgtttctgtttttatttatttatttatttatttatctatgtatttatttatttttgagatagagtcccactctgttgcccaggctggagtgcagtggtgtgatctcggctcactgcaacctctgcctcctaggttcaagcaattctcctgcctcagcctcctgagtagggactacaggcacaaaccaccacacctggctcatttctctgttttcagtagagacggggtttcaccatgttggccaggctggtcttggtcccaaagtcctgggtttacaggcatgagccatcacacccagccctctttttcatttctaaaaagtgcttttgtactttgcttcctaaccagattggtccagaaaagggcgtggtgcacctggcgacagcggccgtcctaaacgcggtgtgggacttgtgggccaagcaggagggaaaggtaacccctctcacaaacgctcaggaggctcctgggagctgtacgacactgactttccctacgcacagaggaaagacagacacactgc

SEQ ID NO: 290360 - DNA, 1985 bp, Homo sapiens
cgccctcccgccgcgcgctcgggatcccgaccagtcctgaccgcacgggggccgcggccacggggcgcaggggccatggtgcgcggcaggatctcccggctctcggtccgggacgtgcgcttccccacgtcgcttgggggccacggcgcggacgccatgcacacggaccctgactactcggctgcctatgtcgtcatagaaactgatgcagaagatggaatcaaggggtgtggaattaccttcactctgggaaaaggcactgaagttgttgtctgtgctgtgaatgccctcgcccaccatgtgctcaacaaggacctcaaggacattgttggtgacttcagaggcttctataggcagctcacaagtgatgggcagctcagatggattggtccagaaaagggcgtggtgcacctggcgacagcggccgtcctaaacgcggtgtgggacttgtgggccaagcaggagggaaagcctgtctggaagttacttgtggacatggatcccaggatgctggtatcctgcatagatttcaggtacatcactgatgtcctgactgaggaggatgccctagaaatactgcagaaaggtcaaattggtaaaaaagaaagagagaagcaaatgctggcacaaggataccctgcttacacgacatcgtgcgcctggctggggtactcagatgacacgttgaagcagctctgtgcccaggcgctgaaggatggctggaccaggtttaaagtaaaggtgggtgctgatctccaggatgacatgcgaagatgccaaatcatccgagacatgattggaccggaaaagactttgatgatggatgccaaccagcgctgggatgtgcctgaggcggtggagtggatgtccaagctggccaagttcaagccattgtggattgaggagccaacctcccctgatgacattctggggcacgccaccatttccaaggcactggtcccattaggaattggcattgccacaggagaacagtgccacaatagagtgatatttaagcaactcctacaggcgaaggccctgcagttcctccagattgacagttgcagactgggcagtgtcaatgagaacctctcagtattgctgatggccaaaaagtttgaaattcctgtttgcccccatgctggtggagttggcctctgtgaactggtgcagcacctgattatatttgactacatatcagtttctgcaagccttgaaaatagggtgtgtgagtatgttgaccacctgcatgagcatttcaagtatcccgtgatgatccagcgggcttcctacatgcctcccaaggatcccggctactcaacagaaatgaaggaggaatctgtaaagaaacaccagtatccagatggtgaagtttggaagaaactccttcctgctcaagaaaattaagtgctcagccccaacaacttttttctttctgaagtgaaagggcttaaaatttcttggaaatagttttacaaaaatggatttaaaaaatcctaccgatcaagatgagttcagctagaagtcataccaccctcaggaatcagctaagtaattattacttgattcttttagcaaatcaatgcacgttatcctacttaatccttaaataagtttagatttaactaacccaaagtccaggaggatgttcttacaaaaatagctatatcaagggctggcacctagacattaaactgtaatttgaaaataagcaacatgttgcataacttgttggaataattccttgttctgtttaacacttgtcataaattagcagaataaaaatagtcgtgcaacaccgggggtatctggtatgcaacgaagggaaaaatatttcactgattaaccccgaagtggttttgcatcttttccttgcttaatctaagcatattattagagaagtcacaccatgctgaagctaatgagggcaaaatggtagtccatagattattttaaaataaccctttaaggttataaaagtttaa

SEQ ID NO: 290361 - DNA, 2808 bp, Homo sapiens
cgccctcccgccgcgcgctcgggatcccgaccagtcctgaccgcacgggggccgcggccacggggcgcaggggccatggtgcgcggcaggatctcccggctctcggtccgggacgtgcgcttccccacgtcgcttgggggccacggcgcggacgccatgcacacggaccctgactactcggctgcctatgtcgtcatagaaactgatgcagaagatggaatcaaggggtgtggaattaccttcactctgggaaaaggcactgaagttgttgtctgtgctgtgaatgccctcgcccaccatgtgctcaacaaggacctcaaggacattgttggtgacttcagaggcttctataggcagctcacaagtgatgggcagctcagatggattggtccagaaaagggcgtggtgcacctggcgacagcggccgtcctaaacgcggtgtgggacttgtgggccaagcaggagggaaagcctgtctggaagttacttgtggacatggatcccaggatgctggtatcctgcatagatttcaggtacatcactgatgtcctgactgaggaggatgccctagaaatactgcagaaaggtcaaattggtaaaaaagaaagagagaagcaaatgctggcacaaggataccctgcttacacgacatcgtgcgcctggctggggtactcagatgacacgttgaagcagctctgtgcccaggcgctgaaggatggctggaccaggtttaaagtaaaggtgggtgctgatctccaggatgacatgcgaagatgccaaatcatccgagacatgattggaccggaaaagactttgatgatggatgccaaccagcgctgggatgtgcctgaggcggtggagtggatgtccaagctggccaagttcaagccattgtggattgaggagccaacctcccctgatgacattctggggcacgccaccatttccaaggcactggtcccattaggaattggcattgccacaggagaacaggtgagtgacgcccccaacaggtggatgacgtccccttggggtcagtacacgctgaccagtgaccgaggacacagttgtgtgttaggctccatcacctgctgtactttgagttgggaaattttcatcatcttagaaactgggtcattttatcagagtctagagtcagatatagaaaaagtttgtggctatttctccaatttatatgactaaggtcgggtatctttttcaaagtgtctaattgaaattgaaaaggcagcaatttaaagttgctattgcaagggcagaaaatggtcttaagaaagccagctttcaaattgaataaacatgactgcgttcactttttgagcttataaatgaagcccgagtgcctgccaaaacctgctgcagtcagcccacgagcagagcagcgtgaggagctgattctcagttttcccggcaaaaggagcaatactgctctgccgtggttccgtgttgtcatctgtgccacctgctcatcactgtcaccgtatttcatcctgatgcttcatctcccacttatcagtcgctgtgacagtcattccctcataaatggcgagccagtgtgattttgacctgactcacactgttgcattagcagatttgtaaagaagtgagcacaaggtccctgcccacgctataaaagctcgcctcatgcccagcgagaacaaagaagaaatacagtctgggcttcctgacggccactgatgaataattattggcatagagtggctgcgttgccaggtttagagatcctgaaggccaaggctgactcttctgttggtgttattttcaattctatttccagtgccacaatagagtgatatttaagcaactcctacaggcgaaggccctgcagttcctccagattgacagttgcagactgggcagtgtcaatgagaacctctcagtattgctgatggccaaaaagtttgaaattcctgtttgcccccatgctggtggagttggcctctgtgaactggtgcagcacctgattatatttgactacatatcagtttctgcaagccttgaaaatagggtgtgtgagtatgttgaccacctgcatgagcatttcaagtatcccgtgatgatccagcgggcttcctacatgcctcccaaggatcccggctactcaacagaaatgaaggaggaatctgtaaagaaacaccagtatccagatggtgaagtttggaagaaactccttcctgctcaagaaaattaagtgctcagccccaacaacttttttctttctgaagtgaaagggcttaaaatttcttggaaatagttttacaaaaatggatttaaaaaatcctaccgatcaagatgagttcagctagaagtcataccaccctcaggaatcagctaagtaattattacttgattcttttagcaaatcaatgcacgttatcctacttaatccttaaataagtttagatttaactaacccaaagtccaggaggatgttcttacaaaaatagctatatcaagggctggcacctagacattaaactgtaatttgaaaataagcaacatgttgcataacttgttggaataattccttgttctgtttaacacttgtcataaattagcagaataaaaatagtcgtgcaacaccgggggtatctggtatgcaacgaagggaaaaatatttcactgattaaccccgaagtggttttgcatcttttccttgcttaatctaagcatattattagagaagtcacaccatgctgaagctaatgagggcaaaatggtagtccatagattattttaaaataaccctttaaggttataaaagtttaa

SEQ ID NO: 290362 - DNA, 2079 bp, Homo sapiens
cgccctcccgccgcgcgctcgggatcccgaccagtcctgaccgcacgggggccgcggccacggggcgcaggggccatggtgcgcggcaggatctcccggctctcggtccgggacgtgcgcttccccacgtcgcttgggggccacggcgcggacgccatgcacacggaccctgactactcggctgcctatgtcgtcatagaaactgatgcagaagatggaatcaaggggtgtggaattaccttcactctgggaaaaggcactgaagttgttgtctgtgctgtgaatgccctcgcccaccatgtgctcaacaaggacctcaaggacattgttggtgacttcagaggcttctataggcagctcacaagtgatgggcagctcagatggattggtccagaaaagggcgtggtgcacctggcgacagcggccgtcctaaacgcggtgtgggacttgtgggccaagcaggagggaaagcctgtctggaagttacttgtggacatggatcccaggatgctggtatcctgcatagatttcaggtacatcactgatgtcctgactgaggaggatgccctagaaatactgcagaaaggtcaaattggtaaaaaagaaagagagaagcaaatgctggcacaaggataccctgcttacacgacatcgtgcgcctggctggggtactcagatgacacgttgaagcagctctgtgcccaggcgctgaaggatggctggaccaggtttaaagtaaaggtgggtgctgatctccaggatgacatgcgaagatgccaaatcatccgagacatgattggaccggaaaagactttgatgatggatgccaaccagcgctgggatgtgcctgaggcggtggagtggatgtccaagctggccaagttcaagccattgtggattgaggagccaacctcccctgatgacattctggggcacgccaccatttccaaggcactggtcccattaggaattggcattgccacaggagaacagtgccacaatagagtgatatttaagcaactcctacaggcgaaggccctgcagttcctccagattgacagttgcagactgggcagtgtcaatgagaacctctcagtattgctgatggccaaaaagtttgaaattcctgtttgcccccatgctggtggagttggcctctgtgaactggtgcagcacctgattatatttgactacatatcagtttctgcaagccttgaaaatagggtgtgtgagtatgttgaccacctgcatgagcatttcaagtatcccgtgatgatccagcgggcttcctacatgcctcccaaggatcccggctactcaacagaaatgaaggaggaatctgtaaagaaacaccagtatccagatggtgaagtttggaagaaactccttcctgctcaagaaaattaagtgctcagccccaacaacttttttctttctgaagtgaaagggcttaaaatttcttggaaatagttttacaaaaatggatttaaaaaatcctaccgatcaagatgagttcagctagaagtcataccaccctcaggaatcagctaaagcaaaaagaacttttacctcggcatccagcccaacccctaaagactgacaatatccttcgagctcctttgaaagcaccctaaacagccatttccattttaatagttggatgcggattgtacccttcaatctgaaagtcttcagctttgaagtcatcaattttctcaacttttcgaagaatcctgagctttgggaaaggtctgggttctcgctgaagctaaaaacaaaataaggccattattttgccataattgtacgacctgttgtaattgctcctcatgtccgtgaaacaagtacacaggatgtgatcaacaaagttctattttacaggagtatgatcctgtcgataccttgccgtaggttatgtaacatgattggagcgcaaccagctgttctcttgcacagatcgagagtgaggggtattttgtgacattacacagcatcaggagcctggtgcctcatcaggtgtaagttcttataaccactcttggcaaatttattaaagacaggaacacagtcaatctgtaa

SEQ ID NO: 290363 - DNA, 2435 bp, Homo sapiens
cgccctcccgccgcgcgctcgggatcccgaccagtcctgaccgcacgggggccgcggccacggggcgcaggggccatggtgcgcggcaggatctcccggctctcggtccgggacgtgcgcttccccacgtcgcttgggggccacggcgcggacgccatgcacacggaccctgactactcggctgcctatgtcgtcatagaaactgatgcagaagatggaatcaaggggtgtggaattaccttcactctgggaaaaggcactgaagttgttgtctgtgctgtgaatgccctcgcccaccatgtgctcaacaaggacctcaaggacattgttggtgacttcagaggcttctataggcagctcacaagtgatgggcagctcagatggattggtccagaaaagggcgtggtgcacctggcgacagcggccgtcctaaacgcggtgtgggacttgtgggccaagcaggagggaaagcctgtctggaagttacttgtggacatggatcccaggatgctggtatcctgcatagatttcaggtacatcactgatgtcctgactgaggaggatgccctagaaatactgcagaaaggtcaaattggtaaaaaagaaagagagaagcaaatgctggcacaaggataccctgcttacacgacatcgtgcgcctggctggggtactcagatgacacgttgaagcagctctgtgcccaggcgctgaaggatggctggaccaggtttaaagtaaaggtgggtgctgatctccaggatgacatgcgaagatgccaaatcatccgagacatgattggaccggaaaagactttgatgatggatgccaaccagcgctgggatgtgcctgaggcggtggagtggatgtccaagctggccaagttcaagccattgtggattgaggagccaacctcccctgatgacattctggggcacgccaccatttccaaggcactggtcccattaggaattggcattgccacaggagaacagtgccacaatagagtgatatttaagcaactcctacaggcgaaggccctgcagttcctccagattgacagttgcagactgggcagtgtcaatgagaacctctcagtattgctgatggccaaaaagtttgaaattcctgtttgcccccatgctggtggagttggcctctgtgaactggtgcagcacctgattatatttgactacatatcagtttctgcaagccttgaaaatagggtgtgtgagtatgttgaccacctgcatgagcatttcaagtatcccgtgatgatccagcgggcttcctacatgcctcccaaggatcccggctactcaacagaaatgaaggaggaatctgtaaagaaacaccagtatccagatggtgaagtttggaagaaactccttcctgctcaagaaaattaagtgctcagccccaacaacttttttctttctgaagtgaaagggcttaaaatttcttggaaatagttttacaaaaatggatttaaaaaatcctaccgatcaagatgagttcagctagaagtcataccaccctcaggaatcagctaaagcaaaaagaacttttacctcggcatccagcccaacccctaaagactgacaatatccttcgagctcctttgaaagcaccctaaacagccatttccattttaatagttggatgcggattgtacccttcaatctgaaagtcttcagctttgaagtcatcaattttctcaacttttcgaagaatcctgagctttgggaaaggtctgggttctcgctgaagctaaaaacaaaataaggccattattttgccataattgtacgacctgttgtaattgctcctcatgtccgtgaaacaagtacacaggatgtgatcaacaaagttctattttacaggagtatgatcctgtcgataccttgccgtaggttatgtaacatgattggagcgcaaccagctgttctcttgcacagatcgagagtgaggggtattttgtgacattacacagcatcaggagcctggtgcctcatcaggtgtaagttcttataaccactcttggcaaatttattaaagacaggaacacagtcaatctgtaaaaaaaaaaaaaaaaaaaaaaaaaaaaaaaaaaaaaaaaaaaaaaaaaaaaaaaaaaaaaaaaaaaaaaaaaaaaaaaaaggggggggccccccgaagaagccactcctccccagggggcggcgccaatagctacccgccccccccacggtttgttgtgagaacaaaggcggcgcccactttgagaggggtcattattatattaaagccgagcagccggcgcgcgcccgtgtttaaaacaaagcggcagagcggacgaaaaaaacccggtacggggaggctttttagagagagaacccaccttcctagggggggggaaaaaaaggggacaactctccgacaagatattaagccctta

SEQ ID NO: 290364 - DNA, 2093 bp, Homo sapiens
cgccctcccgccgcgcgctcgggatcccgaccagtcctgaccgcacgggggccgcggccacggggcgcaggggccatggtgcgcggcaggatctcccggctctcggtccgggacgtgcgcttccccacgtcgcttgggggccacggcgcggacgccatggtaagcgcggacgccatggtaagcgcggacgccatggtaagcgcggacgccatggtaagcgcggacgccatggtaagcgcggacgccatggtaagcgcggacgccatgcacacggaccctgactactcggctgcctatgtcgtcatagaaactgatgcagaagatggaatcaaggggtgtggaattaccttcactctgggaaaaggcactgaagttgttgtctgtgctgtgaatgccctcgcccaccatgtgctcaacaaggacctcaaggacattgttggtgacttcagaggcttctataggcagctcacaagtgatgggcagctcagatggattggtccagaaaagggcgtggtgcacctggcgacagcggccgtcctaaacgcggtgtgggacttgtgggccaagcaggagggaaagcctgtctggaagttacttgtggacatggatcccaggatgctggtatcctgcatagatttcaggtacatcactgatgtcctgactgaggaggatgccctagaaatactgcagaaaggtcaaattggtaaaaaagaaagagagaagcaaatgctggcacaaggataccctgcttacacgacatcgtgcgcctggctggggtactcagatgacacgttgaagcagctctgtgcccaggcgctgaaggatggctggaccaggtttaaagtaaaggtgggtgctgatctccaggatgacatgcgaagatgccaaatcatccgagacatgattggaccggaaaagactttgatgatggatgccaaccagcgctgggatgtgcctgaggcggtggagtggatgtccaagctggccaagttcaagccattgtggattgaggagccaacctcccctgatgacattctggggcacgccaccatttccaaggcactggtcccattaggaattggcattgccacaggagaacagtgccacaatagagtgatatttaagcaactcctacaggcgaaggccctgcagttcctccagattgacagttgcagactgggcagtgtcaatgagaacctctcagtattgctgatggccaaaaagtttgaaattcctgtttgcccccatgctggtggagttggcctctgtgaactggtgcagcacctgattatatttgactacatatcagtttctgcaagccttgaaaatagggtgtgtgagtatgttgaccacctgcatgagcatttcaagtatcccgtgatgatccagcgggcttcctacatgcctcccaaggatcccggctactcaacagaaatgaaggaggaatctgtaaagaaacaccagtatccagatggtgaagtttggaagaaactccttcctgctcaagaaaattaagtgctcagccccaacaacttttttctttctgaagtgaaagggcttaaaatttcttggaaatagttttacaaaaatggatttaaaaaatcctaccgatcaagatgagttcagctagaagtcataccaccctcaggaatcagctaagtaattattacttgattcttttagcaaatcaatgcacgttatcctacttaatccttaaataagtttagatttaactaacccaaagtccaggaggatgttcttacaaaaatagctatatcaagggctggcacctagacattaaactgtaatttgaaaataagcaacatgttgcataacttgttggaataattccttgttctgtttaacacttgtcataaattagcagaataaaaatagtcgtgcaacaccgggggtatctggtatgcaacgaagggaaaaatatttcactgattaaccccgaagtggttttgcatcttttccttgcttaatctaagcatattattagagaagtcacaccatgctgaagctaatgagggcaaaatggtagtccatagattattttaaaataaccctttaaggttataaaagtttaa

SEQ ID NO: 290365 - DNA, 2164 bp, Homo sapiens
cgccctcccgccgcgcgctcgggatcccgaccagtcctgaccgcacgggggccgcggccacggggcgcaggggccatggtgcgcggcaggatctcccggctctcggtccgggacgtgcgcttccccacgtcgcttgggggccacggcgcggacgccatggtaagcgcggacgccatggtaagcgcggacgccatggtaagcgcggacgccatggtaagcgcggacgccatggtaagcgcggacgccatggtaagcgcggacgccatggtaagcgcggacgccatggtaagcgcggacgccatggtaagcgcggacgccatggtaagcgcggacgccatggtaagcgcggacgccatggtaagcgcggacgccatgcacacggaccctgactactcggctgcctatgtcgtcatagaaactgatgcagaagatggaatcaaggggtgtggaattaccttcactctgggaaaaggcactgaagttgcaacaaggacctcaaggacattgttggtgacttcagaggcttctataggcagctcacaagtgatgggcagctcagatggattggtccagaaaagggcgtggtgcacctggcgacagcggccgtcctaaacgcggtgtgggacttgtgggccaagcaggagggaaagcctgtctggaagttacttgtggacatggatcccaggatgctggtatcctgcatagatttcaggtacatcactgatgtcctgactgaggaggatgccctagaaatactgcagaaaggtcaaattggtaaaaaagaaagagagaagcaaatgctggcacaaggataccctgcttacacgacatcgtgcgcctggctggggtactcagatgacacgttgaagcagctctgtgcccaggcgctgaaggatggctggaccaggtttaaagtaaaggtgggtgctgatctccaggatgacatgcgaagatgccaaatcatccgagacatgattggaccggaaaagactttgatgatggatgccaaccagcgctgggatgtgcctgaggcggtggagtggatgtccaagctggccaagttcaagccattgtggattgaggagccaacctcccctgatgacattctggggcacgccaccatttccaaggcactggtcccattaggaattggcattgccacaggagaacagtgccacaatagagtgatatttaagcaactcctacaggcgaaggccctgcagttcctccagattgacagttgcagactgggcagtgtcaatgagaacctctcagtattgctgatggccaaaaagtttgaaattcctgtttgcccccatgctggtggagttggcctctgtgaactggtgcagcacctgattatatttgactacatatcagtttctgcaagccttgaaaatagggtgtgtgagtatgttgaccacctgcatgagcatttcaagtatcccgtgatgatccagcgggcttcctacatgcctcccaaggatcccggctactcaacagaaatgaaggaggaatctgtaaagaaacaccagtatccagatggtgaagtttggaagaaactccttcctgctcaagaaaattaagtgctcagccccaacaacttttttctttctgaagtgaaagggcttaaaatttcttggaaatagttttacaaaaatggatttaaaaaatcctaccgatcaagatgagttcagctagaagtcataccaccctcaggaatcagctaagtaattattacttgattcttttagcaaatcaatgcacgttatcctacttaatccttaaataagtttagatttaactaacccaaagtccaggaggatgttcttacaaaaatagctatatcaagggctggcacctagacattaaactgtaatttgaaaataagcaacatgttgcataacttgttggaataattccttgttctgtttaacacttgtcataaattagcagaataaaaatagtcgtgcaacaccgggggtatctggtatgcaacgaagggaaaaatatttcactgattaaccccgaagtggttttgcatcttttccttgcttaatctaagcatattattagagaagtcacaccatgctgaagctaatgagggcaaaatggtagtccatagattattttaaaataaccctttaaggttataaaagtttaa

SEQ ID NO: 290366 - DNA, 1946 bp, Homo sapiens
cgccctcccgccgcgcgctcgggatcccgaccagtcctgaccgcacgggggccgcggccacggggcgcaggggccatggtgcgcggcaggatctcccggctctcggtccgggacgtgcgcttccccacgtcgcttgggggccacggcgcggacgccatgcacacggaccctgactactcggctgcctatgtcgtcatagaaactgatgcagaagatggaatcaaggggtgtggaattaccttcactctgggaaaaggcactgaagttgttgtctgtgctgtgaatgccctcgcccaccatgtgctcaacaaggacctcaaggacattgttggtgacttcagaggcttctataggcagctcacaagtgatgggcagctcagatggattggtccagaaaagggcgtggtgcacctggcgacagcggccgtcctaaacgcggtgtgggacttgtgggccaagcaggagggaaagcctgtctggaagttacttgtggacatggatcccaggatgctggtatcctgcatagatttcaggtacatcactgatgtcctgactgaggaggatgccctagagaagcaaatgctggcacaaggataccctgcttacacgacatcgtgcgcctggctggggtactcagatgacacgttgaagcagctctgtgcccaggcgctgaaggatggctggaccaggtttaaagtaaaggtgggtgctgatctccaggatgacatgcgaagatgccaaatcatccgagacatgattggaccggaaaagactttgatgatggatgccaaccagcgctgggatgtgcctgaggcggtggagtggatgtccaagctggccaagttcaagccattgtggattgaggagccaacctcccctgatgacattctggggcacgccaccatttccaaggcactggtcccattaggaattggcattgccacaggagaacagtgccacaatagagtgatatttaagcaactcctacaggcgaaggccctgcagttcctccagattgacagttgcagactgggcagtgtcaatgagaacctctcagtattgctgatggccaaaaagtttgaaattcctgtttgcccccatgctggtggagttggcctctgtgaactggtgcagcacctgattatatttgactacatatcagtttctgcaagccttgaaaatagggtgtgtgagtatgttgaccacctgcatgagcatttcaagtatcccgtgatgatccagcgggcttcctacatgcctcccaaggatcccggctactcaacagaaatgaaggaggaatctgtaaagaaacaccagtatccagatggtgaagtttggaagaaactccttcctgctcaagaaaattaagtgctcagccccaacaacttttttctttctgaagtgaaagggcttaaaatttcttggaaatagttttacaaaaatggatttaaaaaatcctaccgatcaagatgagttcagctagaagtcataccaccctcaggaatcagctaagtaattattacttgattcttttagcaaatcaatgcacgttatcctacttaatccttaaataagtttagatttaactaacccaaagtccaggaggatgttcttacaaaaatagctatatcaagggctggcacctagacattaaactgtaatttgaaaataagcaacatgttgcataacttgttggaataattccttgttctgtttaacacttgtcataaattagcagaataaaaatagtcgtgcaacaccgggggtatctggtatgcaacgaagggaaaaatatttcactgattaaccccgaagtggttttgcatcttttccttgcttaatctaagcatattattagagaagtcacaccatgctgaagctaatgagggcaaaatggtagtccatagattattttaaaataaccctttaaggttataaaagtttaa

SEQ ID NO: 290367 - DNA, 2023 bp, Homo sapiens
cgccctcccgccgcgcgctcgggatcccgaccagtcctgaccgcacgggggccgcggccacggggcgcaggggccatggtgcgcggcaggatctcccggctctcggtccgggacgtgcgcttccccacgtcgcttgggggccacggcgcggacgccatggtaagcgcggacgccatggtaagcgcggacgccatggtaagcgcggacgccatggtaagcgcggacgccatggtaagcgcggacgccatggtaagcgcggacgccatggtaagcgcggacgccatggtaagcgcggacgccatggtaagcgcggcacacggaccctgactactcggctgcctatgtcgtcatagaaactgatgcagaagatggaatcaaggggtgtggaattaccttcactctgggaaaaggcactgaagttgttgtctgtgctgtgaatgccctcgcccaccatgtgctcaacaaggacctcaaggacattgttggtgacttcagaggcttctataggcagctcacaagtgatgggcagctcagatgggatcccaggatgctggtatcctgcatagatttcaggtacatcactgatgtcctgactgaggaggatgccctagaaatactgtagacatgttaaattcgtaaaataagaagagaagcaaatgctggcacaaggataccctgcttacacgacatcgtgcgcctggctggggtactcagatgacacgttgaagcagctctgtgcccaggcgctgaaggatggctggaccaggtttaaagtaaaggtgggtgctgatctccaggatgacatgcgaagatgccaaatcatccgagacatgattggaccggaaaagactttgatgatggatgccaaccagcgctgggatgtgcctgaggcggtggagtggatgtccaagctggccaagttcaagccattgtggattgaggagccaacctcccctgatgacattctggggcacgccaccatttccaaggcactggtcccattaggaattggcattgccacaggagaacagtgccacaatagagtgatatttaagcaactcctacaggcgaaggccctgcagttcctccagattgacagttgcagactgggcagtgtcaatgagaacctctcagtattgctgatggccaaaaagtttgaaattcctgtttgcccccatgctggtggagttggcctctgtgaactggtgcagcacctgattatatttgactacatatcagtttctgcaagccttgaaaatagggtgtgtgagtatgttgaccacctgcatgagcatttcaagtatcccgtgatgatccagcgggcttcctacatgcctcccaaggatcccggctactcaacagaaatgaaggaggaatctgtaaagaaacaccagtatccagatggtgaagtttggaagaaactccttcctgctcaagaaaattaagtgctcagccccaacaacttttttctttctgaagtgaaagggcttaaaatttcttggaaatagttttacaaaaatggatttaaaaaatcctaccgatcaagatgagttcagctagaagtcataccaccctcaggaatcagctaagtaattattacttgattcttttagcaaatcaatgcacgttatcctacttaatccttaaataagtttagatttaactaacccaaagtccaggaggatgttcttacaaaaatagctatatcaagggctggcacctagacattaaactgtaatttgaaaataagcaacatgttgcataacttgttggaataattccttgttctgtttaacacttgtcataaattagcagaataaaaatagtcgtgcaacaccgggggtatctggtatgcaacgaagggaaaaatatttcactgattaaccccgaagtggttttgcatcttttccttgcttaatctaagcatattattagagaagtcacaccatgctgaagctaatgagggcaaaatggtagtccatagattattttaaaataaccctttaaggttataaaagtttaa

SEQ ID NO: 290368 - DNA, 1588 bp, Homo sapiens
cgccctcccgccgcgcgctcgggatcccgaccagtcctgaccgcacgggggccgcggccacggggcgcaggggccatggtgcgcggcaggatctcccggctctcggtccgggacgtgcgcttccccacgtcgcttgggggccacggcgcggacgccatgcacacggaccctgactactcggctgcctatgtcgtcatagaaactgatgcagaagatggaatcaaggggtgtggaattaccttcactctgggaaaaggcactgaagttgttgtctgtgctgtgaatgccctcgcccaccatgtgctcaacaaggacctcaaggacattgttggtgacttcagaggcttctataggcagctcacaagtgatgggcagctcagatggattggtccagaaaagggcgtggtgcacctggcgacagcggccgtcctaaacgcggtgtgggacttgtgggccaagcaggagggaaagcctgtctggaagttacttgtggacatggatcccaggatgctggtatcctgcatagatttcaggtacatcactgatgtcctgactgaggaggatgccctagaaatactgcagaaaggtcaaattggtaaaaaagaaagagagaagcaaatgctggcacaaggataccctgcttacacgacatcgtgcgcctggctggggtactcagatgacacgttgaagcagctctgtgcccaggcgctgaaggatggctggaccaggtttaaagtaaaggtgggtgctgatctccaggatgacatgcgaagatgccaaatcatccgagacatgattggaccggaaaagactttgatgatggatgccaaccagcgctgggatgtgcctgaggcggtggagtggatgtccaagctggccaagttcaagccattgtggattgaggagccaacctcccctgatgacattctggggcacgccaccatttccaaggcactggtcccattaggaattggcattgccacaggagaacagtgccacaatagagtgatatttaagcaactcctacaggcgaaggccctgcagttcctccagattgacagttgcagactgggcagtgtcaatgagaacctctcagtattgctgatggccaaaaagtttgaaattcctgtttgcccccatgctggtggagttggcctctgtgaactggtgcagcacctgattatatttgactacatatcagtttctgcaagccttgaaaatagggtgtgtgagtatgttgaccacctgcatgagcatttcaagtatcccgtgatgatccagcgggcttcctacatgcctcccaaggatcccggctactcaacagaaatgaaggaggaatctgtaaagaaacaccagtatccagatggtgaagtttggaagaaactccttcctgctcaagaaaattaagtgctcagccccaacaacttttttctttctgaagtgaaagggcttaaaatttcttggaaatagttttacaaaaatggatttaaaaaatcctaccgatcaagatgagttcagctagaagtcataccaccctcaggaatcagctaactgcttaagaagctaaaagagcacacccatctgaaga

SEQ ID NO: 290369 - DNA, 1408 bp, Homo sapiens
gtgacttatctgaagatgaggaaagagcaagaggttactaaaaaacatatctgtgaattgttgacagagacggtcacttctgcagaaactccagatgcccttgccaagtccaggtacaggtctaaactagcaaaccaaatgcattttctaggtttaaagtaaaggtgggtgctgatctccaggatgacatgcgaagatgccaaatcatccgagacatgattggaccggaaaagactttgatgatggatgccaaccagcgctgggatgtgcctgaggcggtggagtggatgtccaagctggccaagttcaagccattgtggattgaggagccaacctcccctgatgacattctggggcacgccaccatttccaaggcactggtcccattaggaattggcattgccacaggagaacagtgccacaatagagtgatatttaagcaactcctacaggcgaaggccctgcagttcctccagattgacagttgcagactgggcagtgtcaatgagaacctctcagtattgctgatggccaaaaagtttgaaattcctgtttgcccccatgctggtggagttggcctctgtgaactggtgcagcacctgattatatttgactacatatcagtttctgcaagccttgaaaatagggtgtgtgagtatgttgaccacctgcatgagcatttcaagtatcccgtgatgatccagcgggcttcctacatgcctcccaaggatcccggctactcaacagaaatgaaggaggaatctgtaaagaaacaccagtatccagatggtgaagtttggaagaaactccttcctgctcaagaaaattaagtgctcagccccaacaacttttttctttctgaagtgaaagggcttaaaatttcttggaaatagttttacaaaaatggatttaaaaaatcctaccgatcaagatgagttcagctagaagtcataccaccctcaggaatcagctaagtaattattacttgattcttttagcaaatcaatgcacgttatcctacttaatccttaaataagtttagatttaactaacccaaagtccaggaggatgttcttacaaaaatagctatatcaagggctggcacctagacattaaactgtaatttgaaaataagcaacatgttgcataacttgttggaataattccttgttctgtttaacacttgtcataaattagcagaataaaaatagtcgtgcaacaccgggggtatctggtatgcaacgaagggaaaaatatttcactgattaaccccgaagtggttttgcatcttttccttgcttaatctaagcatattattagagaagtcacaccatgctgaagctaatgagggcaaaatggtagtccatagattattttaaaataaccctttaaggttataaaagtttaa

SEQ ID NO: 290370 - DNA, 1012 bp, Homo sapiens
gcggccgcctactactactaaattcgcggccgcgtcgacttaagcaactcctacaggcgaaggccctgcagttcctccagattgacagttgcagactgggcagtgtcaatgagaacctctcagtattgctgatggccaaaaagtttgaaattcctgtttgcccccatgctggtggagttggcctctgtgaactggtgcagcacctgattatatttgactacatatcagtttctgcaagccttgaaaatagggtgtgtgagtatgttgaccacctgcatgagcatttcaagtatcccgtgatgatccagcgggcttcctacatgcctcccaaggatcccggctactcaacagaaatgaaggaggaatctgtaaagaaacaccagtatccagatggtgaagtttggaagaaactccttcctgctcaagaaaattaagtgctcagccccaacaacttttttctttctgaagtgaaagggcttaaaatttcttggaaatagttttacaaaaatggatttaaaaaatcctaccgatcaagatgagttcagctagaagtcataccaccctcaggaatcagctaagtaattattacttgattcttttagcaaatcaatgcacgttatcctacttaatccttaaataagtttagatttaactaacccaaagtccaggaggatgttcttacaaaaatagctatatcaagggctggcacctagacattaaactgtaatttgaaaataagcaacatgttgcataacttgttggaataattccttgttctgtttaacacttgtcataaattagcagaataaaaatagtcgtgcaacaccgggggtatctggtatgcaacgaagggaaaaatatttcactgattaaccccgaagtggttttgcatcttttccttgcttaatctaagcatattattagagaagtcacaccatgctgaagctaatgagggcaaaatggtagtccatagattattttaaaataaccctttaaggttataaaagtttaa

SEQ ID NO: 290371 - DNA, 1235 bp, Homo sapiens
cgccctcccgccgcgcgctcgggatcccgaccagtcctgaccgcacgggggccgcggccacggggcgcaggggccatggtgcgcggcaggatctcccggctctcggtccgggacgtgcgcttccccacgtcgcttgggggccacggcgcggacgccatgcacacggaccctgactactcggctgcctatgtcgtcatagaaactgatgcagaagatggaatcaaggggtgtggaattaccttcactctgggaaaaggcactgaagttgttgtctgtgctgtgaatgccctcgcccaccatgtgctcaacaaggacctcaaggacattgttggtgacttcagaggcttctataggcagctcacaagtgatgggcagctcagatggattggtccagaaaagggcgtggtgcacctggcgacagcggccgtcctaaacgcggtgtgggacttgtgggccaagcaggagggaaagcctgtctggaagttacttgtggacatggatcccaggatgctggtatcctgcatagatttcaggtacatcactgatgtcctgactgaggaggatgccctagaaatactgcagaaaggtcaaattggtaaaaaagaaagagagaagcaaatgctggcacaaggataccctgcttacacgacatcgtgcgcctggctggggtactcagatgacacgttgaagcagctctgtgcccaggcgctgaaggatggctggaccaggtttaaagtaaaggtgggtgctgatctccaggatgacatgcgaagatgccaaatcatccgagacatgattggaccggaaaagactttgatgatggatgccaaccagcgctgggatgtgcctgaggcggtggagtggatgtccaagctggccaagttcaagccattgtggattgaggagccaacctcccctgatgacattctggggcacgccaccatttccaaggtaggaaaacggctgctgctgctgtggcagcttatttttctgtttagttttccagagtgctggggacagatcctaaaatttcttcacttgttccctcttgcatttcctgttgaagtagctgaaataattgtaatgtgtgacaaatacaggggttacagacctgacattcctttttctacttcagcttatactttgcccttatttctgtttgttttagataaagtaagctgctaaaagttgaagggctaccagcaatttgaaggttaatagacatggttcctatg

SEQ ID NO: 290372 - DNA, 543 bp, Homo sapiens
cgccctcccgccgcgcgctcgggatcccgaccagtcctgaccgcacgggggccgcggccacggggcgcaggggccatggtgcgcggcaggatctcccggctctcggtccgggacgtgcgcttccccacgtcgcttgggggccacggcgcggacgccatgcacacggaccctgactactcggctgcctatgtcgtcatagaaactgatgcagaagatggaatcaaggggtgtggaattaccttcactctgggaaaaggcactgaagttgttgtctgtgctgtgaatgccctcgcccaccatgtgctcaacaaggacctcaaggacattgttggtgacttcagaggcttctataggcagctcacaagtgatgggcagctcagatggattggtccagaaaagggcgtggtgcacctgggcctggctttttttttttttttttttttggtatttttagtagagatgaggtttcaccacattggccaggcctgtctcgaactcctgacctcagaccatctgcccgccttggcctcccaaagtgctgga

SEQ ID NO: 290373 - DNA, 929 bp, Homo sapiens
  misc_feature (613)..(613): n is a, c, g, or t
  misc_feature (628)..(628): n is a, c, g, or t
  misc_feature (660)..(660): n is a, c, g, or t
  misc_feature (662)..(662): n is a, c, g, or t
  misc_feature (677)..(677): n is a, c, g, or t
  misc_feature (693)..(693): n is a, c, g, or t
  misc_feature (716)..(716): n is a, c, g, or t
  misc_feature (743)..(743): n is a, c, g, or t
  misc_feature (760)..(760): n is a, c, g, or t
  misc_feature (765)..(765): n is a, c, g, or t
  misc_feature (767)..(767): n is a, c, g, or t
  misc_feature (769)..(769): n is a, c, g, or t
  misc_feature (810)..(810): n is a, c, g, or t
  misc_feature (819)..(819): n is a, c, g, or t
  misc_feature (842)..(842): n is a, c, g, or t
  misc_feature (861)..(861): n is a, c, g, or t
  misc_feature (928)..(928): n is a, c, g, or t
cgccctcccgccgcgcgctcgggatcccgaccagtcctgaccgcacgggggccgcggccacggggcgcaggggccatggtgcgcggcaggatctcccggctctcggtccgggacgtgcgcttccccacgtcgcttgggggccacggcgcggacgccatggtaagcgcggacgccatggtaagcgcggacgccatggtaagcgcggacgccatggtaagcgcggacgccatggtaagcgcggacgccatggtaagcgcggacgccatggtaagcgcggacgccatggtaagcgcggacgccatggtaagcgcggacgccatggtaagcgcggacgccatggtaagcgcggacgccatggtaagcgcggacgccatgcacacggaccctgactactcggctgcctatgtcgtcatagaaactgatgcagaagatggaatcaaggggtgtggaattaccttcactctgggaaaaggcactgaagttgttgtctgtgctgtgaatgccctcgcccaccatgtgctcaacaaggacctcaaggacattgttggtgacttcagaggcttctataagagcagatccaccgtgcagggcacgctcacgaatggcttggtcnaagaaacaagggcgnggtgccccatgagcgaccgcggccgatccatnanacgcggtgtgagagncattgtgggccaagcnggaggagaacaagcctgtctggncagattccttgtggaccatggctcccnaggatgactggtatcangaatngntntcaggaccatcccatagctgtccatgcactagaggcggctnccctcgccntcctgccgaccggaaccacttgntcccccagcccacagagangcccatgaaggccccacgagctccgctgcttcaaccgccactcgtgcgcatggctgagggtccttcng

SEQ ID NO: 290374 - DNA, 391 bp, Homo sapiens
gccaaatcatccgagacatgattggaccggaaaagactttggtaaatatcctctcacaccactaagaagcagtagcctttgtccagggctaaatacaactcgtttcaagattaaagaacattgggaatttaaaaagttaattgtcagaggaagtacacttctgtggtcttgcagtaggcgagctcaaacaaaaataagcaaagggactaatagttttacgttttttaattctgcagaactagttaagtaagtttggggttaaggatcctttcttactaacacagatgtacctgagcaaacagttttcccattggtgctctggtgtgtcaatcatgtaatctcccctcctagctcctcaggtaggagggtgtcagggggccattactgaaga

SEQ ID NO: 290375 - DNA, 482 bp, Homo sapiens
ggcccctgtggcattgtctgtcctcatgtgacatcattctcatggttcttttcgggtttctcacactggcattgtttcggcggggaactcttctcctgcacacacggaccctgactactcggctgcctatgtcgtcatagaaactgatgcagaagatggaatcaaggggtgtggaattaccttcactctgggaaaaggcactgaagttgtggtgagttgaagattctctcgaggttccagaatgcttaattttcagatgagattctaatttagattcttagattcattagaatcttgatttagattgagttctgatcttgtttttatctgtatttacactgctcaaagtgagtaaaaagtttcatggtttgttacttgtttcactgggagaaatttaaaagtgacagaatttggcctctctccttgcaatcatctctagcctgttagaaaatccttggctgttagtctgtttctctgtgtca

SEQ ID NO: 290376 - DNA, 706 bp, Homo sapiens
catggtaacacagctaagccttggccaacactgtcaattgagtggtactcgctccttctgctttaagttagcaccacgtgaataatctgacttcaggcatcattgccccgatctgattccctcctcctagggtgtgtgagtatgttgaccacctgcatgagcatttcaagtatcccgtgatgatccagcgggcttcctacatgcctcccaaggtaagctgtggcctgagggcccctgtagaagagatgctgccagccactgccacgcctgtctcgtgaactagactgtggagcaccaagctttgactcctgtttgtttgcaatatccactaacaaacggttcttcagtttgtctgtatcaaaatcctcaggcctgagggccagggcttggaggttcaattgcctctgacaaggcttctgtaatactagcctttcctcactagtggagatcttaacatttgcactccttgtgcaaaaaaacctggcaccatctagcaagttagtgacctaaaaagtttggactacaattgtgtggctggggccatttattctgatcatgttcaagagatcatggctcattttcaccaacagaggtcaaactattatcaaagagtttgatgagttaactaactctggcaagtagccagtaaaatatgttcctctgccctattatttccaacagtctccaaacttattttaaaaatatt

SEQ ID NO: 290377 - DNA, 1263 bp, Homo sapiens
cgccctcccgccgcgcgctcgggatcccgaccagtcctgaccgcacgggggccgcggccacggggcgcaggggccatggtgcgcggcaggatctcccggctctcggtccgggacgtgcgcttccccacgtcgcttgggggccacggcgcggacgccatgcacacggaccctgactactcggctgcctatgtcgtcatagaaactgatgcagaagatggaatcaaggggtgtggaattaccttcactctgggaaaaggcactgaagttgttgtctgtgctgtgaatgccctcgcccaccatgtgctcaacaaggacctcaaggacattgttggtgacttcagaggcttctataggcagctcacaagtgatgggcagctcagatggattggtccagaaaagggcgtggtgcacctggcgacagcggccgtcctaaacgcggtgtgggacttgtgggccaagcaggagggaaagcctgtctggaagttacttgtggacatggcctcttcccctcctgtcacgttgccaggatcccaggatgctggtatcctgcatagatttcaggtacatcactgatgtcctgactgaggaggatgccctagaaatactgcagaaaggtcaaattggtaaaaaagaaagagagaagcaaatgctggcacaaggataccctgcttacacgacatcgtgcgcctggctggggtactcagatgacacgttgaagcagctctgtgcccaggcgctgaaggatggctggaccaggtttaaagtaaaggtgggtgctgatctccaggatgacatgcgaagatgccaaatcatccgagacatgattggaccggaaaagactttgatgatggatgccaaccagcgctgggatgtgcctgaggcggtggagtggatgtccaagctggccaagttcaagccattgtggattgaggagccaacctcccctgatgacattctggggcacgccaccatttccaaggtaggaaaacggctgctgctgctgtggcagcttatttttctgtttagttttccagagtgctggggacagatcctaaaatttcttcacttgttccctcttgcatttcctgttgaagtagctgaaataattgtaatgtgtgacaaatacaggggttacagacctgacattcctttttctacttcagcttatactttgcccttatttctgtttgttttagataaagtaagctgctaaaagttgaagggctaccagcaatttgaaggttaatagacatggttcctatg

SEQ ID NO: 290378 - DNA, 751 bp, Homo sapiens
cgccctcccgccgcgcgctcgggatcccgaccagtcctgaccgcacgggggccgcggccacggggcgcaggggccatggtgcgcggcaggatctcccggctctcggtccgggacgtgcgcttccccacgtcgcttgggggccacggcgcggacgccatgcacacggaccctgactactcggctgcctatgtcgtcatagaaactgatgcagaagatggaatcaaggggtgtggaattaccttcactctgggaaaaggcactgaagttgttgtctgtgctgtgaatgccctcgcccaccatgtgctcaacaaggacctcaaggacattgttggtgacttcagaggcttctataggcagctcacaagtgatgggcagctcagatggattggtccagaaaagggcgtggtgcacctggcgacagcggccgtcctaaacgcggtgtgggacttgtgggccaagcaggagggaaagcctgtctggaagttacttgtggacatggggtgaacaactggatgctgaggaggaaaaaactgggcaaattaaaggggaatgagcttcagaccccatgcagagctggctgtgagtccgggtttcactgctcaccagctgcatgaccttgagcatgtgacttccccactctgagctgcggtggcctcagtgcaacacctgggtggcggttaaaaacctcgtgatccacaaatgaaggcccttgttattagttggcaaaaaattaaggaaaaacaaagaacac

SEQ ID NO: 290379 - DNA, 1795 bp, Homo sapiens
cgccctcccgccgcgcgctcgggatcccgaccagtcctgaccgcacgggggccgcggccacggggcgcaggggccatggtgcgcggcaggatctcccggctctcggtccgggacgtgcgcttccccacgtcgcttgggggccacggcgcggacgccatgcacacggaccctgactactcggctgcctatgtcgtcatagaaactgatgcagaagatggaatcaaggggtgtggaattaccttcactctgggaaaaggcactgaagttgttgtctgtgctgtgaatgccctcgcccaccatgtgctcaacaaggacctcaaggacattgttggtgacttcagaggcttctataggcagctcacaagtgatgggcagctcagatggattggtccagaaaagggcgtggtgcacctggcgacagcggccgtcctaaacgcggtgtgggacttgtgggccaagcaggagggaaagcctgtctggaagttacttgtggacatggatcccaggatgctggtatcctgcatagatttcaggtacatcactgatgtcctgactgaggaggatgccctagaaatactgcagaaaggtcaaattggtaaaaaagaaagagagaagcaaatgctggcacaaggataccctgcttacacgacatcgtgcgcctggctggggtactcagatgacacgttgaagcagctctgtgcccaggcgctgaaggatggctggaccaggtttaaagtaaaggtgggtgctgatctccaggatgacatgcgaagatgccaaatcatccgagacatgattggaccggaaaagactttgatgatggatgccaaccagcgctgggatgtgcctgaggcggtggagtggatgtccaagctggccaagttcaagccattgtggattgaggagccaacctcccctgatgacattctggggcacgccaccatttccaaggcactggtcccattaggaattggcattgccacaggagaacagtgccacaatagagtgatatttaagcaactcctacaggcgaaggccctgcagttcctccagattgacagttgcagactgggcagtgtcaatgagaacctctcagtattgctgatggccaaaaagtttgaaattcctgtttgcccccatgctggtggagttggcctctgtgaactggtgcagcacctgattatatttgactacatatcagtttctgcaagccttgaaaatagggtgtgtgagtatgttgaccacctgcatgagcatttcaagtatcccgtgatgatccagcgggcttcctacatgcctcccaaggatcccggctactcaacagaaatgaaggaggaatctgtaaagaaacaccagtatccagatggtgaagtttggaagaaactccttcctgctcaagaaaattaagtgctcagccccaacaacttttttctttctgaagtgaaagggcttaaaatttcttggaaatagttttacaaaaatggatttaaaaaatcctaccgatcaagatgagttcagctagaagtcataccaccctcaggaatcagctaagtaattattacttgattcttttagcaaatcaatgcacgttatcctacttaatccttaaataagtttagatttaactaacccaaagtccaggaggatgttcttacaaaaatagctatatcaagggctggcacctagacattaaactgtaatttgaaaataagcaacatgttgcataacttgttggaataattccttgttctgtttaacacttgtcataaattagcagaataaaaatagtcgtgca

SEQ ID NO: 290380 - DNA, 2620 bp, Homo sapiens
agctcgaactccggacctcaggtgatccacccatctcagcctcccaaagtgctgggattacagatgtgagccaccgaacctggcccagaactcttagaagtagaatctcagggttgaaagagtttttaggattttcgacagttatggtagagtattattggtcactataagatgttagtgggaatggaactactggctgttttccaactgactgttccgtcagggtggggagaggtctcagcacgaggccccgccgaaatgttggtaagtggtcagccaagtgggccgctcactcccggttcacccactgtgttcctgtcagtgaagcaaacatccccatttggcaggagaagaagctgccggaggtcacactgctagtgattggtggcccaggggtagggcagccttctttcctctgcagttcactgctccagaaccatctccagcctcatagctcaccgtggacagccctgcggtgtggcgctgatgtacagagtgatgccaggcgttcatctccccactgagctcctgctgagtgtttgcctggggccaggtcctccttccgggaagtcattttagctggaaagaacagggtgggggcgggtggcaagggatcagagcatgagcgtttgagggcttcgtcaggggcagtgaggagcctctaaaggactctacatttaggaatgacagagtcaaacaatttaacaaagccctaaaggtccctgccaggaaagaatgagccccatgtatcaccataagcaacttcttagaaacataacccacccctgtcatcccagcactttgggaggccaaggagggaggattgcttgaagccaggagctcgagatcaacctggtcaacatagtgagaccccatctctacaaaaataaaaataaattagccgggcatagtggcacatacctggagtcccagctactcaggaggctgaggcaggaggatcacataagccggggagactgaggctgcagtgagctatgatggcatcactgcactccagcctgggcaacagagtgagaccttgtctctaaaaaaagaataataaattttaaaaaacaaaatataacccaccttataattgattcaggcctcttcccctcctgtcacgttgccaggatcccaggatgctggtatcctgcatagatttcaggtacatcactgatgtcctgactgaggaggatgccctagaaatactgcagaaaggtcaaattggtaaaaaagaaagagagaagcaaatgctggcacaaggataccctgcttacacgacatcgtgcgcctggctggggtactcagatgacacgttgaagcagctctgtgcccaggcgctgaaggatggctggaccaggtttaaagtaaaggtgggtgctgatctccaggatgacatgcgaagatgccaaatcatccgagacatgattggaccggaaaagactttgatgatggatgccaaccagcgctgggatgtgcctgaggcggtggagtggatgtccaagctggccaagttcaagccattgtggattgaggagccaacctcccctgatgacattctggggcacgccaccatttccaaggcactggtcccattaggaattggcattgccacaggagaacagtgccacaatagagtgatatttaagcaactcctacaggcgaaggccctgcagttcctccagattgacagttgcagactgggcagtgtcaatgagaacctctcagtattgctgatggccaaaaagtttgaaattcctgtttgcccccatgctggtggagttggcctctgtgaactggtgcagcacctgattatatttgactacatatcagtttctgcaagccttgaaaatagggtgtgtgagtatgttgaccacctgcatgagcatttcaagtatcccgtgatgatccagcgggcttcctacatgcctcccaaggatcccggctactcaacagaaatgaaggaggaatctgtaaagaaacaccagtatccagatggtgaagtttggaagaaactccttcctgctcaagaaaattaagtgctcagccccaacaacttttttctttctgaagtgaaagggcttaaaatttcttggaaatagttttacaaaaatggatttaaaaaatcctaccgatcaagatgagttcagctagaagtcataccaccctcaggaatcagctaagtaattattacttgattcttttagcaaatcaatgcacgttatcctacttaatccttaaataagtttagatttaactaacccaaagtccaggaggatgttcttacaaaaatagctatatcaagggctggcacctagacattaaactgtaatttgaaaataagcaacatgttgcataacttgttggaataattccttgttctgtttaacacttgtcataaattagcagaataaaaatagtcgtgcaacaccgggggtatctggtatgcaacgaagggaaaaatatttcactgattaaccccgaagtggttttgcatcttttccttgcttaatctaagcatattattagagaagtcacaccatgctgaagctaatgagggcaaaatggtagtccatagattattttaaaataaccctttaaggttataaaagtttaa

SEQ ID NO: 290381 - DNA, 1713 bp, Homo sapiens
cgccctcccgccgcgcgctcgggatcccgaccagtcctgaccgcacgggggccgcggccacggggcgcaggggccatggtgcgcggcaggatctcccggctctcggtccgggacgtgcgcttccccacgtcgcttgggggccacggcgcggacgccatgcacacggaccctgactactcggctgcctatgtcgtcatagaaactgatgcagaagatggaatcaaggggtgtggaattaccttcactctgggaaaaggcactgaagttgttgtctgtgctgtgaatgccctcgcccaccatgtgctcaacaaggacctcaaggacattgttggtgacttcagaggcttctataggcagctcacaagtgatgggcagctcagatggattggtccagaaaagggcgtggtgcacctggcgacagcggccgtcctaaacgcggtgtgggacttgtgggccaagcaggagggaaagcctgtctggaagttacttgtggacatggatcccaggatgctggtatcctgcatagatttcaggtacatcactgatgtcctgactgaggaggatgccctagaaatactgcagaaaggtcaaattggtaaaaaagaaagagagaagcaaatgctggcacaaggataccctgcttacacgacatcgtgcgcctggctggggtactcagatgacacgttgaagcagctctgtgcccaggcgctgaaggatggctggaccaggtttaaagtaaaggtgggtgctgatctccaggatgacatgcgaagatgccaaatcatccgagacatgattggaccggaaaagactttgatgatggatgccaaccagcgctgggatgtgcctgaggcggtggagtggatgtccaagctggccaagttcaagccattgtggattgaggagccaacctcccctgatgacattctggggcacgccaccatttccaagggtgtgtgagtatgttgaccacctgcatgagcatttcaagtatcccgtgatgatccagcgggcttcctacatgcctcccaaggatcccggctactcaacagaaatgaaggaggaatctgtaaagaaacaccagtatccagatggtgaagtttggaagaaactccttcctgctcaagaaaattaagtgctcagccccaacaacttttttctttctgaagtgaaagggcttaaaatttcttggaaatagttttacaaaaatggatttaaaaaatcctaccgatcaagatgagttcagctagaagtcataccaccctcaggaatcagctaagtaattattacttgattcttttagcaaatcaatgcacgttatcctacttaatccttaaataagtttagatttaactaacccaaagtccaggaggatgttcttacaaaaatagctatatcaagggctggcacctagacattaaactgtaatttgaaaataagcaacatgttgcataacttgttggaataattccttgttctgtttaacacttgtcataaattagcagaataaaaatagtcgtgcaacaccgggggtatctggtatgcaacgaagggaaaaatatttcactgattaaccccgaagtggttttgcatcttttccttgcttaatctaagcatattattagagaagtcacaccatgctgaagctaatgagggcaaaatggtagtccatagattattttaaaataaccctttaaggttataaaagtttaa

SEQ ID NO: 290382 - DNA, 1760 bp, Homo sapiens
cgccctcccgccgcgcgctcgggatcccgaccagtcctgaccgcacgggggccgcggccacggggcgcaggggccatggtgcgcggcaggatctcccggctctcggtccgggacgtgcgcttccccacgtcgcttgggggccacggcgcggacgccatgattggtccagaaaagggcgtggtgcacctggcgacagcggccgtcctaaacgcggtgtgggacttgtgggccaagcaggagggaaagcctgtctggaagttacttgtggacatggatcccaggatgctggtatcctgcatagatttcaggtacatcactgatgtcctgactgaggaggatgccctagaaatactgcagaaaggtcaaattggtaaaaaagaaagagagaagcaaatgctggcacaaggataccctgcttacacgacatcgtgcgcctggctggggtactcagatgacacgttgaagcagctctgtgcccaggcgctgaaggatggctggaccaggtttaaagtaaaggtgggtgctgatctccaggatgacatgcgaagatgccaaatcatccgagacatgattggaccggaaaagactttgatgatggatgccaaccagcgctgggatgtgcctgaggcggtggagtggatgtccaagctggccaagttcaagccattgtggattgaggagccaacctcccctgatgacattctggggcacgccaccatttccaaggcactggtcccattaggaattggcattgccacaggagaacagtgccacaatagagtgatatttaagcaactcctacaggcgaaggccctgcagttcctccagattgacagttgcagactgggcagtgtcaatgagaacctctcagtattgctgatggccaaaaagtttgaaattcctgtttgcccccatgctggtggagttggcctctgtgaactggtgcagcacctgattatatttgactacatatcagtttctgcaagccttgaaaatagggtgtgtgagtatgttgaccacctgcatgagcatttcaagtatcccgtgatgatccagcgggcttcctacatgcctcccaaggatcccggctactcaacagaaatgaaggaggaatctgtaaagaaacaccagtatccagatggtgaagtttggaagaaactccttcctgctcaagaaaattaagtgctcagccccaacaacttttttctttctgaagtgaaagggcttaaaatttcttggaaatagttttacaaaaatggatttaaaaaatcctaccgatcaagatgagttcagctagaagtcataccaccctcaggaatcagctaagtaattattacttgattcttttagcaaatcaatgcacgttatcctacttaatccttaaataagtttagatttaactaacccaaagtccaggaggatgttcttacaaaaatagctatatcaagggctggcacctagacattaaactgtaatttgaaaataagcaacatgttgcataacttgttggaataattccttgttctgtttaacacttgtcataaattagcagaataaaaatagtcgtgcaacaccgggggtatctggtatgcaacgaagggaaaaatatttcactgattaaccccgaagtggttttgcatcttttccttgcttaatctaagcatattattagagaagtcacaccatgctgaagctaatgagggcaaaatggtagtccatagattattttaaaataaccctttaaggttataaaagtttaa

SEQ ID NO: 290383 - DNA, 1757 bp, Homo sapiens
cgccctcccgccgcgcgctcgggatcccgaccagtcctgaccgcacgggggccgcggccacggggcgcaggggccatggtgcgcggcaggatctcccggctctcggtccgggacgtgcgcttccccacgtcgcttgggggccacggcgcggacgccatgcacacggaccctgactactcggctgcctatgtcgtcatagaaactgatgcagaagatggaatcaaggggtgtggaattaccttcactctgggaaaaggcactgaagttgattggtccagaaaagggcgtggtgcacctggcgacagcggccgtcctaaacgcggtgtgggacttgtgggccaagcaggagggaaagcctgtctggaagttacttgtggacatgagaagcaaatgctggcacaaggataccctgcttacacgacatcgtgcgcctggctggggtactcagatgacacgttgaagcagctctgtgcccaggcgctgaaggatggctggaccaggtttaaagtaaaggtgggtgctgatctccaggatgacatgcgaagatgccaaatcatccgagacatgattggaccggaaaagactttgatgatggatgccaaccagcgctgggatgtgcctgaggcggtggagtggatgtccaagctggccaagttcaagccattgtggattgaggagccaacctcccctgatgacattctggggcacgccaccatttccaaggcactggtcccattaggaattggcattgccacaggagaacagtgccacaatagagtgatatttaagcaactcctacaggcgaaggccctgcagttcctccagattgacagttgcagactgggcagtgtcaatgagaacctctcagtattgctgatggccaaaaagtttgaaattcctgtttgcccccatgctggtggagttggcctctgtgaactggtgcagcacctgattatatttgactacatatcagtttctgcaagccttgaaaatagggtgtgtgagtatgttgaccacctgcatgagcatttcaagtatcccgtgatgatccagcgggcttcctacatgcctcccaaggatcccggctactcaacagaaatgaaggaggaatctgtaaagaaacaccagtatccagatggtgaagtttggaagaaactccttcctgctcaagaaaattaagtgctcagccccaacaacttttttctttctgaagtgaaagggcttaaaatttcttggaaatagttttacaaaaatggatttaaaaaatcctaccgatcaagatgagttcagctagaagtcataccaccctcaggaatcagctaagtaattattacttgattcttttagcaaatcaatgcacgttatcctacttaatccttaaataagtttagatttaactaacccaaagtccaggaggatgttcttacaaaaatagctatatcaagggctggcacctagacattaaactgtaatttgaaaataagcaacatgttgcataacttgttggaataattccttgttctgtttaacacttgtcataaattagcagaataaaaatagtcgtgcaacaccgggggtatctggtatgcaacgaagggaaaaatatttcactgattaaccccgaagtggttttgcatcttttccttgcttaatctaagcatattattagagaagtcacaccatgctgaagctaatgagggcaaaatggtagtccatagattattttaaaataaccctttaaggttataaaagtttaa

SEQ ID NO: 290384 - DNA, 1543 bp, Homo sapiens
cctgatcacctgggtttgacatcctagtaatttgtggctgggtgtgtgtgtgcagggccggatcaggagaacagctggactctccaggggaaacagcttagctacaggcacttccaattccgaagggccctggaaagtgcaaaatgttgacggcgctgtgttttcacaagaagcaaatgctggcacaaggataccctgcttacacgacatcgtgcgcctggctggggtactcagatgacacgttgaagcagctctgtgcccaggcgctgaaggatggctggaccaggtttaaagtaaaggtgggtgctgatctccaggatgacatgcgaagatgccaaatcatccgagacatgattggaccggaaaagactttgatgatggatgccaaccagcgctgggatgtgcctgaggcggtggagtggatgtccaagctggccaagttcaagccattgtggattgaggagccaacctcccctgatgacattctggggcacgccaccatttccaaggcactggtcccattaggaattggcattgccacaggagaacagtgccacaatagagtgatatttaagcaactcctacaggcgaaggccctgcagttcctccagattgacagttgcagactgggcagtgtcaatgagaacctctcagtattgctgatggccaaaaagtttgaaattcctgtttgcccccatgctggtggagttggcctctgtgaactggtgcagcacctgattatatttgactacatatcagtttctgcaagccttgaaaatagggtgtgtgagtatgttgaccacctgcatgagcatttcaagtatcccgtgatgatccagcgggcttcctacatgcctcccaaggatcccggctactcaacagaaatgaaggaggaatctgtaaagaaacaccagtatccagatggtgaagtttggaagaaactccttcctgctcaagaaaattaagtgctcagccccaacaacttttttctttctgaagtgaaagggcttaaaatttcttggaaatagttttacaaaaatggatttaaaaaatcctaccgatcaagatgagttcagctagaagtcataccaccctcaggaatcagctaagtaattattacttgattcttttagcaaatcaatgcacgttatcctacttaatccttaaataagtttagatttaactaacccaaagtccaggaggatgttcttacaaaaatagctatatcaagggctggcacctagacattaaactgtaatttgaaaataagcaacatgttgcataacttgttggaataattccttgttctgtttaacacttgtcataaattagcagaataaaaatagtcgtgcaacaccgggggtatctggtatgcaacgaagggaaaaatatttcactgattaaccccgaagtggttttgcatcttttccttgcttaatctaagcatattattagagaagtcacaccatgctgaagctaatgagggcaaaatggtagtccatagattattttaaaataaccctttaaggttataaaagtttaa

SEQ ID NO: 290385 - DNA, 2173 bp, Homo sapiens
ctggagagggaggtgctgtccacgttgggaggagcgcagctggagcatgggccgggacaccgcagaaggagatctgcagagccctggtcaggaacggggctggtggtggcagctcagcagtgctcaccttctcctctgcagatacacagagccctcccgcacgcatgtgttcccctggacatcctttgccagtcttgagccttcacatggcttaacagcagggccgtttcctccttcagctataaatgtttttaaacattaggagttgcagttcaaaacttaggaaaataacaccaggctgccttctattttataggcactggtcccattaggaattggcattgccacaggagaacaggtgagtgacgcccccaacaggtggatgacgtccccttggggtcagtacacgctgaccagtgaccgaggacacagttgtgtgttaggctccatcacctgctgtactttgagttgggaaattttcatcatcttagaaactgggtcattttatcagagtctagagtcagatatagaaaaagtttgtggctatttctccaatttatatgactaaggtcgggtatctttttcaaagtgtctaattgaaattgaaaaggcagcaatttaaagttgctattgcaagggcagaaaatggtcttaagaaagccagctttcaaattgaataaacatgactgcgttcactttttgagcttataaatgaagcccgagtgcctgccaaaacctgctgcagtcagcccacgagcagagcagcgtgaggagctgattctcagttttcccggcaaaaggagcaatactgctctgccgtggttccgtgttgtcatctgtgccacctgctcatcactgtcaccgtatttcatcctgatgcttcatctcccacttatcagtcgctgtgacagtcattccctcataaatggcgagccagtgtgattttgacctgactcacactgttgcattagcagatttgtaaagaagtgagcacaaggtccctgcccacgctataaaagctcgcctcatgcccagcgagaacaaagaagaaatacagtctgggcttcctgacggccactgatgaataattattggcatagagtggctgcgttgccaggtttagagatcctgaaggccaaggctgactcttctgttggtgttattttcaattctatttccagtgccacaatagagtgatatttaagcaactcctacaggcgaaggccctgcagttcctccagattgacagttgcagactgggcagtgtcaatgagaacctctcagtattgctgatggccaaaaagtttgaaattcctgtttgcccccatgctggtggagttggcctctgtgaactggtgcagcacctgattatatttgactacatatcagtttctgcaagccttgaaaatagggtgtgtgagtatgttgaccacctgcatgagcatttcaagtatcccgtgatgatccagcgggcttcctacatgcctcccaaggatcccggctactcaacagaaatgaaggaggaatctgtaaagaaacaccagtatccagatggtgaagtttggaagaaactccttcctgctcaagaaaattaagtgctcagccccaacaacttttttctttctgaagtgaaagggcttaaaatttcttggaaatagttttacaaaaatggatttaaaaaatcctaccgatcaagatgagttcagctagaagtcataccaccctcaggaatcagctaagtaattattacttgattcttttagcaaatcaatgcacgttatcctacttaatccttaaataagtttagatttaactaacccaaagtccaggaggatgttcttacaaaaatagctatatcaagggctggcacctagacattaaactgtaatttgaaaataagcaacatgttgcataacttgttggaataattccttgttctgtttaacacttgtcataaattagcagaataaaaatagtcgtgcaacaccgggggtatctggtatgcaacgaagggaaaaatatttcactgattaaccccgaagtggttttgcatcttttccttgcttaatctaagcatattattagagaagtcacaccatgctgaagctaatgagggcaaaatggtagtccatagattattttaaaataaccctttaaggttataaaagtttaa

SEQ ID NO: 290386 - DNA, 2486 bp, Homo sapiens
cgccctcccgccgcgcgctcgggatcccgaccagtcctgaccgcacgggggccgcggccacggggcgcaggggccatggtgcgcggcaggatctcccggctctcggtccgggacgtgcgcttccccacgtcgcttgggggccacggcgcggacgccatgcacacggaccctgactactcggctgcctatgtcgtcatagaaactgatgcagaagatggaatcaaggggtgtggaattaccttcactctgggaaaaggcactgaagttgttgtctgtgctgtgaatgccctcgcccaccatgtgctcaacaaggacctcaaggacattgttggtgacttcagaggcttctataggcagctcacaagtgatgggcagctcagatggattggtccagaaaagggcgtggtgcacctggcgacagcggccgtcctaaacgcggtgtgggacttgtgggccaagcaggagggaaagcctgtctggaagttacttgtggacatggatcccaggatgctggtatcctgcatagatttcaggtacatcactgatgtcctgactgaggaggatgccctagaaatactgcagaaaggtcaaattggtaaaaaagaaagagagaagcaaatgctggcacaaggataccctgcttacacgacatcgtgcgcctggctggggtactcagatgacacgttgaagcagctctgtgcccaggcgctgaaggatggctggaccaggtttaaagtaaaggtgggtgctgatctccaggatgacatgcgaagatgccaaatcatccgagacatgattggaccggaaaagactttgatgatggatgccaaccagcgctgggatgtgcctgaggcggtggagtggatgtccaagctggccaagttcaagccattgtggattgaggagccaacctcccctgatgacattctggggcacgccaccatttccaaggcactggtcccattaggaattggcattgccacaggagaacaggtgagtgacgcccccaacaggtggatgacgtccccttggggtcagtacacgctgaccagtgaccgaggacacagttgtgtgttaggctccatcacctgctgtactttgagttgggaaattttcatcatcttagaaactgggtcattttatcagagtctagagtcagatatagaaaaagtttgtggctatttctccaatttatatgactaaggtcgggtatctttttcaaagtgtctaattgaaattgaaaaggcagcaatttaaagttgctattgcaagggcagaaaatggtcttaagaaagccagctttcaaattgaataaacatgactgcgttcactttttgagcttataaatgaagcccgagtgcctgccaaaacctgctgcagtcagcccacgagcagagcagcgtgaggagctgattctcagttttcccggcaaaaggagcaatactgctctgccgtggttccgtgttgtcatctgtgccacctgctcatcactgtcaccgtatttcatcctgatgcttcatctcccacttatcagtcgctgtgacagtcattccctcataaatggcgagccagtgtgattttgacctgactcacactgttgcattagcagatttgtaaagaagtgagcacaaggtccctgcccacgctataaaagctcgcctcatgcccagcgagaacaaagaagaaatacagtctgggcttcctgacggccactgatgaataattattggcatagagtggctgcgttgccaggtttagagatcctgaaggccaaggctgactcttctgttggtgttattttcaattctatttccagtgccacaatagagtgatatttaagcaactcctacaggcgaaggccctgcagttcctccagattgacagttgcagactgggcagtgtcaatgagaacctctcagtattgctgatggccaaaaagtttgaaattcctgtttgcccccatgctggtggagttggcctctgtgaactggtgcagcacctgattatatttgactacatatcagtttctgcaagccttgaaaataggtcagtaatgtggcattaatactttctgtttcagtagggtccctcaatccaggccagagcttgtaaattctgccttcatgaccagaacacactaagaccttgtccgctggcatgtcctataactctcaggcggagttggttttgctttcacagagacccaccaatgaacggtcattttgcctcctaagatagggtctggtagctgactcactttattttttaagtacattgaaggtaaggcttgcagccacactactcccttaaccagctcctgttttcatcacgtgtattctgtacttctgtcccatctcctcttcccagtactggagtcttccatggtctagacacacatttatttcatcttatttctcagaacgccccaggtgggcttttaaattaggacaatctccttccagtcatctgcacacgtagggttttgc

SEQ ID NO: 290387 - DNA, 1289 bp, Homo sapiens
cgccctcccgccgcgcgctcgggatcccgaccagtcctgaccgcacgggggccgcggccacggggcgcaggggccatggtgcgcggcaggatctcccggctctcggtccgggacgtgcgcttccccacgtcgcttgggggccacggcgcggacgccatgcacacggaccctgactactcggctgcctatgtcgtcatagaaactgatgcagaagatggaatcaaggggtgtggaattaccttcactctgggaaaaggcactgaagttgttgtctgtgctgtgaatgccctcgcccaccatgtgctcaacaaggacctcaaggacattgttggtgacttcagaggcttctataggcagctcacaagtgatgggcagctcagatggattggtccagaaaagggcgtggtgcacctggcgacagcggccgtcctaaacgcggtgtgggacttgtgggccaagcaggagggaaagcctgtctggaagttacttgtggacatggtgagtagcattgttaatgttacaattgtttctgtaaatgaaatggatatcattgatgagcatttcaagtatcccgtgatgatccagcgggcttcctacatgcctcccaaggatcccggctactcaacagaaatgaaggaggaatctgtaaagaaacaccagtatccagatggtgaagtttggaagaaactccttcctgctcaagaaaattaagtgctcagccccaacaacttttttctttctgaagtgaaagggcttaaaatttcttggaaatagttttacaaaaatggatttaaaaaatcctaccgatcaagatgagttcagctagaagtcataccaccctcaggaatcagctaagtaattattacttgattcttttagcaaatcaatgcacgttatcctacttaatccttaaataagtttagatttaactaacccaaagtccaggaggatgttcttacaaaaatagctatatcaagggctggcacctagacattaaactgtaatttgaaaataagcaacatgttgcataacttgttggaataattccttgttctgtttaacacttgtcataaattagcagaataaaaatagtcgtgcaacaccgggggtatctggtatgcaacgaagggaaaaatatttcactgattaaccccgaagtggttttgcatcttttccttgcttaatctaagcatattattagagaagtcacaccatgctgaagctaatgagggcaaaatggtagtccatagattattttaaaataaccctttaaggttataaaagtttaa

SEQ ID NO: 290388 - DNA, 656 bp, Homo sapiens
cgccctcccgccgcgcgctcgggatcccgaccagtcctgaccgcacgggggccgcggccacggggcgcaggggccatggtgcgcggcaggatctcccggctctcggtccgggacgtgcgcttccccacgtcgcttgggggccacggcgcggacgccatggtaagcgcggacgccatggtaagcgcggacgccatggtaagcgcggacgccatggtaagcgcggacgccatggtaagcgcggacgccatggtaagcgcggacgccatggtaagcgcggacgccatggtaagcgcggacgccatggtaagcgcggacgccatggtaagcgcggacgccatggtaagcgcggacgccatggtaagcgcggacgccatgcacacggaccctgactactcggctgcctatgtcgtcatagaaactgatgcagaagatggaatcaaggggtgtggaattaccttcactctgggaaaaggcactgaagttgttgtctgtgctgtgaatgccctcgcccaccatgtgctcaacaaggacctcaaggacattgttggtgacttcagaggcttctataggcagctcacaagtgatgggcagctcagatggattggtccagaaaaggctgtgcacctagcgcctatagggatcctctagatcaaccc

SEQ ID NO: 290389 - DNA, 754 bp, Homo sapiens
cggccgcgggcttcgctccttgttggggattcggcggcggcggcggcgcgggcgcgcgcttcctagtgacgcaggcggcggggccgcgcacgcacggggctgggagggccggacacttatttggcgctcgcggaggaggaaggcggggccgtgaaataaggcccgacgggccccggggcgcgtgcgcggaccgacactgtcagctcctaacgccgcaggttcctcctggtccccgaggcccccggtcgggcgttgcctgccccgcgcgggcggccgggccgagggacgatggtcagtggacggacggcgccagggagcagtgcccacgcgcggcagggcggtaccttcaggcctccaggtacgggcgctcctcgcccggacgctgctgtgtgtgaatgggcgcgaggggactcccctgcggggcggacgcctgaacacgaggctgtggaggaggacgctgtagggtgcgcggactcacgcggaacatgccagaggctcagccaggcacggcgctcccagcgtggagggcgaggggcatccgggagcggccgggagggctcggtcacccctcaagctgtcaccccagtcccacaaccagcaccccgatcctatcgcagtcccacagccgacaccccgatcccacccctgcccaacagccggcacccaccccaatcccatagctaacaccccggtcccaccgctgtcccacggccggcaccccgatcccaccccagtcccgcagctggcaccccga

SEQ ID NO: 290390 - DNA, 939 bp, Homo sapiens
  misc_feature (920)..(920): n is a, c, g, or t
cggccgcgggcttcgctccttgttggggattcggcggcggcggcggcgcgggcgcgcgcttcctagtgacgcaggcggcggggccgcgcacgcacggggctgggagggccggacacttatttggcgctcgcggaggaggaaggcggggccgtgaaataaggcccgacgggccccggggcgcgtgcgcggaccgacactgtcagctcctaacgccgcaggttcctcctggtccccgaggcccccggtcgggcgttgcctgccccgcgcgggcggccgggccgagggacgatggtcagtggacggacggcgccagggagcagtgcccacgcgcggcagggcggtaccttcaggcctccagaggctggggctggctctgttggcctctgtgctgggtttcttcctctgcaccgcaggactggctctcctgacctctccaggtgtcatcgaacacccttgtgcttgctgtcacccgctgcctgtctgcaggatcccggattccgtatcaggggaccgaaattagtcggaaaataggaagcaggtgctcgcttggatggaaccctgaccctgtgctcacacttgtaggaggagggctctgcaggccgcctcccggaacgggaggttcccaagccactgcacttcggaggggctgtaattagagttgcacattcattcagttcccagtaaagtagaacgtgctccagccagtgaggaaaaggtgtttttaaaaattagattggccgagtgcggtggctcatgccttttacctcaacactttgggagacaaaggtgggaggatcacctgtggccaggagttcaagaccagcctgggcaacagagcctgtctctggggaagaataaaaaaaaaaattgagcctttaaaaaaaaaaagtcgacgcggccgcgaatttagtagtagtagnagtagtagtaggcggccgc

SEQ ID NO: 290391 - DNA, 284 bp, Homo sapiens
gaaaaggtgtttttaaaaattagattggccgagtgcggtggctcatgccttttacctcaacactttgggagacaaaggtgggaggatcacctgtggccaggagttcaagaccagcctgggcaacagagcctgtctctggggaagaataaaaaaaaaaattgagcctttgtcagtgctactattttattatctggtaaatatgagagggttcacgcggtctatgtgtgtcatttatctgagtttgcctatcgtcacgttttggaaataaatgtcaataaagtcga

SEQ ID NO: 290392 - DNA, 1720 bp, Homo sapiens
cgtcccccttccgccgcgtgggtgccatggcaacggagagagacggcaacctgggttccggaagccggagagctggagctttgaagccaccccggtcaaaggatgctgagtccggagcgcctagccctaccggactacgagtatctggctcagcgacatgtcctcacctacatggaggatgcagtgtgccagctgctagaaaacagggaagatattagccaatatggaattgccaggttcttcactgaatattttaacagtgtatgccagggaacacacattctctttcgagaattcagcttcgtccaagccaccccccacaatagggtatcatttttacgggccttctggagatgcttccgaactgtgggcaaaaatggcgatttgctgaccatgaaagaatatcactgtttgctgcaattactgtgtcctgatttcccgctggagctcactcagaaagcagccaggattgtgctcatggacgatgccatggactgcttgatgtctttttcagatttcctctttgccttccagatccagttttactactcagaattcctggacagtgtggctgccatctatgaggacctgctgtcaggcaagaaccccaacacagtgattgtgccgacgtcgtccagtgggcagcaccgccaacgacctgccttgggcggggccggcacgctggagggcgtggaggcgtcgctgttctaccagtgtctggaaaacctgtgtgatcggcacaagtacagctgcccacccccagcacttgtcaaagaggccctcagcaatgttcagagactgaccttctatggattcctcatggctctctcaaagcaccgtggaatcaaccaagccctcggagctttgcctgacaagggggatctgatgcacgacccagcaatggatgaagagctggaacggctgctggcccaggtcccaggcctggtcaactcggtcacagccagtccagaggccagttgcctgccttcccggacccctccccgggttggctctccctggagacctctccatcattcccgaaaagtggatggagagagtgatggctccactgaagagacagacgagtcggagacttgaggagtccaaagggtcctgcccacagcgccctgtacctgctcccacccagcccttggtgtgcccacccagcctcctctccagcaccttgctgtgctgccctctgctgctgacaaggtgaataacagccccaagaccagccagaggggctctgatgatcagcccagccagtggccccggaaggtgaatggcctgctctccctggccctatcagcctgtgaacttcacttaggccccaagctgacagactgtgctgaggccaccttgtcacgccgtagcctgttagtcctcctaacctcttaagagcagtctcttctgagccagcctctgcgggtcccccaataaggttcatctcctcacagcaactccattaagggggagaacccgaatagccacgcagggccttgcaccatcaagggtgacacctgcgacgcaagtaccaggaggacataaccgctgtggcctgttggagaacagccagtagccttggtaatatgaagggtgggccagaagatgatttcacttgcaaaaactgcttcaagtcttgacccctttgtgtctaatagctaaacaaacatgtgaaacgaataaaaagtccctcatgtctggtaaaaaaaagtctaaa

SEQ ID NO: 290393 - DNA, 430 bp, Homo sapiens
ggaccagggtgaggacccgccggatgacagccaccctcaccgcggctggatgggggctctgcacccagccccaaggggtggccgtcctgagggggaagtgagaagggctcagagaggacctcgtgccgaattcggcacgagccccaataaggttcatctcctcacagcaactccattaagggggagaacccgaatagccacgcagggccttgcaccatcaagggtgacacctgcgacgcaagtaccaggaggacataaccgctgtggcctgttggagaacagccagtagccttggtaatatgaagggtgggccagaagatgatttcacttgcaaaaactgcttcaagtcttgacccctttgtgtctaatagctaaacaaacatgtgaaacgaataaaaagtccctcatgtctggtaaaaaaaagtctaaa

SEQ ID NO: 290394 - DNA, 936 bp, Homo sapiens
atttcttctccctcaggatcctataaatttctctgagattcacctctctgggttctctgctggaccacagagcctcatcctggctcacctctcccaaagcacaaagcattgcttctgtatatcaggaatcatttggttgccttgactgtatatcttggacctttgtcttggcttcctataataggatgaccagatttgtgttcagccattcaaaagaagccagcctgctgcagtactggatgacagagtaatgaggtctgtgggtttctatgctgtactcttctccctacacagcaagactgtttgcgttagtactgcttccagatattctgtggatggtctttgggcatgtggtgggaaacgttaccatgccagagaatttcagcaaatttaaccggctttgaaatgacttgttcttccagatttttatatacaaggaaaaccaaactaaagaagactgatgaaggtgcctctcttgtttgctctcttcacccgaccaattttcataccagtgaagctcctttggtcaaaatggtgtaactggatgcctcccaccctggaaaagctttgtagaaatactgatcttaaaatctcacacctggaggttagagactagcatacccttcacactgacttgcttttaaaagaacagctctaccaagaccaggtctgaaactcatgaaatgaacaaaaagagggcagtgacttgaaatgcagagacctaatgtgttcctctccatttccacttcagatttgctgaccatgaaagaatatcactgtttgctgcaattactgtgtcctgatttcccgctggagctcactcagaaagcagccaggtacgtctcctggactcttgaaaccaactcagctctctgtgggccactgcttcctagagaaacctcttttccctttcccatgatgtgagggagcttatga

SEQ ID NO: 290395 - DNA, 1994 bp, Homo sapiens
cgtcccccttccgccgcgtgggtgccatggcaacggagagagacggcaacctgggttccggaagccggagagctggagctttgaagccaccccggtcaaaggatgctgagtccggagcgcctagccctaccggactacgagtatctggctcagcgacatgtcctcacctacatggaggatgcagtgtgccagctgctagaaaacagggaagatattagccaatatggaattgccaggttcttcactgaatattttaacagtgtatgccagggaacacacattctctttcgagaattcagcttcgtccaagccaccccccacaatagggtatcatttttacgggccttctggagatgcttccgaactgtgggcaaaaatggcgatttgctgaccatgaaagaatatcactgtttgctgcaattactgtgtcctgatttcccgctggagctcactcagaaagcagccaggattgtgctcatggacgatgccatggactgcttgatgtctttttcagatttcctctttgccttccagatccagttttactactcagaattcctggacagtgtggctgccatctatgaggacctgctgtcaggcaagaaccccaacacagtgattgtgccgacgtcgtccagtgggcagcaccgccaacgacctgccttgggcggggccggcacgctggagggcgtggaggcgtcgctgttctaccagtgtctggaaaacctgtgtgatcggcacaagtacagctgcccacccccagcacttgtcaaagaggccctcagcaatgttcagagactgaccttctatggattcctcatggctctctcaaagcaccgtggaatcaaccaagccctcggagctttgcctgacaagggggatctgatgcacgacccagcaatggatgaagagctggaacggcttgtaagtgtcaagtgggaggatactgcccccttgtgggggccagacgggtcggacacggctgtgccccatctggggccaacaccacttgtctgtaacatcccacatctgccagggaagggtctgggggccagtggaggcctgaggtgtccctccctctgagtcctttgggggctgcagcccaggggtttaccctagtgttaagagtgggcatggaggccctgctctctgtacaggaggcctctcgctgccctccaggcttcttcccttcttcaggctggcccaggtcccaggcctggtcaactcggtcacagccagtccagaggccagttgcctgccttcccggacccctccccgggttggctctccctggagacctctccatcattcccgaaaagtggatggagagagtgatggctccactgaagagacagacgagtcggagacttgaggagtccaaagggtcctgcccacagcgccctgtacctgctcccacccagcccttggtgtgcccacccagcctcctctccagcaccttgctgtgctgccctctgctgctgacaaggtgaataacagccccaagaccagccagaggggctctgatgatcagcccagccagtggccccggaaggtgaatggcctgctctccctggccctatcagcctgtgaacttcacttaggccccaagctgacagactgtgctgaggccaccttgtcacgccgtagcctgttagtcctcctaacctcttaagagcagtctcttctgagccagcctctgcgggtcccccaataaggttcatctcctcacagcaactccattaagggggagaacccgaatagccacgcagggccttgcaccatcaagggtgacacctgcgacgcaagtaccaggaggacataaccgctgtggcctgttggagaacagccagtagccttggtaatatgaagggtgggccagaagatgatttcacttgcaaaaactgcttcaagtcttgacccctttgtgtctaatagctaaacaaacatgtgaaacgaataaaaagtccctcatgtctggtaaaaaaaagtctaaa

SEQ ID NO: 290396 - DNA, 1906 bp, Homo sapiens
ttttaaaagaaatctatttttaatggctttggctttatagcacgaagcaggcaccctctcgttaaaggcacacagtcctctcttctgccccacctcctgggtccttaaaatcgagtcctgagttccagaggggtcactgcaaggcagcagggaagggagagggtcacagtttcactctgtgagtatcagacacccagggccaaggcccagactggcctctgaagctacaggttaacctgggttccggaagccggagagctggagctttgaagccaccccggtcaaaggatgctgagtccggagcgcctagccctaccggactacgagtatctggctcagcgacatgtcctcacctacatggaggatgcagtgtgccagctgctagaaaacagggaagatattagccaatatggaattgccaggttcttcactgaatattttaacagtgtatgccagggaacacacattctctttcgagaattcagcttcgtccaagccaccccccacaatagggtatcatttttacgggccttctggagatgcttccgaactgtgggcaaaaatggcgatttgctgaccatgaaagaatatcactgtttgctgcaattactgtgtcctgatttcccgctggagctcactcagaaagcagccaggattgtgctcatggacgatgccatggactgcttgatgtctttttcagatttcctctttgccttccagatccagttttactactcagaattcctggacagtgtggctgccatctatgaggacctgctgtcaggcaagaaccccaacacagtgattgtgccgacgtcgtccagtgggcagcaccgccaacgacctgccttgggcggggccggcacgctggagggcgtggaggcgtcgctgttctaccagtgtctggaaaacctgtgtgatcggcacaagtacagctgcccacccccagcacttgtcaaagaggccctcagcaatgttcagagactgaccttctatggattcctcatggctctctcaaagcaccgtggaatcaaccaagccctcggagctttgcctgacaagggggatctgatgcacgacccagcaatggatgaagagctggaacggctgctggcccaggtcccaggcctggtcaactcggtcacagccagtccagaggccagttgcctgccttcccggacccctccccgggttggctctccctggagacctctccatcattcccgaaaagtggatggagagagtgatggctccactgaagagacagacgagtcggagacttgaggagtccaaagggtcctgcccacagcgccctgtacctgctcccacccagcccttggtgtgcccacccagcctcctctccagcaccttgctgtgctgccctctgctgctgacaaggtgaataacagccccaagaccagccagaggggctctgatgatcagcccagccagtggccccggaaggtgaatggcctgctctccctggccctatcagcctgtgaacttcacttaggccccaagctgacagactgtgctgaggccaccttgtcacgccgtagcctgttagtcctcctaacctcttaagagcagtctcttctgagccagcctctgcgggtcccccaataaggttcatctcctcacagcaactccattaagggggagaacccgaatagccacgcagggccttgcaccatcaagggtgacacctgcgacgcaagtaccaggaggacataaccgctgtggcctgttggagaacagccagtagccttggtaatatgaagggtgggccagaagatgatttcacttgcaaaaactgcttcaagtcttgacccctttgtgtctaatagctaaacaaacatgtgaaacgaataaaaagtccctcatgtctggtaaaaaaaagtctaaa

SEQ ID NO: 290397 - DNA, 1738 bp, Homo sapiens
cgtcccccttccgccgcgtgggtgccatggcaacggagagagacggcaacctgggttccggaagccggagagctggagctttgaagccaccccggtcaaaggatgctgagtccggagcgcctagccctaccggactacgagtatctggctcagcgacatgtcctcacctacatggaggatgcagtgtgccagctgctagaaaacagggaagatattagccaatatggaattgccaggttcttcactgaatattttaacagtgtatgccagggaacacacattctctttcgagaattcagcttcgtccaagccaccccccacaatagggtatcatttttacgggccttctggagatgcttccgaactgtgggcaaaaatggcgatttgctgaccatgaaagaatatcactgtttgctgcaattactgtgtcctgatttcccgctggagctcactcagaaagcagccaggattgtgctcatggacgatgccatggactgcttgatgtctttttcagatttcctctttgccttccagatccagttttactactcagaattcctggacagtgtggctgccatctatgaggacctgctgtcaggcaagaaccccaacacagtgattgtgccgacgtcgtccagtgggcagcaccgccaacgacctgccttgggcggggccggcacgctggagggcgtggaggcgtcgctgttctaccagtgtctggaaaacctgtgtgatcggcacaagtacagctgcccacccccagcacttgtcaaagaggccctcagcaatgttcagagactgaccttctatggattcctcatggctctctcaaagcaccgtggaatcaaccaagccctcggagctttgcctgacaagggggatctgatgcacgacccagcaatggatgaagagctggaacggctgcttcttcccttcttcaggctggcccaggtcccaggcctggtcaactcggtcacagccagtccagaggccagttgcctgccttcccggacccctccccgggttggctctccctggagacctctccatcattcccgaaaagtggatggagagagtgatggctccactgaagagacagacgagtcggagacttgaggagtccaaagggtcctgcccacagcgccctgtacctgctcccacccagcccttggtgtgcccacccagcctcctctccagcaccttgctgtgctgccctctgctgctgacaaggtgaataacagccccaagaccagccagaggggctctgatgatcagcccagccagtggccccggaaggtgaatggcctgctctccctggccctatcagcctgtgaacttcacttaggccccaagctgacagactgtgctgaggccaccttgtcacgccgtagcctgttagtcctcctaacctcttaagagcagtctcttctgagccagcctctgcgggtcccccaataaggttcatctcctcacagcaactccattaagggggagaacccgaatagccacgcagggccttgcaccatcaagggtgacacctgcgacgcaagtaccaggaggacataaccgctgtggcctgttggagaacagccagtagccttggtaatatgaagggtgggccagaagatgatttcacttgcaaaaactgcttcaagtcttgacccctttgtgtctaatagctaaacaaacatgtgaaacgaataaaaagtccctcatgtctggtaaaaaaaagtctaaa

SEQ ID NO: 290398 - DNA, 1803 bp, Homo sapiens
ttttaaaagaaatctatttttaatggctttggctttatagcacgaagcaggcaccctctcgttaaaggcacacagtcctctcttctgccccacctcctgggtccttaaaatcgagtcctgagttccagaggggtcactgcaaggcagcagggaagggagagggtcacagtttcactctgtgagtatcagacacccagggccaaggcccagactggcctctgaagctacaggttaacctgggttccggaagccggagagctggagctttgaagccaccccggtcaaaggatgctgagtccggagcgcctagccctaccggactacgagtatctggttttaacagtgtatgccagggaacacacattctctttcgagaattcagcttcgtccaagccaccccccacaatagggtatcatttttacgggccttctggagatgcttccgaactgtgggcaaaaatggcgatttgctgaccatgaaagaatatcactgtttgctgcaattactgtgtcctgatttcccgctggagctcactcagaaagcagccaggattgtgctcatggacgatgccatggactgcttgatgtctttttcagatttcctctttgccttccagatccagttttactactcagaattcctggacagtgtggctgccatctatgaggacctgctgtcaggcaagaaccccaacacagtgattgtgccgacgtcgtccagtgggcagcaccgccaacgacctgccttgggcggggccggcacgctggagggcgtggaggcgtcgctgttctaccagtgtctggaaaacctgtgtgatcggcacaagtacagctgcccacccccagcacttgtcaaagaggccctcagcaatgttcagagactgaccttctatggattcctcatggctctctcaaagcaccgtggaatcaaccaagccctcggagctttgcctgacaagggggatctgatgcacgacccagcaatggatgaagagctggaacggctgctggcccaggtcccaggcctggtcaactcggtcacagccagtccagaggccagttgcctgccttcccggacccctccccgggttggctctccctggagacctctccatcattcccgaaaagtggatggagagagtgatggctccactgaagagacagacgagtcggagacttgaggagtccaaagggtcctgcccacagcgccctgtacctgctcccacccagcccttggtgtgcccacccagcctcctctccagcaccttgctgtgctgccctctgctgctgacaaggtgaataacagccccaagaccagccagaggggctctgatgatcagcccagccagtggccccggaaggtgaatggcctgctctccctggccctatcagcctgtgaacttcacttaggccccaagctgacagactgtgctgaggccaccttgtcacgccgtagcctgttagtcctcctaacctcttaagagcagtctcttctgagccagcctctgcgggtcccccaataaggttcatctcctcacagcaactccattaagggggagaacccgaatagccacgcagggccttgcaccatcaagggtgacacctgcgacgcaagtaccaggaggacataaccgctgtggcctgttggagaacagccagtagccttggtaatatgaagggtgggccagaagatgatttcacttgcaaaaactgcttcaagtcttgacccctttgtgtctaatagctaaacaaacatgtgaaacgaataaaaagtccctcatgtctggtaaaaaaaagtctaaa

SEQ ID NO: 290399 - DNA, 1543 bp, Homo sapiens
gctggtaccggtcggagtggtgggatggatgctgagtccggagcgcctagccctaccggactacgagtatctggttttaacagtgtatgccagggaacacacattctctttcgagaattcagcttcgtccaagccaccccccacaatagggtatcatttttacgggccttctggagatgcttccgaactgtgggcaaaaatggcgatttgctgaccatgaaagaatatcactgtttgctgcaattactgtgtcctgatttcccgctggagctcactcagaaagcagccaggattgtgctcatggacgatgccatggactgcttgatgtctttttcagatttcctctttgccttccagatccagttttactactcagaattcctggacagtgtggctgccatctatgaggacctgctgtcaggcaagaaccccaacacagtgattgtgccgacgtcgtccagtgggcagcaccgccaacgacctgccttgggcggggccggcacgctggagggcgtggaggcgtcgctgttctaccagtgtctggaaaacctgtgtgatcggcacaagtacagctgcccacccccagcacttgtcaaagaggccctcagcaatgttcagagactgaccttctatggattcctcatggctctctcaaagcaccgtggaatcaaccaagccctcggagctttgcctgacaagggggatctgatgcacgacccagcaatggatgaagagctggaacggctgctggcccaggtcccaggcctggtcaactcggtcacagccagtccagaggccagttgcctgccttcccggacccctccccgggttggctctccctggagacctctccatcattcccgaaaagtggatggagagagtgatggctccactgaagagacagacgagtcggagacttgaggagtccaaagggtcctgcccacagcgccctgtacctgctcccacccagcccttggtgtgcccacccagcctcctctccagcaccttgctgtgctgccctctgctgctgacaaggtgaataacagccccaagaccagccagaggggctctgatgatcagcccagccagtggccccggaaggtgaatggcctgctctccctggccctatcagcctgtgaacttcacttaggccccaagctgacagactgtgctgaggccaccttgtcacgccgtagcctgttagtcctcctaacctcttaagagcagtctcttctgagccagcctctgcgggtcccccaataaggttcatctcctcacagcaactccattaagggggagaacccgaatagccacgcagggccttgcaccatcaagggtgacacctgcgacgcaagtaccaggaggacataaccgctgtggcctgttggagaacagccagtagccttggtaatatgaagggtgggccagaagatgatttcacttgcaaaaactgcttcaagtcttgacccctttgtgtctaatagctaaacaaacatgtgaaacgaataaaaagtccctcatgtctggtaaaaaaaagtctaaa

SEQ ID NO: 290400 - DNA, 1785 bp, Homo sapiens
cgtcccccttccgccgcgtgggtgccatggcaacggagagagacggcaacctgggttccggaagccggagagctggagctttgaagccaccccggtcaaaggatgctgagtccggagcgcctagccctaccggactacgagtatctggctcagcgacatgtcctcacctacatggaggatgcagtgtgccagctgctagaaaacagggaagatattagccaatatggaattgccaggttcttcactgaatagccctgcagaagctggacctcctgaactgtgtgacctacttcagtggtacctcaggttctacatgttttaacagtgtatgccagggaacacacattctctttcgagaattcagcttcgtccaagccaccccccacaatagggtatcatttttacgggccttctggagatgcttccgaactgtgggcaaaaatggcgatttgctgaccatgaaagaatatcactgtttgctgcaattactgtgtcctgatttcccgctggagctcactcagaaagcagccaggattgtgctcatggacgatgccatggactgcttgatgtctttttcagatttcctctttgccttccagatccagttttactactcagaattcctggacagtgtggctgccatctatgaggacctgctgtcaggcaagaaccccaacacagtgattgtgccgacgtcgtccagtgggcagcaccgccaacgacctgccttgggcggggccggcacgctggagggcgtggaggcgtcgctgttctaccagtgtctggaaaacctgtgtgatcggcacaagtacagctgcccacccccagcacttgtcaaagaggccctcagcaatgttcagagactgaccttctatggattcctcatggctctctcaaagcaccgtggaatcaaccaagccctcggagctttgcctgacaagggggatctgatgcacgacccagcaatggatgaagagctggaacggctgctggcccaggtcccaggcctggtcaactcggtcacagccagtccagaggccagttgcctgccttcccggacccctccccgggttggctctccctggagacctctccatcattcccgaaaagtggatggagagagtgatggctccactgaagagacagacgagtcggagacttgaggagtccaaagggtcctgcccacagcgccctgtacctgctcccacccagcccttggtgtgcccacccagcctcctctccagcaccttgctgtgctgccctctgctgctgacaaggtgaataacagccccaagaccagccagaggggctctgatgatcagcccagccagtggccccggaaggtgaatggcctgctctccctggccctatcagcctgtgaacttcacttaggccccaagctgacagactgtgctgaggccaccttgtcacgccgtagcctgttagtcctcctaacctcttaagagcagtctcttctgagccagcctctgcgggtcccccaataaggttcatctcctcacagcaactccattaagggggagaacccgaatagccacgcagggccttgcaccatcaagggtgacacctgcgacgcaagtaccaggaggacataaccgctgtggcctgttggagaacagccagtagccttggtaatatgaagggtgggccagaagatgatttcacttgcaaaaactgcttcaagtcttgacccctttgtgtctaatagctaaacaaacatgtgaaacgaataaaaagtccctcatgtctggtaaaaaaaagtctaaa

SEQ ID NO: 290401 - DNA, 1612 bp, Homo sapiens
tcctgccacaattcagaggcctccccagccatgtggaactctcagcgacatgtcctcacctacatggaggatgcagtgtgccagctgctagaaaacagggaagatattagccaatatggaattgccaggttcttcactgaatattttaacagtgtatgccagggaacacacattctctttcgagaattcagcttcgtccaagccaccccccacaatagggtatcatttttacgggccttctggagatgcttccgaactgtgggcaaaaatggcgatttgctgaccatgaaagaatatcactgtttgctgcaattactgtgtcctgatttcccgctggagctcactcagaaagcagccaggattgtgctcatggacgatgccatggactgcttgatgtctttttcagatttcctctttgccttccagatccagttttactactcagaattcctggacagtgtggctgccatctatgaggacctgctgtcaggcaagaaccccaacacagtgattgtgccgacgtcgtccagtgggcagcaccgccaacgacctgccttgggcggggccggcacgctggagggcgtggaggcgtcgctgttctaccagtgtctggaaaacctgtgtgatcggcacaagtacagctgcccacccccagcacttgtcaaagaggccctcagcaatgttcagagactgaccttctatggattcctcatggctctctcaaagcaccgtggaatcaaccaagccctcggagctttgcctgacaagggggatctgatgcacgacccagcaatggatgaagagctggaacggctgctggcccaggtcccaggcctggtcaactcggtcacagccagtccagaggccagttgcctgccttcccggacccctccccgggttggctctccctggagacctctccatcattcccgaaaagtggatggagagagtgatggctccactgaagagacagacgagtcggagacttgaggagtccaaagggtcctgcccacagcgccctgtacctgctcccacccagcccttggtgtgcccacccagcctcctctccagcaccttgctgtgctgccctctgctgctgacaaggtgaataacagccccaagaccagccagaggggctctgatgatcagcccagccagtggccccggaaggtgaatggcctgctctccctggccctatcagcctgtgaacttcacttaggccccaagctgacagactgtgctgaggccaccttgtcacgccgtagcctgttagtcctcctaacctcttaagagcagtctcttctgagccagcctctgcgggtcccccaataaggttcatctcctcacagcaactccattaagggggagaacccgaatagccacgcagggccttgcaccatcaagggtgacacctgcgacgcaagtaccaggaggacataaccgctgtggcctgttggagaacagccagtagccttggtaatatgaagggtgggccagaagatgatttcacttgcaaaaactgcttcaagtcttgacccctttgtgtctaatagctaaacaaacatgtgaaacgaataaaaagtccctcatgtctggtaaaaaaaagtctaaa

SEQ ID NO: 290402 - DNA, 2077 bp, Homo sapiens
ttttaaaagaaatctatttttaatggctttggctttatagcacgaagcaggcaccctctcgttaaaggcacacagtcctctcttctgccccacctcctgggtccttaaaatcgagtcctgagttccagaggggtcactgcaaggcagcagggaagggagagggtcacagtttcactctgtgagtatcagacacccagggccaaggcccagactggcctctgaagctacaggttaacctgggttccggaagccggagagctggagctttgaagccaccccggtcaaaggatgctgagtccggagcgcctagccctaccggactacgagtatctggttttaacagtgtatgccagggaacacacattctctttcgagaattcagcttcgtccaagccaccccccacaatagggtatcatttttacgggccttctggagatgcttccgaactgtgggcaaaaatggcgatttgctgaccatgaaagaatatcactgtttgctgcaattactgtgtcctgatttcccgctggagctcactcagaaagcagccaggattgtgctcatggacgatgccatggactgcttgatgtctttttcagatttcctctttgccttccagatccagttttactactcagaattcctggacagtgtggctgccatctatgaggacctgctgtcaggcaagaaccccaacacagtgattgtgccgacgtcgtccagtgggcagcaccgccaacgacctgccttgggcggggccggcacgctggagggcgtggaggcgtcgctgttctaccagtgtctggaaaacctgtgtgatcggcacaagtacagctgcccacccccagcacttgtcaaagaggccctcagcaatgttcagagactgaccttctatggattcctcatggctctctcaaagcaccgtggaatcaaccaagccctcggagctttgcctgacaagggggatctgatgcacgacccagcaatggatgaagagctggaacggcttgtaagtgtcaagtgggaggatactgcccccttgtgggggccagacgggtcggacacggctgtgccccatctggggccaacaccacttgtctgtaacatcccacatctgccagggaagggtctgggggccagtggaggcctgaggtgtccctccctctgagtcctttgggggctgcagcccaggggtttaccctagtgttaagagtgggcatggaggccctgctctctgtacaggaggcctctcgctgccctccaggcttcttcccttcttcaggctggcccaggtcccaggcctggtcaactcggtcacagccagtccagaggccagttgcctgccttcccggacccctccccgggttggctctccctggagacctctccatcattcccgaaaagtggatggagagagtgatggctccactgaagagacagacgagtcggagacttgaggagtccaaagggtcctgcccacagcgccctgtacctgctcccacccagcccttggtgtgcccacccagcctcctctccagcaccttgctgtgctgccctctgctgctgacaaggtgaataacagccccaagaccagccagaggggctctgatgatcagcccagccagtggccccggaaggtgaatggcctgctctccctggccctatcagcctgtgaacttcacttaggccccaagctgacagactgtgctgaggccaccttgtcacgccgtagcctgttagtcctcctaacctcttaagagcagtctcttctgagccagcctctgcgggtcccccaataaggttcatctcctcacagcaactccattaagggggagaacccgaatagccacgcagggccttgcaccatcaagggtgacacctgcgacgcaagtaccaggaggacataaccgctgtggcctgttggagaacagccagtagccttggtaatatgaagggtgggccagaagatgatttcacttgcaaaaactgcttcaagtcttgacccctttgtgtctaatagctaaacaaacatgtgaaacgaataaaaagtccctcatgtctggtaaaaaaaagtctaaa

SEQ ID NO: 290403 - DNA, 1589 bp, Homo sapiens
cgtcccccttccgccgcgtgggtgccatggcaacggagagagacggcaacctgggttccggaagccggagagctggagctttgaagccaccccggtcaaaggatgctgagtccggagcgcctagccctaccggactacgagtatctggctcagcgacatgtcctcacctacatggaggatgcagtgtgccagctgctagaaaacagggaagatattagccaatatggaattgccaggttcttcactgaataatttgctgaccatgaaagaatatcactgtttgctgcaattactgtgtcctgatttcccgctggagctcactcagaaagcagccaggattgtgctcatggacgatgccatggactgcttgatgtctttttcagatttcctctttgccttccagatccagttttactactcagaattcctggacagtgtggctgccatctatgaggacctgctgtcaggcaagaaccccaacacagtgattgtgccgacgtcgtccagtgggcagcaccgccaacgacctgccttgggcggggccggcacgctggagggcgtggaggcgtcgctgttctaccagtgtctggaaaacctgtgtgatcggcacaagtacagctgcccacccccagcacttgtcaaagaggccctcagcaatgttcagagactgaccttctatggattcctcatggctctctcaaagcaccgtggaatcaaccaagccctcggagctttgcctgacaagggggatctgatgcacgacccagcaatggatgaagagctggaacggctgctggcccaggtcccaggcctggtcaactcggtcacagccagtccagaggccagttgcctgccttcccggacccctccccgggttggctctccctggagacctctccatcattcccgaaaagtggatggagagagtgatggctccactgaagagacagacgagtcggagacttgaggagtccaaagggtcctgcccacagcgccctgtacctgctcccacccagcccttggtgtgcccacccagcctcctctccagcaccttgctgtgctgccctctgctgctgacaaggtgaataacagccccaagaccagccagaggggctctgatgatcagcccagccagtggccccggaaggtgaatggcctgctctccctggccctatcagcctgtgaacttcacttaggccccaagctgacagactgtgctgaggccaccttgtcacgccgtagcctgttagtcctcctaacctcttaagagcagtctcttctgagccagcctctgcgggtcccccaataaggttcatctcctcacagcaactccattaagggggagaacccgaatagccacgcagggccttgcaccatcaagggtgacacctgcgacgcaagtaccaggaggacataaccgctgtggcctgttggagaacagccagtagccttggtaatatgaagggtgggccagaagatgatttcacttgcaaaaactgcttcaagtcttgacccctttgtgtctaatagctaaacaaacatgtgaaacgaataaaaagtccctcatgtctggtaaaaaaaagtctaaa

SEQ ID NO: 290404 - DNA, 1672 bp, Homo sapiens
ttttaaaagaaatctatttttaatggctttggctttatagcacgaagcaggcaccctctcgttaaaggcacacagtcctctcttctgccccacctcctgggtccttaaaatcgagtcctgagttccagaggggtcactgcaaggcagcagggaagggagagggtcacagtttcactctgtgagtatcagacacccagggccaaggcccagactggcctctgaagctacaggttaacctgggttccggaagccggagagctggagctttgaagccaccccggtcaaaggatgctgagtccggagcgcctagccctaccggactacgagtatctggatttgctgaccatgaaagaatatcactgtttgctgcaattactgtgtcctgatttcccgctggagctcactcagaaagcagccaggattgtgctcatggacgatgccatggactgcttgatgtctttttcagatttcctctttgccttccagatccagttttactactcagaattcctggacagtgtggctgccatctatgaggacctgctgtcaggcaagaaccccaacacagtgattgtgccgacgtcgtccagtgggcagcaccgccaacgacctgccttgggcggggccggcacgctggagggcgtggaggcgtcgctgttctaccagtgtctggaaaacctgtgtgatcggcacaagtacagctgcccacccccagcacttgtcaaagaggccctcagcaatgttcagagactgaccttctatggattcctcatggctctctcaaagcaccgtggaatcaaccaagccctcggagctttgcctgacaagggggatctgatgcacgacccagcaatggatgaagagctggaacggctgctggcccaggtcccaggcctggtcaactcggtcacagccagtccagaggccagttgcctgccttcccggacccctccccgggttggctctccctggagacctctccatcattcccgaaaagtggatggagagagtgatggctccactgaagagacagacgagtcggagacttgaggagtccaaagggtcctgcccacagcgccctgtacctgctcccacccagcccttggtgtgcccacccagcctcctctccagcaccttgctgtgctgccctctgctgctgacaaggtgaataacagccccaagaccagccagaggggctctgatgatcagcccagccagtggccccggaaggtgaatggcctgctctccctggccctatcagcctgtgaacttcacttaggccccaagctgacagactgtgctgaggccaccttgtcacgccgtagcctgttagtcctcctaacctcttaagagcagtctcttctgagccagcctctgcgggtcccccaataaggttcatctcctcacagcaactccattaagggggagaacccgaatagccacgcagggccttgcaccatcaagggtgacacctgcgacgcaagtaccaggaggacataaccgctgtggcctgttggagaacagccagtagccttggtaatatgaagggtgggccagaagatgatttcacttgcaaaaactgcttcaagtcttgacccctttgtgtctaatagctaaacaaacatgtgaaacgaataaaaagtccctcatgtctggtaaaaaaaagtctaaa

SEQ ID NO: 290405 - DNA, 2089 bp, Homo sapiens
atttcttctccctcaggatcctataaatttctctgagattcacctctctgggttctctgctggaccacagagcctcatcctggctcacctctcccaaagcacaaagcattgcttctgtatatcaggaatcatttggttgccttgactgtatatcttggacctttgtcttggcttcctataataggatgaccagatttgtgttcagccattcaaaagaagccagcctgctgcagtactggatgacagagtaatgaggtctgtgggtttctatgctgtactcttctccctacacagcaagactgtttgcgttagtactgcttccagatattctgtggatggtctttgggcatgtggtgggaaacgttaccatgccagagaatttcagcaaatttaaccggctttgaaatgacttgttcttccagatttttatatacaaggaaaaccaaactaaagaagactgatgaaggtgcctctcttgtttgctctcttcacccgaccaattttcataccagtgaagctcctttggtcaaaatggtgtaactggatgcctcccaccctggaaaagctttgtagaaatactgatcttaaaatctcacacctggaggttagagactagcatacccttcacactgacttgcttttaaaagaacagctctaccaagaccaggtctgaaactcatgaaatgaacaaaaagagggcagtgacttgaaatgcagagacctaatgtgttcctctccatttccacttcagatttgctgaccatgaaagaatatcactgtttgctgcaattactgtgtcctgatttcccgctggagctcactcagaaagcagccaggattgtgctcatggacgatgccatggactgcttgatgtctttttcagatttcctctttgccttccagatccagttttactactcagaattcctggacagtgtggctgccatctatgaggacctgctgtcaggcaagaaccccaacacagtgattgtgccgacgtcgtccagtgggcagcaccgccaacgacctgccttgggcggggccggcacgctggagggcgtggaggcgtcgctgttctaccagtgtctggaaaacctgtgtgatcggcacaagtacagctgcccacccccagcacttgtcaaagaggccctcagcaatgttcagagactgaccttctatggattcctcatggctctctcaaagcaccgtggaatcaaccaagccctcggagctttgcctgacaagggggatctgatgcacgacccagcaatggatgaagagctggaacggctgctggcccaggtcccaggcctggtcaactcggtcacagccagtccagaggccagttgcctgccttcccggacccctccccgggttggctctccctggagacctctccatcattcccgaaaagtggatggagagagtgatggctccactgaagagacagacgagtcggagacttgaggagtccaaagggtcctgcccacagcgccctgtacctgctcccacccagcccttggtgtgcccacccagcctcctctccagcaccttgctgtgctgccctctgctgctgacaaggtgaataacagccccaagaccagccagaggggctctgatgatcagcccagccagtggccccggaaggtgaatggcctgctctccctggccctatcagcctgtgaacttcacttaggccccaagctgacagactgtgctgaggccaccttgtcacgccgtagcctgttagtcctcctaacctcttaagagcagtctcttctgagccagcctctgcgggtcccccaataaggttcatctcctcacagcaactccattaagggggagaacccgaatagccacgcagggccttgcaccatcaagggtgacacctgcgacgcaagtaccaggaggacataaccgctgtggcctgttggagaacagccagtagccttggtaatatgaagggtgggccagaagatgatttcacttgcaaaaactgcttcaagtcttgacccctttgtgtctaatagctaaacaaacatgtgaaacgaataaaaagtccctcatgtctggtaaaaaaaagtctaaa

SEQ ID NO: 290406 - DNA, 1539 bp, Homo sapiens
gtgccttttgcctcctgccacaattcagaggcctccccagccatgtggaactttttaacagtgtatgccagggaacacacattctctttcgagaattcagcttcgtccaagccaccccccacaatagggtatcatttttacgggccttctggagatgcttccgaactgtgggcaaaaatggcgatttgctgaccatgaaagaatatcactgtttgctgcaattactgtgtcctgatttcccgctggagctcactcagaaagcagccaggattgtgctcatggacgatgccatggactgcttgatgtctttttcagatttcctctttgccttccagatccagttttactactcagaattcctggacagtgtggctgccatctatgaggacctgctgtcaggcaagaaccccaacacagtgattgtgccgacgtcgtccagtgggcagcaccgccaacgacctgccttgggcggggccggcacgctggagggcgtggaggcgtcgctgttctaccagtgtctggaaaacctgtgtgatcggcacaagtacagctgcccacccccagcacttgtcaaagaggccctcagcaatgttcagagactgaccttctatggattcctcatggctctctcaaagcaccgtggaatcaaccaagccctcggagctttgcctgacaagggggatctgatgcacgacccagcaatggatgaagagctggaacggctgcttcttcccttcttcaggctggcccaggtcccaggcctggtcaactcggtcacagccagtccagaggccagttgcctgccttcccggacccctccccgggttggctctccctggagacctctccatcattcccgaaaagtggatggagagagtgatggctccactgaagagacagacgagtcggagacttgaggagtccaaagggtcctgcccacagcgccctgtacctgctcccacccagcccttggtgtgcccacccagcctcctctccagcaccttgctgtgctgccctctgctgctgacaaggtgaataacagccccaagaccagccagaggggctctgatgatcagcccagccagtggccccggaaggtgaatggcctgctctccctggccctatcagcctgtgaacttcacttaggccccaagctgacagactgtgctgaggccaccttgtcacgccgtagcctgttagtcctcctaacctcttaagagcagtctcttctgagccagcctctgcgggtcccccaataaggttcatctcctcacagcaactccattaagggggagaacccgaatagccacgcagggccttgcaccatcaagggtgacacctgcgacgcaagtaccaggaggacataaccgctgtggcctgttggagaacagccagtagccttggtaatatgaagggtgggccagaagatgatttcacttgcaaaaactgcttcaagtcttgacccctttgtgtctaatagctaaacaaacatgtgaaacgaataaaaagtccctcatgtctggtaaaaaaaagtctaaa

SEQ ID NO: 290407 - DNA, 1527 bp, Homo sapiens
agggacacaaaattaggtaatgtctgacctttgggcttagcctggaccatatccttttcagcccagtacctgaggcctcaagaaggaactcaactcccagcaccaggtcacaaccaccacctggtgttggaaggggatcaccacactccttggctgtggtgtctgccccaggcagggaaagtaggcagtgggattcaataaatgtatcaagcaacagcgagcaccttcctgctccgtgactgttcttggcccctctagcagtcctcagatctttagatcggccctcgcagggtcagcagaacaggcagccgtgaaggtgaggggcatggaggaatctgttgcctggctgaagggccctcagattaactactgtgcccccaatgatctcctaggagctttgcctgacaagggggatctgatgcacgacccagcaatggatgaagagctggaacggcttgtaagtgtcaagtgggaggatactgcccccttgtgggggccagacgggtcggacacggctgtgccccatctggggccaacaccacttgtctgtaacatcccacatctgccagggaagggtctgggggccagtggaggcctgaggtgtccctccctctgagtcctttgggggctgcagcccaggggtttaccctagtgttaagagtgggcatggaggccctgctctctgtacaggaggcctctcgctgccctccaggcttcttcccttcttcaggctggcccaggtcccaggcctggtcaactcggtcacagccagtccagaggccagttgcctgccttcccggacccctccccgggttggctctccctggagacctctccatcattcccgaaaagtggatggagagagtgatggctccactgaagagacagacgagtcggagacttgaggagtccaaagggtcctgcccacagcgccctgtacctgctcccacccagcccttggtgtgcccacccagcctcctctccagcaccttgctgtgctgccctctgctgctgacaaggtgaataacagccccaagaccagccagaggggctctgatgatcagcccagccagtggccccggaaggtgaatggcctgctctccctggccctatcagcctgtgaacttcacttaggccccaagctgacagactgtgctgaggccaccttgtcacgccgtagcctgttagtcctcctaacctcttaagagcagtctcttctgagccagcctctgcgggtcccccaataaggttcatctcctcacagcaactccattaagggggagaacccgaatagccacgcagggccttgcaccatcaagggtgacacctgcgacgcaagtaccaggaggacataaccgctgtggcctgttggagaacagccagtagccttggtaatatgaagggtgggccagaagatgatttcacttgcaaaaactgcttcaagtcttgacccctttgtgtctaatagctaaacaaacatgtgaaacgaataaaaagtccctcatgtctggtaaaaaaaagtctaaa

SEQ ID NO: 290408 - DNA, 1186 bp, Homo sapiens
cgtcccccttccgccgcgtgggtgccatggcaacggagagagacggcaacctgggttccggaagccggagagctggagctttgaagccaccccggtcaaaggatgctgagtccggagcgcctagccctaccggactacgagtatctggctcagcgacatgtcctcacctacatggaggatgcagtgtgccagctgctagaaaacagggaagatattagccaatatggaattgccaggttcttcactgaatattttaacagtgtatgccagggaacacacattctctttcgagaattcagcttcgtccaagccaccccccacaatagggtatcatttttacgggccttctggagatgcttccgaactgtgggcaaaaatggcgatttgctgaccatgaaagaatatcactgtttgctgcaattactgtgtcctgatttcccgctggagctcactcagaaagcagccaggattgtgctcatggacgatgccatggactgcttgatgtctttttcagatttcctctttgccttccagatccagttttactactcagaattcctggacagtgtggctgccatctatgaggacctgctgtcaggcaagaaccccaacacagtgattgtgccgacgtcgtccagtgggcagcaccgccaacgacctgccttgggcggggccggcacgctggagggcgtggaggcgtcgctgttctaccagtgtctggaaaacctgtgtgatcggcacaagtacagctgcccacccccagcacttgtcaaagaggccctcagcaatgttcagagactgaccttctatggattcctcatggctctctcaaagcaccgtggaatcaaccaagccctcggagctttgcctgacaagggggatctgatgcacgacccagcaatggatgaagagctggaacggctcaactccattaagggggagaacccgaatagccacgcagggccttgcaccatcaagggtgacacctgcgacgcaagtaccaggaggacataaccgctgtggcctgttggagaacagccagtagccttggtaatatgaagggtgggccagaagatgatttcacttgcaaaaactgcttcaagtcttgacccctttgtgtctaatagctaaacaaacatgtgaaacgaataaaaagtccctcatgtctggtaaaaaaaagtctaaa

SEQ ID NO: 290409 - DNA, 1213 bp, Homo sapiens
cgtcccccttccgccgcgtgggtgccatggcaacggagagagacggcaacctgggttccggaagccggagagctggagctttgaagccaccccggtcaaaggatgctgagtccggagcgcctagccctaccggactacgagtatctggctcagcgacatgtcctcacctacatggaggatgcagtgtgccagctgctagaaaacagggaagatattagccaatatggaattgccaggttcttcactgaatattttaacagtgtatgccagggaacacacattctctttcgagaattcagcttcgtccaagccaccccccacaatagggtatcatttttacgggccttctggagatgcttccgaactgtgggcaaaaatggcgatttgctgaccatgaaagaatatcactgtttgctgcaattactgtgtcctgatttcccgctggagctcactcagaaagcagccaggattgtgctcatggacgatgccatggactgcttgatgtctttttcagatttcctctttgccttccagatccagttttactactcagaattcctggacagtgtggctgccatctatgaggacctgctgtcaggcaagaaccccaacacagtgattgtgccgacgtcgtccagtgggcagcaccgccaacgacctgccttgggcggggccggcacgctggagggcgtggaggcgtcgctgttctaccagtgtctggaaaacctgtgtgatcggcacaagtacagctgcccacccccagcacttgtcaaagaggccctcagcaatgttcagagactgaccttctatggattcctcatggctctctcaaagcaccgtggaatcaaccaagccctcggagctttgcctgacaagggggatctgatgcacgacccagcaatggatgaagagctggaacggctggtggtgaggtcgaagctgcaccggacctcacggcagcacagagccaaggagccaggggcctttggctttcagagaagagagaagcaggaggccctggagagagtgtcctcagcttcggtaccgacgccctaccattaccggtgggagcccagagagtgaggccaggggccggcactgggcagggaggcaggatccagaggacactgcttcactcagaccaacagggagccaggccctgcaggggctttattttgacaccactttgtttcaatacaaacagtccagaaag

SEQ ID NO: 290410 - DNA, 1291 bp, Homo sapiens
cgtcccccttccgccgcgtgggtgccatggcaacggagagagacggcaacctgggttccggaagccggagagctggagctttgaagccaccccggtcaaaggatgctgagtccggagcgcctagccctaccggactacgagtatctggctcagcgacatgtcctcacctacatggaggatgcagtgtgccagctgctagaaaacagggaagatattagccaatatggaattgccaggttcttcactgaatattttaacagtgtatgccagggaacacacattctctttcgagaattcagcttcgtccaagccaccccccacaatagggtatcatttttacgggccttctggagatgcttccgaactgtgggcaaaaatggcgatttgctgaccatgaaagaatatcactgtttgctgcaattactgtgtcctgatttcccgctggagctcactcagaaagcagccaggattgtgctcatggacgatgccatggactgcttgatgtctttttcagatttcctctttgccttccagatccagttttactactcagaattcctggacagtgtggctgccatctatgaggacctgctgtcaggcaagaaccccaacacagtgattgtgccgacgtcgtccagtgggcagcaccgccaacgacctgccttgggcggggccggcacgctggagggcgtggaggcgtcgctgttctaccagtgtctggaaaacctgtgtgatcggcacaagtacagctgcccacccccagcacttgtcaaagaggccctcagcaatgttcagagactgaccttctatggattcctcatggctctctcaaagcaccgtggaatcaaccaagccctcggtaagtcagagctaagcagccgtcagcctctcctgccgcacaacacagggagcagctggcctctgttagcaacacggctccagaggggaaggggcatcaccatctctgccttgacttcccagggccggactcaatcccagggagcaggaatatggcgacaaaacatggctcttacacattcccatggtaggggacagccctccctgcctgcagccctgccccaacatgaaaccacctccccatagcagaagcgcccagcccctcctcagagaaccccagctctgctttggggagcagcctgcaggtcgggcagacacaggactatttactcagtgacgctagagattatatatcaaagagacctgaatcccatttataaacaaggcaaaggtgtgtctgcggagaccttttttccaagctgaaaaaaaaaat

SEQ ID NO: 290411 - DNA, 807 bp, Homo sapiens
cgtcccccttccgccgcgtgggtgccatggcaacggagagagacggcaacctgggttccggaagccggagagctggagctttgaagccaccccggtcaaaggatgctgagtccggagcgcctagccctaccggactacgagtatctggctcagcgacatgtcctcacctacatggaggatgcagtgtgccagctgctagaaaacagggaagatattagccaatatggaattgccaggttcttcactgaatattttaacagtgtatgccagggaacacacattctctttcgagaattcagcttcgtccaagccaccccccacaatagggtatcatttttacgggccttctggagatgcttccgaactgtgggcaaaaatggcgatttgctgaccatgaaagaatatcactgtttgctgcaattactgtgtcctgatttcccgctggagctcactcagaaagcagccaggattgtgctcatggacgatgccatggactgcttgatgtctttttcagatttcctctttgccttccagatccagttttactactcagaattcctggacagtgtggctgccatctatgaggacctgctgtcaggcaagaaccccaacacagtgattgtgccgacgtcgtccagtgggcagcaccgccaacgacctgccttgggcggggccggcacgctggagggcgtggaggcgtcgctgttctaccagtgtctggaaaacctgtgtgatcggcacaagtacagctaggacacagacagcgtatcataggccttcagtcagtcagagactacgtcgtactgt

SEQ ID NO: 290412 - DNA, 1244 bp, Homo sapiens
cgtcccccttccgccgcgtgggtgccatggcaacggagagagacggcaacctgggttccggaagccggagagctggagctttgaagccaccccggtcaaaggatgctgagtccggagcgcctagccctaccggactacgagtatctggctcagcgacatgtcctcacctacatggaggatgcagtgtgccagctgctagaaaacagggaagatattagccaatatggaattgccaggttcttcactgaatattttaacagtgtatgccagggaacacacattctctttcgagaattcagcttcgtccaagccaccccccacaatagggtatcatttttacgggccttctggagatgcttccgaactgtgggcaaaaatggcgatttgctgaccatgaaagaatatcactgtttgctgcaattactgtgtcctgatttcccgctggagctcactcagaaagcagccaggattgtgctcatggacgatgccatggactgcttgatgtctttttcagatttcctctttgccttccagatccagttttactactcaggtgagtgttccggggctccatctggctccgcacaggaccctgtctccctgtcctgccctgctgccctgcccatctgtgtgcctggcacacacgtttctcttccccacttcctttgggggtgtgcttcactgcgggtcgctaacaggatgtctagtgttcagtggtggtcacaagattcagtctgcagagccgacttcctcagcctcctgaagacactgaacaccgcagtgttttcagtcagcaacgcaacaaatcagtttaagtgataatgacaataacaacatccatagcatccacagcattcactgcttactgaaaacttactatgtcccaggcacagcactgactttaatcttgacaacagccttgagagagagtcctttcagagacaagctcacagaagtagtagccagtcatgcagctcataagtggtggagaccagacctgaaggctgactccaaagccagcgttcccaacctcgctgctattttactgccttcaagggtctctcccttggcaactgatcgtgcgtttgggtgcacattctcctccaccccacagctttaaaaaagcatacaccagtcctttgtcacactcccactctgctccccaattcacacagctgcacccttaagtctctctggaatcagatggaataaatatagacaaataaatataaatatacaccagc

SEQ ID NO: 290413 - DNA, 910 bp, Homo sapiens
cgtcccccttccgccgcgtgggtgccatggcaacggagagagacggcaacctgggttccggaagccggagagctggagctttgaagccaccccggtcaaaggatgctgagtccggagcgcctagccctaccggactacgagtatctggctcagcgacatgtcctcacctacatggaggatgcagtgtgccagctgctagaaaacagggaagatattagccaatatggaattgccaggttcttcactgaatattttaacagtgtatgccagggaacacacattctctttcgagaattcagcttcgtccaagccaccccccacaatagggtatcatttttacgggccttctggagatgcttccgaactgtgggcaaaaatggcgatttgctgaccatgaaagaatatcactgtttgctgcaattactgtgtcctgatttcccgctggagctcactcagaaagcagccaggattgtgctcatggacgatgccatggactgcttgatgtctttttcagatttcctctttgccttccagatccagttttactactcaggcacagcactgactttaatcttgacaacagccttgagagagagtcctttcagagacaagctcacagaagtagtagccagtcatgcagctcataagtggtggagaccagacctgaaggctgactccaaagccagcgttcccaacctcgctgctattttactgccttcaagggtctctcccttggcaactgatcgtgcgtttgggtgcacattctcctccaccccacagctttaaaaaagcatacaccagtcctttgtcacactcccactctgctccccaattcacacagctgcacccttaagtctctctggaatcagatggaataaatatagacaaataaatataaatatacaccagc

SEQ ID NO: 290414 - DNA, 961 bp, Homo sapiens
ttttaaaagaaatctatttttaatggctttggctttatagcacgaagcaggcaccctctcgttaaaggcacacagtcctctcttctgccccacctcctgggtccttaaaatcgagtcctgagttccagaggggtcactgcaaggcagcagggaagggagagggtcacagtttcactctgtgagtatcagacacccagggccaaggcccagactggcctctgaagctacaggttaacctgggttccggaagccggagagctggagctttgaagccaccccggtcaaaggatgctgagtccggagcgcctagccctaccggactacgagtatctggctcagcgacatgtcctcacctacatggaggatgcagtgtgccagctgctagaaaacagggaagatattagccaatatggaattgccaggttcttcactgaatattttaacagtgtatgccagggaacacacattctctttcgagaattcagcttcgtccaagccaccccccacaatagggtatcatttttacgggccttctggagatgcttccgaactgtgggcaaaaatggcgatttgctgaccatgaaagaatatcactgtttgctgcaattactgtgtcctgatttcccgctggagctcactcagaaagcagccaggtacgtctcctggactcttgaaaccaactcagctctctgtgggccactgcttcctagagaaacctggagtgtatacaaatgaaaaaaaggagcatttagggaagaaactggcagtgggagaggggtctatttgggatgtgccccaaaacataatacattctgcatttccaaagggaagcgaaatgatcctttgtggtttctgtggggagcctcagggtctgaagatagagttggagggtggtgagatgaagaggcagaaaaagcccagacccctccaatacccccacacacacacaccctagaggata

SEQ ID NO: 290415 - DNA, 968 bp, Homo sapiens
ttttaaaagaaatctatttttaatggctttggctttatagcacgaagcaggcaccctctcgttaaaggcacacagtcctctcttctgccccacctcctgggtccttaaaatcgagtcctgagttccagaggggtcactgcaaggcagcagggaagggagagggtcacagtttcactctgtgagtatcagacacccagggccaaggcccagactggcctctgaagctacaggttaacctgggttccggaagccggagagctggagctttgaagccaccccggtcaaaggatgctgagtccggagcgcctagccctaccggactacgagtatctggctcagcgacatgtcctcacctacatggaggatgcagtgtgccagctgctagaaaacagggaagatattagccaatatggaattgccaggttcttcactgaatattttaacagtgtatgccagggaacacacattctctttcgagaattcagcttcgtccaagccaccccccacaatagggtatcatttttacgggccttctggagatgcttccgaactgtgggcaaaaatggcggtaagtcttcccaaattctttttccttccttccttccttccttcctttcttccttccttccttcctctctctctctttctttctctctctcttttcctctctttctctttcaaactttttcttttgttcctataaatattgtttgaatgcatgctattcaaggcatttagaatacctcacttttgaggagttgtctggtttatgtccaagatattactattaccactaccatcactaatggtacctattaagagccaagtgtagctctttacatgtagtaactcatttatctttacaagggctctctgtggtagataccataatccccattttgtaactaatgaaactgaggatcagagaggttaagtaacttggcaaggttacatagtaaattctgggc

SEQ ID NO: 290416 - DNA, 945 bp, Homo sapiens
ttttaaaagaaatctatttttaatggctttggctttatagcacgaagcaggcaccctctcgttaaaggcacacagtcctctcttctgccccacctcctgggtccttaaaatcgagtcctgagttccagaggggtcactgcaaggcagcagggaagggagagggtcacagtttcactctgtgagtatcagacacccagggccaaggcccagactggcctctgaagctacaggttaacctgggttccggaagccggagagctggagctttgaagccaccccggtcaaaggatgctgagtccggagcgcctagccctaccggactacgagtatctggttttaacagtgtatgccagggaacacacattctctttcgagaattcagcttcgtccaagccaccccccacaatagggtatcatttttacgggccttctggagatgcttccgaactgtgggcaaaaatggcgatttgctgaccatgaaagaatatcactgtttgctgcaattactgtgtcctgatttcccgctggagctcactcagaaagcagccaggattgtgctcatggacgatgccatggactgcttgatgtctttttcagatttcctctttgccttccagatccagttttactactcagaattcctggacagtgtggctgccatctatgaggacctgctgtcaggggccaaaaggaaaaaaccccccaaaaacaaacaaagggttggactttcggttgggccccggaaaccggtttcaggttcccaagaggtggcgggacaaaggacaaaatcccggaggccaatatccggaaacccccatggcccccttttggcggcgccccgggggtggccgccgtgtgtctcaaaccggacccatggggcaacgacgggcccggattggcgccaacgcgggccggagatccggaccactggcattattcatttac

SEQ ID NO: 290417 - DNA, 1051 bp, Homo sapiens
ttttaaaagaaatctatttttaatggctttggctttatagcacgaagcaggcaccctctcgttaaaggcacacagtcctctcttctgccccacctcctgggtccttaaaatcgagtcctgagttccagaggggtcactgcaaggcagcagggaagggagagggtcacagtttcactctgtgagtatcagacacccagggccaaggcccagactggcctctgaagctacaggttaacctgggttccggaagccggagagctggagctttgaagccaccccggtcaaaggatgctgagtccggagcgcctagccctaccggactacgagtatctggttttaacagtgtatgccagggaacacacattctctttcgagaattcagcttcgtccaagccaccccccacaatagggtatcatttttacgggccttctggagatgcttccgaactgtgggcaaaaatggcgatttgctgaccatgaaagaatatcactgtttgctgcaattactgtgtcctgatttcccgctggagctcactcagaaagcagccaggattgtgctcatggacgatgccatggactgcttgatgtctttttcagatttcctctttgccttccagatccagttttactactcagctgcccacccccagcacttgtcaaagaggccctcagcaatgttcagagactgaccttctatggattcctcatggctctctcaaagcaccgtggaatcaaccaagccctcggagctttgcctgacaagggggatctgatgcacgacccagcaatggatgaagagctggaacggcttgtgggccaggtccagggctggtcaactcgggtcacaagcagtccagaagcatgttgctgctttcggacctccggggtggtctcctggagaccttttcattatcgcggaaagggttgcgaagatggctggtccctgaaagaagacggttgggatttgggtcaggctgcccaggcgtgctgtttcaccacgtgggggccccccttctcacttggtcgccttgcaaggtaagcccgacagggt

SEQ ID NO: 290418 - DNA, 814 bp, Homo sapiens
cgtcccccttccgccgcgtgggtgccatggcaacggagagagacggcaacctgggttccggaagccggagagctggagctttgaagccaccccggtcaaaggatgctgagtccggagcgcctagccctaccggactacgagtatctggctcagcgacatgtcctcacctacatggaggatgcagtgtgccagctgctagaaaacagggaagatattagccaatatggaattgccaggttcttcactgaatagtaagtacatgaatgttgtactaatacagtgaacccagaggaggcgcttggaagcaggcaggatacttgaggaacagagcaggacaatgctgattaggtagtggcagtgaatgtttagtttggtaggttggttgtgggccgcccaaacatgttttggagcatgcctttggtgcagctagtttgtccagtgatgtctcatgaatagttttgattacagtagcttaacaactgcttgtttgatctattagatctatttctgtaggtttctcttttaactttctcctttattcaaaatattcactttgatttcctttcgctgatgttcatctagcctgttttttttcatggctggcttttctcatggaatctaggctaatgttcctctgcagtttttctttctacaggatgctgtgccaatcacttaatgatttaagtgtatttctaatcagcaagtgaagagacaaccacagaatgggagaaagtatttggcaagctggccaatctgacaggggattaatgacagaatatataaggaggtcaaatatttctatagggaaaaatca

SEQ ID NO: 290419 - DNA, 847 bp, Homo sapiens
gctggtaccggtcggagtggtgggatggatgctgagtccggagcgcctagccctaccggactacgagtatctgggcatgcttgaaacaataacacttttgaatgtaagatatatgaaaggccacacgtcttcggctttgcttgtcaaatggagaggctgccagaaccggtcggctccatggttctcatgccccaaagtcctgcaaattgacacctcagcgacatgtcctcacctacatggaggatgcagtgtgccagctgctagaaaacagggaagatattagccaatatggaattgccaggttcttcactgaatattttaacagtgtatgccagggaacacacattctctttcgagaattcagcttcgtccaagccaccccccacaatagggtatcatttttacgggccttctggagatgcttccgaactgtgggcaaaaatggcggtaagtcttcccaaattctttttccttccttccttccttccttcctttcttccttccttccttcctctctctctctttctttctctctctcttttcctctctttctctttcaaactttttcttttgttcctataaatattgtttgaatgcatgctattcaaggcatttagaatacctcacttttgaggagttgtctggtttatgtccaagatattactattaccactaccatcactaatggtacctattaagagccaagtgtagctctttacatgtagtaactcatttatctttacaagggctctctgtggtagataccataatccccattttgtaactaatgaaactgaggatcagagaggttaagtaacttggcaaggttacatagtaaattctgggc

SEQ ID NO: 290420 - DNA, 740 bp, Homo sapiens
ggtaagaagtgcctttcacctgccgccgtgattctggggcctccccggccatgtggaattgctgagggtgatggtaggaaaagatgtcccagagttgggctcattaatatccacggagagggtgtggccctgaagagatagagaacatagtggtggcagtgacctgcaaaagccagaggacacggttaccatggcaaccccagaggagcagccgagggggcttgacctgcctgcagttgtgggtgacataggaggatgccagctttgagtggagcctccacaggaaaggacactgcagcagatccaggccatggcgcagtcaccatccttcagaccccctggtgctgaaagtgccagtggtgggggtagaaggtcctggattctaaaggagggtacccttaaaaggggacaaatgagtgcccattgaactacacattacagctgccacaggggaattggacagtatgtgtccagagaccagcgggtgagaagaggagtcccctcctctccaggcacagatttactcctccgggcgggcccctcgctccttcccgcagaggccttttccctcccgaccccgcactcacctgcccaggtctggatcaggggcacggctcccgagaacagcaggaggagggttcgggactccatgacccgcaaccttggcgtctggggagaatctgagtcccggtgggccggcgaggactttagaaccaggaaccgcggcgacactgattggc

SEQ ID NO: 290421 - DNA, 1054 bp, Homo sapiens
ggtaagaagtgcctttcacctgccgccgtgattctggggcctccccggccatgtggaattgctgagggtgatggtaggaaaagatgtcccagagttgggctcattaatatccacggagagggtgtggccctgaagagatagagaacatagtggtggcagtgacctgcaaaagccagaggacacggttaccatggcaaccccagaggagcagccgagggggcttgacctgcctgcagttgtgggtgacataggaggatgccagctttgagtggagcctccacaggaaaggacactgcagcagatccaggccatggcgcagtcaccatccttcagaccccctggtgctgaaagtgccagtggtggggtaagatttggggtggagctgaaccaagcaccagtaggagagtcacagtggagggcctgggattctggagtaaggccatgtcatccacagcacagaaatatgccccatccaaagcagagaaatatgttggaagcaacttttggcatgttactgtaggccctgataagatagaatgcttgaccatgggacacaaaacaaccatgtgattccaagtgcccctacgaattagcatctgtgtaactcatgaagtcatacattggacatgcccaacagcatccatcatgagatggaaaagtttcttgtgagttgagcctgaatcccatgttaacatccccagaaaacacccaaacctgaaatggccctgaacaaccaagcagaagcactgaaattagccagccttccccatgggtcagcccaggccgggtaggatgggtacataaatggagcaaacacagtggcagggatgaggctacctatgggtccaacagtactgactccctcctaccaaggtagatccagacactgccacctctaaatgtcctactcatcagcatttgaacccaatgatcttccctggtagggctctatttctttaggtgaccaaccagaccctaagtgaggagttgactacattgcactccttccatcctggaagggccagaggttcatcttcacagggataggcaccta

SEQ ID NO: 290422 - DNA, 6885 bp, Homo sapiens
  misc_feature (347)..(347): n is a, c, g, or t
  misc_feature (402)..(402): n is a, c, g, or t
  misc_feature (457)..(457): n is a, c, g, or t
cgctgcaaatgccagggcagtgaagccgaacagaaaaccccatcgctttaaaaaggcagctgtccgccctccccctttcccctcgccaggcgaggcccctcaagtccgggatccgcgagctgcgcggaggatctcgccaaacccgagcaccgtgcggcgtcttttaagagctcgaacaacgggaatccagcaaaaaacaagccggccccagaaggcagcctccctcctctctccgcgcacgggctacaatcgcccccagtccccaaactgtcccagtagaggccgcgcggagagagcagagccgagggacccagcgcaaggcgggagccaagcgcggctgctttaanaacgcggagagcgcgcgcccgccgccagctggcccgggctgcgcgcccccgccgncaccgcgcgccccctgttcgctcgctccttcgctcgccggctttaaagtctctgncaggatccatgctcacatgttacttcctgtatggaggcatggccagtttccagccccgcgctcttcgttccttcccagcctgcgccggagccacaactttcaggagcatggactgaaggcgccctcgccccagcgcccctctgagatcctttgtgttttcctccgtttcctccggccgtttctattttggggggctctccgctccccctgcctctcccctccccttcccctctcgcaaacatgcctccttccttcccggggccctggaaggagctgcctgcctgaagcccggagacgccgcgccgcgctcagccccgccgccgcccgccggctctcgggctgtgctgcgctgccgactcaagttggggatcctcggctgctcgccgccgccgcccgcggtccctgcctgccccaggcccggggcatcgccgccggccgccgactccgcgccctgcccgatcggctctctcctttttaaacggaaagcagcctttctccgccgagaggatcgtccccagcgtggctctgcgttcccggtcactttttgagattttccggggggcgctcggcggcttcccggattccaaggggactcgggccgccgagcgcggggggcccgtggagcgggcgagccggggaagcgccccggcttagcggaggctcgcacggaggcaagaacttattcaacaagtttacctccctgctttcctcttttcgatgtgcgttttcggacatgcggaggttactggaaccgtgttggtggattttgttcctgaaaatcaccagttccgtgctccattatgtcgtgtgcttccccgcgttgacagaaggctacgttggggccctgcacgagaatagacacggcagcgcagtgcagatccgcaggcgcaaggcttcaggcgacccgtactgggcctactctggtgcctatggtcctgagcactgggtcacgtctagtgtcagctgtgggggccgtcaccagtctcctattgacattttagaccagtatgcgcgtgttggggaagaataccaggaactgcaactcgatggcttcgacaatgagtcttctaacaaaacctggatgaaaaacacagggaaaacagtcgccatccttctgaaagacgactattttgtcagtggagctggtctacctggcagattcaaagctgagaaggtggaatttcactggggccacagcaatggctcagcgggctctgaacacagcatcaatggcaggaggtttcctgttgagatgcagattttcttttacaatccagatgactttgacagctttcaaaccgcaatttctgagaacagaataatcggagccatggccatattttttcaagtcagtccgagggacaattctgcactggatcctattatccacgggttgaagggtgtcgtacatcatgagaaggagacctttctggatcctttcgtcctccgggacctcctgcctgcatccctgggcagctattatcggtacacaggttccttgaccacaccaccgtgtagcgaaatagtggagtggatagtcttccggagacccgtccccatctcttaccatcagcttgaggctttttattccatcttcaccacggagcagcaagaccatgtcaagtcggtggagtatctgagaaataactttcgaccacagcagcgtctgcatgacagggtggtgtccaagtccgccgtccgtgactcctggaaccacgacatgacagacttcttagaaaacccactggggacagaagcctctaaagtttgcagctctccacccatccacatgaaggtgcagcctctgaaccagacggcactgcaggtgtcctggagccagccggagactatctaccacccacccatcatgaactacatgatctcctacagctggaccaagaatgaggacgagaaggagaagacgtttacaaaggacagcgacaaagacttgaaagccaccattagccatgtctcacccgatagcctttacctgttccgagtccaggccgtgtgtcggaacgacatgcgcagcgactttagccagacgatgctgtttcaagctaataccactcgaatattccaagggaccagaatagtgaaaacaggagtgcccacagcgtctcctgcctcttcagccgacatggcccccatcagctcggggtcttctacctggacgtcctctggcatcccattctcatttgtttccatggcaactgggatgggcccctcctccagtggcagccaggccacagtggcctcggtggtcaccagcacgctgctcgccggcctggggttcggcggtggtggcatctcctctttccccagcactgtgtggcccacgcgcctcccgacggccgcctcagccagcaagcaggcggctaggccagtcctagccaccacagaggccttggcttctccagggcccgatggtgattcgtcaccaaccaaggacggcgagggcaccgaggaaggagagaaggatgagaaaagcgagagtgaggatggggagcgggagcacgaggaggatggagagaaggactccgaaaagaaggagaagagtggggtgacccacgctgccgaggagcggaatcagacggagcccagccccacaccctcgtctcctaacaggactgccgagggagggcatcagactatacctgggcatgagcaggatcacactgccgtccccacagaccagacgggcggaaggagggatgccggcccaggcctggaccccgacatggtcacctccacccaagtgccccccaccgccacagaggagcagtatgcagggagtgatcccaagaggcccgaaatgccatctaaaaagcctatgtcccgcggggaccgattttctgaagacagcagatttatcactgttaatccagcggaaaaaaacacctctggaatgataagccgccctgctccagggaggatggagtggatcatccctctgattgtggtatcagccttgaccttcgtgtgcctcatccttctcattgctgtgctcgtttactggagagggtgtaacaaaataaagtccaagggctttcccagacgtttccgtgaagtgccttcttctggggagagaggagagaaggggagcagaaaatgttttcagactgctcatttctatgtggaagacagcagttcacctcgagtggtccctaatgaaagtattcctattattcctattccggatgacatggaagccattcctgtcaaacagtttgtcaaacacatcggtgagctctattctaataaccagcatgggttctctgaggattttgaggaagtccagcgctgtactgctgatatgaacatcactgcagagcattccaatcatccagaaaacaagcacaaaaacagatacatcaacattttagcatatgatcacagtagggtgaagttaagacctttaccaggaaaagactctaagcacagcgactacattaatgcaaactatgttgatggttacaacaaagcaaaagcctacattgccacccaaggacctttgaagtctacatttgaagatttctggaggatgatttgggaacaaaacactggaatcattgtgatgattacgaaccttgtggaaaaaggaagacgaaaatgtgatcagtattggccaacagagaacagtgaggaatatggaaacattattgtcacgctgaagagcacaaaaatacatgcctgctacactgttcgtcgtttttcaatcagaaatacaaaagtgaaaaagggtcagaagggaaatcccaagggtcgtcagaatgaaagggtagtgatccagtatcactatacacagtggcctgacatgggagttcccgagtatgcccttccagtactgactttcgtgaggagatcctcagcagctcggatgccagaaacgggccctgtgttggtgcactgcagtgctggtgtgggcagaacaggcacctatattgtaatagacagcatgctgcaacagataaaagacaaaagcacagttaacgtcctgggattcctgaagcatatcaggacacagcgtaactacctcgtccagactgaggagcagtacattttcatccatgatgccttgttggaagccattcttggaaaggagactgaagtatcttcaaatcagctgcacagctatgttaacagcatccttataccaggagtaggaggaaagacacgactggaaaagcaattcaagctggtcacacagtgtaatgcaaaatatgtggaatgtttcagtgctcagaaagagtgtaacaaagaaaagaacagaaactcttcagttgtgccatctgagcgtgctcgagtgggtcttgcaccattgcctggaatgaaaggaacagattacattaatgcttcttatatcatgggctattataggagcaatgaatttattataactcagcatcctctgccacatactacgaaagatttctggcgaatgatttgggatcataacgcacagatcattgtcatgctgccagacaaccagagcttggcagaagatgagtttgtgtactggccaagtcgagaagaatccatgaactgtgaggcctttaccgtcacccttatcagcaaagacagactgtgcctctctaatgaagaacaaattatcatccatgactttatccttgaagctacacaggatgactatgtcttagaagttcggcactttcagtgtcccaaatggcctaacccagatgcccccataagtagtacctttgaacttatcaacgtcatcaaggaagaggccttaacaagggatggtcccaccattgttcatgatgagtatggagcagtttcagcaggaatgttatgtgcccttaccaccctgtcccagcaactggagaatgaaaatgctgtggatgttttccaggttgcaaaaatgatcaatcttatgaggcctggagtattcacagacattgaacaataccagttcatctataaagcaatgcttagcttggtcagcactaaagaaaatggaaatggtcccatgacagtagacaaaaatggtgctgttcttattgcagatgaatcagaccctgctgagagcatggagtccctagtgtgactggaatcctgaaagggcacttaatttgtaaacttctgaagactgagaacttttttgaggccttttttgccagactctaggttatacaataacccagttacttttttacactgataaaagttttgatatttattttttgccattttatgtcttaatggtatcctactgagcatttgcacctctgttcatttcacacagtgaaacgcaattttacctagtttgcactatatgatcagtgttactgcctataatcttatacaacagcaaaccctgatgtgacattccatgacgacatacatgctacttttttttagttcaatacagtgaaggtctttgttatgacagtgaatattgcttttattattattattgctgaagtggttgcattctactagcaggcaatgctgtacttttcttcagtcctcctctcctttttattttaggcactgttcaatactgtatgccttctgtattttaatggagtggatagcattgttttcttttacagactagcaggctactgggacctaaaaaggtctgttaatgtcatggccttgaaacagttccatttatgctggttaagagatcccttaagaagttagaaggcttaagaactgcttcatgtgaacatcccttattagttacaaagttatattcacagttttttaaaaatgtgtcaaaataaaggataactctgtattacagctttcacagtagctatgtggacaatgtgttatttccattttgactctctaaaatagctacatcctaaaatcagggctatctttaacaatagcaagatagcaatattatatacaactcagttatgagaccctttagttattctccattaatgcttcttagtttgtaataccatacctcacagtaggtagaagaatgaaaacttctgcaggtgtgtaattttgaaactagtcctctaaaaattccctattactcctatagcaatctaataaaaactacctacatagttactgttttctttccttctttgccaaatgttttataataaatctcttaattacatacatttttctacttaagattaaattggaaatactgtattagcaaaagtcttgggactatctaaactcccacacatagataaatctgatttggagagagaaatttaaaatatttaattaaaggtgatacccacattttcaagtttttaaaagagggagatggctttgtatgcttttgtgtagtttagaacagatacacattagtaaaagataccaataatcattagagctcaaggaagttattaggtgcagcctctggagccatactcacgctgcagtgcataatgggaaaattaggagcattaataagaaat

SEQ ID NO: 290423 - DNA, 6244 bp, Homo sapiens
  misc_feature (347)..(347): n is a, c, g, or t
  misc_feature (402)..(402): n is a, c, g, or t
  misc_feature (457)..(457): n is a, c, g, or t
cgctgcaaatgccagggcagtgaagccgaacagaaaaccccatcgctttaaaaaggcagctgtccgccctccccctttcccctcgccaggcgaggcccctcaagtccgggatccgcgagctgcgcggaggatctcgccaaacccgagcaccgtgcggcgtcttttaagagctcgaacaacgggaatccagcaaaaaacaagccggccccagaaggcagcctccctcctctctccgcgcacgggctacaatcgcccccagtccccaaactgtcccagtagaggccgcgcggagagagcagagccgagggacccagcgcaaggcgggagccaagcgcggctgctttaanaacgcggagagcgcgcgcccgccgccagctggcccgggctgcgcgcccccgccgncaccgcgcgccccctgttcgctcgctccttcgctcgccggctttaaagtctctgncaggatccatgctcacatgttacttcctgtatggaggcatggccagtttccagccccgcgctcttcgttccttcccagcctgcgccggagccacaactttcaggagcatggactgaaggcgccctcgccccagcgcccctctgagatcctttgtgttttcctccgtttcctccggccgtttctattttggggggctctccgctccccctgcctctcccctccccttcccctctcgcaaacatgcctccttccttcccggggccctggaaggagctgcctgcctgaagcccggagacgccgcgccgcgctcagccccgccgccgcccgccggctctcgggctgtgctgcgctgccgactcaagttggggatcctcggctgctcgccgccgccgcccgcggtccctgcctgccccaggcccggggcatcgccgccggccgccgactccgcgccctgcccgatcggctctctcctttttaaacggaaagcagcctttctccgccgagaggatcgtccccagcgtggctctgcgttcccggtcactttttgagattttccggggggcgctcggcggcttcccggattccaaggggactcgggccgccgagcgcggggggcccgtggagcgggcgagccggggaagcgccccggcttagcggaggctcgcacggaggcaagaacttattcaacaagtttacctccctgctttcctcttttcgatgtgcgttttcggacatgcggaggttactggaaccgtgttggtggattttgttcctgaaaatcaccagttccgtgctccattatgtcgtgtgcttccccgcgttgacagaaggctacgttggggccctgcacgagaatagacacggcagcgcagtgcagatccgcaggcgcaaggcttcaggcgacccgtactgggcctactctggtgcctatggtcctgagcactgggtcacgtctagtgtcagctgtgggggccgtcaccagtctcctattgacattttagaccagtatgcgcgtgttggggaagaataccaggaactgcaactcgatggcttcgacaatgagtcttctaacaaaacctggatgaaaaacacagggaaaacagtcgccatccttctgaaagacgactattttgtcagtggagctggtctacctggcagattcaaagctgagaaggtggaatttcactggggccacagcaatggctcagcgggctctgaacacagcatcaatggcaggaggtttcctgttgagatgcagattttcttttacaatccagatgactttgacagctttcaaaccgcaatttctgagaacagaataatcggagccatggccatattttttcaagtcagtccgagggacaattctgcactggatcctattatccacgggttgaagggtgtcgtacatcatgagaaggagacctttctggatcctttcgtcctccgggacctcctgcctgcatccctgggcagctattatcggtacacaggttccttgaccacaccaccgtgtagcgaaatagtggagtggatagtcttccggagacccgtccccatctcttaccatcagcttgaggctttttattccatcttcaccacggagcagcaagaccatgtcaagtcggtggagtatctgagaaataactttcgaccacagcagcgtctgcatgacagggtggtgtccaagtccgccgtccgtgactcctggaaccacgacatgacagacttcttagaaaacccactggggacagaagcctctaaagtttgcagctctccacccatccacatgaaggtgcagcctctgaaccagacggcactgcaggtgtcctggagccagccggagactatctaccacccacccatcatgaactacatgatctcctacagctggaccaagaatgaggacgagaaggagaagacgtttacaaaggacagcgacaaagacttgaaagccaccattagccatgtctcacccgatagcctttacctgttccgagtccaggccgtgtgtcggaacgacatgcgcagcgactttagccagacgatgctgtttcaagctaataccactcgaatattccaagggaccagaatagtgaaaacaggagtgcccacagcgtctcctgcctcttcagccgacatggcccccatcagctcggggtcttctacctggacgtcctctggcatcccattctcatttgtttccatggcaactgggatgggcccctcctccagtggcagccaggccacagtggcctcggtggtcaccagcacgctgctcgccggcctggggttcggcggtggtggcatctcctctttccccagcactgtgtggcccacgcgcctcccgacggccgcctcagccagcaagcaggcggctaggccagtcctagccaccacagaggccttggcttctccagggcccgatggtgattcgtcaccaaccaaggacggcgagggcaccgaggaaggagagaaggatgagaaaagcgagagtgaggatggggagcgggagcacgaggaggatggagagaaggactccgaaaagaaggagaagagtggggtgacccacgctgccgaggagcggaatcagacggagcccagccccacaccctcgtctcctaacaggactgccgagggagggcatcagactatacctgggcatgagcaggatcacactgccgtccccacagaccagacgggcggaaggagggatgccggcccaggcctggaccccgacatggtcacctccacccaagtgccccccaccgccacagaggagcagtatgcagggagtgatcccaagaggcccgaaatgccatctaaaaagcctatgtcccgcggggaccgattttctgaagacagcagatttatcactgttaatccagcggaaaaaaacacctctggaatgataagccgccctgctccagggaggatggagtggatcatccctctgattgtggtatcagccttgaccttcgtgtgcctcatccttctcattgctgtgctcgtttactggagagggtgtaacaaaataaagtccaagggctttcccagacgtttccgtgaagtgccttcttctggggagagaggagagaaggggagcagaaaatgttttcagactgctcatttctatgtggaagacagcagttcacctcgagtggtccctaatgaaagtattcctattattcctattccggatgacatggaagccattcctgtcaaacagtttgtcaaacacatcggtgagctctattctaataaccagcatgggttctctgaggattttgaggaagtccagcgctgtactgctgatatgaacatcactgcagagcattccaatcatccagaaaacaagcacaaaaacagatacatcaacattttagcatatgatcacagtagggtgaagttaagacctttaccaggaaaagactctaagcacagcgactacattaatgcaaactatgttgatggttacaacaaagcaaaagcctacattgccacccaaggacctttgaagtctacatttgaagatttctggaggatgatttgggaacaaaacactggaatcattgtgatgattacgaaccttgtggaaaaaggaagacgaaaatgtgatcagtattggccaacagagaacagtgaggaatatggaaacattattgtcacgctgaagagcacaaaaatacatgcctgctacactgttcgtcgtttttcaatcagaaatacaaaagtgaaaaagggtcagaagggaaatcccaagggtcgtcagaatgaaagggtagtgatccagtatcactatacacagtggcctgacatgggagttcccgagtatgcccttccagtactgactttcgtgaggagatcctcagcagctcggatgccagaaacgggccctgtgttggtgcactgcagtgctggtgtgggcagaacaggcacctatattgtaatagacagcatgctgcaacagataaaagacaaaagcacagttaacgtcctgggattcctgaagcatatcaggacacagcgtaactacctcgtccagactgaggagcagtacattttcatccatgatgccttgttggaagccattcttggaaaggagactgaagtatcttcaaatcagctgcacagctatgttaacagcatccttataccaggagtaggaggaaagacacgactggaaaagcaattcaagctggtcacacagtgtaatgcaaaatatgtggaatgtttcagtgctcagaaagagtgtaacaaagaaaagaacagaaactcttcagttgtgccatctgagcgtgctcgagtgggtcttgcaccattgcctggaatgaaaggaacagattacattaatgcttcttatatcatgggctattataggagcaatgaatttattataactcagcatcctctgccacatactacgaaagatttctggcgaatgatttgggatcataacgcacagatcattgtcatgctgccagacaaccagagcttggcagaagatgagtttgtgtactggccaagtcgagaagaatccatgaactgtgaggcctttaccgtcacccttatcagcaaagacagactgtgcctctctaatgaagaacaaattatcatccatgactttatccttgaagctacacaggatgactatgtcttagaagttcggcactttcagtgtcccaaatggcctaacccagatgcccccataagtagtacctttgaacttatcaacgtcatcaaggaagaggccttaacaagggatggtcccaccattgttcatgatgagtatggagcagtttcagcaggaatgttatgtgcccttaccaccctgtcccagcaactggagaatgaaaatgctgtggatgttttccaggttgcaaaaatgatcaatcttatgaggcctggagtattcacagacattgaacaataccagttcatctataaagcaatgcttagcttggtcagcactaaagaaaatggaaatggtcccatgacagtagacaaaaatggtgctgttcttattgcagatgaatcagaccctgctgagagcatggagtccctagtgtgactggaatcctgaaagggcacttaatttgtaaacttctgaagactgagaacttttttgaggccttttttgccagactctaggttatacaataacccagttacttttttacactgataaaagttttgatatttattttttgccattttatgtcttaatggtatcctactgagcatttgcacctctgttcatttcacacagtgaaacgcaattttacctagtttgcactatatgatcagtgttactgcctataatcttatacaacagcaaaccctgatgtgacattccatgacgacatacatgctacttttttttagttcaatacagtgaaggtctttgttatgacagtgaatattgcttttattattattattgctgaagtggttgcattctactagcaggcaatgctgtacttttcttcagtcctcctctcctttttattttaggcactgttcaatactgtatgccttctgtattttaatggagtggatagcattgttttcttttacagactagcaggctactgggacctaaaaaggtctgttaatgtcatggccttgaaacagttccatttatgctggttaagagatcccttaagaagttagaaggcttaagaactgcttcatgtgaacatcccttattagttacaaagttatattcacagttttttaaaaatgtgtcaaaataaaggataactctgtattacagctttcacagta

SEQ ID NO: 290424 - DNA, 6798 bp, Homo sapiens
  misc_feature (347)..(347): n is a, c, g, or t
  misc_feature (402)..(402): n is a, c, g, or t
  misc_feature (457)..(457): n is a, c, g, or t
cgctgcaaatgccagggcagtgaagccgaacagaaaaccccatcgctttaaaaaggcagctgtccgccctccccctttcccctcgccaggcgaggcccctcaagtccgggatccgcgagctgcgcggaggatctcgccaaacccgagcaccgtgcggcgtcttttaagagctcgaacaacgggaatccagcaaaaaacaagccggccccagaaggcagcctccctcctctctccgcgcacgggctacaatcgcccccagtccccaaactgtcccagtagaggccgcgcggagagagcagagccgagggacccagcgcaaggcgggagccaagcgcggctgctttaanaacgcggagagcgcgcgcccgccgccagctggcccgggctgcgcgcccccgccgncaccgcgcgccccctgttcgctcgctccttcgctcgccggctttaaagtctctgncaggatccatgctcacatgttacttcctgtatggaggcatggccagtttccagccccgcgctcttcgttccttcccagcctgcgccggagccacaactttcaggagcatggactgaaggcgccctcgccccagcgcccctctgagatcctttgtgttttcctccgtttcctccggccgtttctattttggggggctctccgctccccctgcctctcccctccccttcccctctcgcaaacatgcctccttccttcccggggccctggaaggagctgcctgcctgaagcccggagacgccgcgccgcgctcagccccgccgccgcccgccggctctcgggctgtgctgcgctgccgactcaagttggggatcctcggctgctcgccgccgccgcccgcggtccctgcctgccccaggcccggggcatcgccgccggccgccgactccgcgccctgcccgatcggctctctcctttttaaacggaaagcagcctttctccgccgagaggatcgtccccagcgtggctctgcgttcccggtcactttttgagattttccggggggcgctcggcggcttcccggattccaaggggactcgggccgccgagcgcggggggcccgtggagcgggcgagccggggaagcgccccggcttagcggaggctcgcacggaggcaagaacttattcaacaagtttacctccctgctttcctcttttcgatgtgcgttttcggacatgcggaggttactggaaccgtgttggtggattttgttcctgaaaatcaccagttccgtgctccattatgtcgtgtgcttccccgcgttgacagaaggctacgttggggccctgcacgagaatagacacggcagcgcagtgcagatccgcaggcgcaaggcttcaggcgacccgtactgggcctactctggtgcctatggtcctgagcactgggtcacgtctagtgtcagctgtgggggccgtcaccagtctcctattgacattttagaccagtatgcgcgtgttggggaagaataccaggaactgcaactcgatggcttcgacaatgagtcttctaacaaaacctggatgaaaaacacagggaaaacagtcgccatccttctgaaagacgactattttgtcagtggagctggtctacctggcagattcaaagctgagaaggtggaatttcactggggccacagcaatggctcagcgggctctgaacacagcatcaatggcaggaggtttcctgttgagatgcagattttcttttacaatccagatgactttgacagctttcaaaccgcaatttctgagaacagaataatcggagccatggccatattttttcaagtcagtccgagggacaattctgcactggatcctattatccacgggttgaagggtgtcgtacatcatgagaaggagacctttctggatcctttcgtcctccgggacctcctgcctgcatccctgggcagctattatcggtacacaggttccttgaccacaccaccgtgtagcgaaatagtggagtggatagtcttccggagacccgtccccatctcttaccatcagcttgaggctttttattccatcttcaccacggagcagcaagaccatgtcaagtcggtggagtatctgagaaataactttcgaccacagcagcgtctgcatgacagggtggtgtccaagtccgccgtccgtgactcctggaaccacgacatgacagacttcttagaaaacccactggggacagaagcctctaaagtttgcagctctccacccatccacatgaaggtgcagcctctgaaccagacggcactgcaggtgtcctggagccagccggagactatctaccacccacccatcatgaactacatgatctcctacagctggaccaagaatgaggacgagaaggagaagacgtttacaaaggacagcgacaaagacttgaaagccaccattagccatgtctcacccgatagcctttacctgttccgagtccaggccgtgtgtcggaacgacatgcgcagcgactttagccagacgatgctgtttcaagctaataccactcgaatattccaagggaccagaatagtgaaaacaggagtgcccacagcgtctcctgcctcttcagccgacatggcccccatcagctcggggtcttctacctggacgtcctctggcatcccattctcatttgtttccatggcaactgggatgggcccctcctccagtggcagccaggccacagtggcctcggtggtcaccagcacgctgctcgccggcctggggttcggcggtggtggcatctcctctttccccagcactgtgtggcccacgcgcctcccgacggccgcctcagccagcaagcaggcggctaggccagtcctagccaccacagaggccttggcttctccagggcccgatggtgattcgtcaccaaccaaggacggcgagggcaccgaggaaggagagaaggatgagaaaagcgagagtgaggatggggagcgggagcacgaggaggatggagagaaggactccgaaaagaaggagaagagtggggtgacccacgctgccgaggagcggaatcagacggagcccagccccacaccctcgtctcctaacaggactgccgagggagggcatcagactatacctgggcatgagcaggatcacactgccgtccccacagaccagacgggcggaaggagggatgccggcccaggcctggaccccgacatggtcacctccacccaagtgccccccaccgccacagaggagcagtatgcagggagtgatcccaagaggcccgaaatgccatctaaaaagcctatgtcccgcggggaccgattttctgaagacagcagatttatcactgttaatccagcggaaaaaaacacctctggaatgataagccgccctgctccagggaggatggagtggatcatccctctgattgtggtatcagccttgaccttcgtgtgcctcatccttctcattgctgtgctcgtttactggagaaaatgttttcagactgctcatttctatgtggaagacagcagttcacctcgagtggtccctaatgaaagtattcctattattcctattccggatgacatggaagccattcctgtcaaacagtttgtcaaacacatcggtgagctctattctaataaccagcatgggttctctgaggattttgaggaagtccagcgctgtactgctgatatgaacatcactgcagagcattccaatcatccagaaaacaagcacaaaaacagatacatcaacattttagcatatgatcacagtagggtgaagttaagacctttaccaggaaaagactctaagcacagcgactacattaatgcaaactatgttgatggttacaacaaagcaaaagcctacattgccacccaaggacctttgaagtctacatttgaagatttctggaggatgatttgggaacaaaacactggaatcattgtgatgattacgaaccttgtggaaaaaggaagacgaaaatgtgatcagtattggccaacagagaacagtgaggaatatggaaacattattgtcacgctgaagagcacaaaaatacatgcctgctacactgttcgtcgtttttcaatcagaaatacaaaagtgaaaaagggtcagaagggaaatcccaagggtcgtcagaatgaaagggtagtgatccagtatcactatacacagtggcctgacatgggagttcccgagtatgcccttccagtactgactttcgtgaggagatcctcagcagctcggatgccagaaacgggccctgtgttggtgcactgcagtgctggtgtgggcagaacaggcacctatattgtaatagacagcatgctgcaacagataaaagacaaaagcacagttaacgtcctgggattcctgaagcatatcaggacacagcgtaactacctcgtccagactgaggagcagtacattttcatccatgatgccttgttggaagccattcttggaaaggagactgaagtatcttcaaatcagctgcacagctatgttaacagcatccttataccaggagtaggaggaaagacacgactggaaaagcaattcaagctggtcacacagtgtaatgcaaaatatgtggaatgtttcagtgctcagaaagagtgtaacaaagaaaagaacagaaactcttcagttgtgccatctgagcgtgctcgagtgggtcttgcaccattgcctggaatgaaaggaacagattacattaatgcttcttatatcatgggctattataggagcaatgaatttattataactcagcatcctctgccacatactacgaaagatttctggcgaatgatttgggatcataacgcacagatcattgtcatgctgccagacaaccagagcttggcagaagatgagtttgtgtactggccaagtcgagaagaatccatgaactgtgaggcctttaccgtcacccttatcagcaaagacagactgtgcctctctaatgaagaacaaattatcatccatgactttatccttgaagctacacaggatgactatgtcttagaagttcggcactttcagtgtcccaaatggcctaacccagatgcccccataagtagtacctttgaacttatcaacgtcatcaaggaagaggccttaacaagggatggtcccaccattgttcatgatgagtatggagcagtttcagcaggaatgttatgtgcccttaccaccctgtcccagcaactggagaatgaaaatgctgtggatgttttccaggttgcaaaaatgatcaatcttatgaggcctggagtattcacagacattgaacaataccagttcatctataaagcaatgcttagcttggtcagcactaaagaaaatggaaatggtcccatgacagtagacaaaaatggtgctgttcttattgcagatgaatcagaccctgctgagagcatggagtccctagtgtgactggaatcctgaaagggcacttaatttgtaaacttctgaagactgagaacttttttgaggccttttttgccagactctaggttatacaataacccagttacttttttacactgataaaagttttgatatttattttttgccattttatgtcttaatggtatcctactgagcatttgcacctctgttcatttcacacagtgaaacgcaattttacctagtttgcactatatgatcagtgttactgcctataatcttatacaacagcaaaccctgatgtgacattccatgacgacatacatgctacttttttttagttcaatacagtgaaggtctttgttatgacagtgaatattgcttttattattattattgctgaagtggttgcattctactagcaggcaatgctgtacttttcttcagtcctcctctcctttttattttaggcactgttcaatactgtatgccttctgtattttaatggagtggatagcattgttttcttttacagactagcaggctactgggacctaaaaaggtctgttaatgtcatggccttgaaacagttccatttatgctggttaagagatcccttaagaagttagaaggcttaagaactgcttcatgtgaacatcccttattagttacaaagttatattcacagttttttaaaaatgtgtcaaaataaaggataactctgtattacagctttcacagtagctatgtggacaatgtgttatttccattttgactctctaaaatagctacatcctaaaatcagggctatctttaacaatagcaagatagcaatattatatacaactcagttatgagaccctttagttattctccattaatgcttcttagtttgtaataccatacctcacagtaggtagaagaatgaaaacttctgcaggtgtgtaattttgaaactagtcctctaaaaattccctattactcctatagcaatctaataaaaactacctacatagttactgttttctttccttctttgccaaatgttttataataaatctcttaattacatacatttttctacttaagattaaattggaaatactgtattagcaaaagtcttgggactatctaaactcccacacatagataaatctgatttggagagagaaatttaaaatatttaattaaaggtgatacccacattttcaagtttttaaaagagggagatggctttgtatgcttttgtgtagtttagaacagatacacattagtaaaagataccaataatcattagagctcaaggaagttattaggtgcagcctctggagccatactcacgctgcagtgcataatgggaaaattaggagcattaataagaaat

SEQ ID NO: 290425 - DNA, 3441 bp, Homo sapiens
gtcgggaggatccctcgtccctaggtatctagagagggtgtaacaaaataaagtccaagggctttcccagacgtttccgtgaagtgccttcttctggggagagaggagagaaggggagcagaaaatgttttcagactgctcatttctatgtggaagacagcagttcacctcgagtggtccctaatgaaagtattcctattattcctattccggatgacatggaagccattcctgtcaaacagtttgtcaaacacatcggtgagctctattctaataaccagcatgggttctctgaggattttgaggaagtccagcgctgtactgctgatatgaacatcactgcagagcattccaatcatccagaaaacaagcacaaaaacagatacatcaacattttagcatatgatcacagtagggtgaagttaagacctttaccaggaaaagactctaagcacagcgactacattaatgcaaactatgttgatggttacaacaaagcaaaagcctacattgccacccaaggacctttgaagtctacatttgaagatttctggaggatgatttgggaacaaaacactggaatcattgtgatgattacgaaccttgtggaaaaaggaagacgaaaatgtgatcagtattggccaacagagaacagtgaggaatatggaaacattattgtcacgctgaagagcacaaaaatacatgcctgctacactgttcgtcgtttttcaatcagaaatacaaaagtgaaaaagggtcagaagggaaatcccaagggtcgtcagaatgaaagggtagtgatccagtatcactatacacagtggcctgacatgggagttcccgagtatgcccttccagtactgactttcgtgaggagatcctcagcagctcggatgccagaaacgggccctgtgttggtgcactgcagtgctggtgtgggcagaacaggcacctatattgtaatagacagcatgctgcaacagataaaagacaaaagcacagttaacgtcctgggattcctgaagcatatcaggacacagcgtaactacctcgtccagactgaggagcagtacattttcatccatgatgccttgttggaagccattcttggaaaggagactgaagtatcttcaaatcagctgcacagctatgttaacagcatccttataccaggagtaggaggaaagacacgactggaaaagcaattcaagctggtcacacagtgtaatgcaaaatatgtggaatgtttcagtgctcagaaagagtgtaacaaagaaaagaacagaaactcttcagttgtgccatctgagcgtgctcgagtgggtcttgcaccattgcctggaatgaaaggaacagattacattaatgcttcttatatcatgggctattataggagcaatgaatttattataactcagcatcctctgccacatactacgaaagatttctggcgaatgatttgggatcataacgcacagatcattgtcatgctgccagacaaccagagcttggcagaagatgagtttgtgtactggccaagtcgagaagaatccatgaactgtgaggcctttaccgtcacccttatcagcaaagacagactgtgcctctctaatgaagaacaaattatcatccatgactttatccttgaagctacacaggatgactatgtcttagaagttcggcactttcagtgtcccaaatggcctaacccagatgcccccataagtagtacctttgaacttatcaacgtcatcaaggaagaggccttaacaagggatggtcccaccattgttcatgatgagtatggagcagtttcagcaggaatgttatgtgcccttaccaccctgtcccagcaactggagaatgaaaatgctgtggatgttttccaggttgcaaaaatgatcaatcttatgaggcctggagtattcacagacattgaacaataccagttcatctataaagcaatgcttagcttggtcagcactaaagaaaatggaaatggtcccatgacagtagacaaaaatggtgctgttcttattgcagatgaatcagaccctgctgagagcatggagtccctagtgtgactggaatcctgaaagggcacttaatttgtaaacttctgaagactgagaacttttttgaggccttttttgccagactctaggttatacaataacccagttacttttttacactgataaaagttttgatatttattttttgccattttatgtcttaatggtatcctactgagcatttgcacctctgttcatttcacacagtgaaacgcaattttacctagtttgcactatatgatcagtgttactgcctataatcttatacaacagcaaaccctgatgtgacattccatgacgacatacatgctacttttttttagttcaatacagtgaaggtctttgttatgacagtgaatattgcttttattattattattgctgaagtggttgcattctactagcaggcaatgctgtacttttcttcagtcctcctctcctttttattttaggcactgttcaatactgtatgccttctgtattttaatggagtggatagcattgttttcttttacagactagcaggctactgggacctaaaaaggtctgttaatgtcatggccttgaaacagttccatttatgctggttaagagatcccttaagaagttagaaggcttaagaactgcttcatgtgaacatcccttattagttacaaagttatattcacagttttttaaaaatgtgtcaaaataaaggataactctgtattacagctttcacagtagctatgtggacaatgtgttatttccattttgactctctaaaatagctacatcctaaaatcagggctatctttaacaatagcaagatagcaatattatatacaactcagttatgagaccctttagttattctccattaatgcttcttagtttgtaataccatacctcacagtaggtagaagaatgaaaacttctgcaggtgtgtaattttgaaactagtcctctaaaaattccctattactcctatagcaatctaataaaaactacctacatagttactgttttctttccttctttgccaaatgttttataataaatctcttaattacatacatttttctacttaagattaaattggaaatactgtattagcaaaagtcttgggactatctaaactcccacacatagataaatctgatttggagagagaaatttaaaatatttaattaaaggtgatacccacattttcaagtttttaaaagagggagatggctttgtatgcttttgtgtagtttagaacagatacacattagtaaaagataccaataatcattagagctcaaggaagttattaggtgcagcctctggagccatactcacgctgcagtgcataatgggaaaattaggagcattaataagaaat

SEQ ID NO: 290426 - DNA, 4930 bp, Homo sapiens
  misc_feature (347)..(347): n is a, c, g, or t
  misc_feature (402)..(402): n is a, c, g, or t
  misc_feature (457)..(457): n is a, c, g, or t
cgctgcaaatgccagggcagtgaagccgaacagaaaaccccatcgctttaaaaaggcagctgtccgccctccccctttcccctcgccaggcgaggcccctcaagtccgggatccgcgagctgcgcggaggatctcgccaaacccgagcaccgtgcggcgtcttttaagagctcgaacaacgggaatccagcaaaaaacaagccggccccagaaggcagcctccctcctctctccgcgcacgggctacaatcgcccccagtccccaaactgtcccagtagaggccgcgcggagagagcagagccgagggacccagcgcaaggcgggagccaagcgcggctgctttaanaacgcggagagcgcgcgcccgccgccagctggcccgggctgcgcgcccccgccgncaccgcgcgccccctgttcgctcgctccttcgctcgccggctttaaagtctctgncaggatccatgctcacatgttacttcctgtatggaggcatggccagtttccagccccgcgctcttcgttccttcccagcctgcgccggagccacaactttcaggagcatggactgaaggcgccctcgccccagcgcccctctgagatcctttgtgttttcctccgtttcctccggccgtttctattttggggggctctccgctccccctgcctctcccctccccttcccctctcgcaaacatgcctccttccttcccggggccctggaaggagctgcctgcctgaagcccggagacgccgcgccgcgctcagccccgccgccgcccgccggctctcgggctgtgctgcgctgccgactcaagttggggatcctcggctgctcgccgccgccgcccgcggtccctgcctgccccaggcccggggcatcgccgccggccgccgactccgcgccctgcccgatcggctctctcctttttaaacggaaagcagcctttctccgccgagaggatcgtccccagcgtggctctgcgttcccggtcactttttgagattttccggggggcgctcggcggcttcccggattccaaggggactcgggccgccgagcgcggggggcccgtggagcgggcgagccggggaagcgccccggcttagcggaggctcgcacggaggcaagaacttattcaacaagtttacctccctgctttcctcttttcgatgtgcgttttcggacatgcggaggttactggaaccgtgttggtggattttgttcctgaaaatcaccagttccgtgctccattatgtcgtgtgcttccccgcgttgacagaaggctacgttggggccctgcacgagaatagacacggcagcgcagtgcagatccgcaggcgcaaggcttcaggcgacccgtactgggcctactctggtgcctatggtcctgagcactgggtcacgtctagtgtcagctgtgggggccgtcaccagtctcctattgacattttagaccagtatgcgcgtgttggggaagaataccaggaactgcaactcgatggcttcgacaatgagtcttctaacaaaacctggatgaaaaacacagggaaaacagtcgccatccttctgaaagacgactattttgtcagtggagctggtctacctggcagattcaaagctgagaaggtggaatttcactggggccacagcaatggctcagcgggctctgaacacagcatcaatggcaggaggtttcctgttgagatgcagattttcttttacaatccagatgactttgacagctttcaaaccgcaatttctgagaacagaataatcggagccatggccatattttttcaagtcagtccgagggacaattctgcactggatcctattatccacgggttgaagggtgtcgtacatcatgagaaggagacctttctggatcctttcgtcctccgggacctcctgcctgcatccctgggcagctattatcggtacacaggttccttgaccacaccaccgtgtagcgaaatagtggagtggatagtcttccggagacccgtccccatctcttaccatcagcttgaggctttttattccatcttcaccacggagcagcaagaccatgtcaagtcggtggagtatctgagaaataactttcgaccacagcagcgtctgcatgacagggtggtgtccaagtccgccgtccgtgactcctggaaccacgacatgacagacttcttagaaaacccactggggacagaagcctctaaagtttgcagctctccacccatccacatgaaggtgcagcctctgaaccagacggcactgcaggtgtcctggagccagccggagactatctaccacccacccatcatgaactacatgatctcctacagctggaccaagaatgaggacgagaaggagaagacgtttacaaaggacagcgacaaagacttgaaagccaccattagccatgtctcacccgatagcctttacctgttccgagtccaggccgtgtgtcggaacgacatgcgcagcgactttagccagacgatgctgtttcaagctaataccactcgaatattccaagggaccagaatagtgaaaacaggagtgcccacagcgtctcctgcctcttcagccgacatggcccccatcagctcggggtcttctacctggacgtcctctggcatcccattctcatttgtttccatggcaactgggatgggcccctcctccagtggcagccaggccacagtggcctcggtggtcaccagcacgctgctcgccggcctggggttcggcggtggtggcatctcctctttccccagcactgtgtggcccacgcgcctcccgacggccgcctcagccagcaagcaggcggctaggccagtcctagccaccacagaggccttggcttctccagggcccgatggtgattcgtcaccaaccaaggacggcgagggcaccgaggaaggagagaaggatgagaaaagcgagagtgaggatggggagcgggagcacgaggaggatggagagaaggactccgaaaagaaggagaagagtggggtgacccacgctgccgaggagcggaatcagacggagcccagccccacaccctcgtctcctaacaggactgccgagggagggcatcagactatacctgggcatgagcaggatcacactgccgtccccacagaccagacgggcggaaggagggatgccggcccaggcctggaccccgacatggtcacctccacccaagtgccccccaccgccacagaggagcagtatgcagggagtgatcccaagaggcccgaaatgccatctaaaaagcctatgtcccgcggggaccgattttctgaagacagcagatttatcactgttaatccagcggaaaaaaacacctctggaatgataagccgccctgctccagggaggatggagtggatcatccctctgattgtggtatcagccttgaccttcgtgtgcctcatccttctcattgctgtgctcgtttactggagaaaatgttttcagactgctcatttctatgtggaagacagcagttcacctcgagtggtccctaatgaaagtattcctattattcctattccggatgacatggaagccattcctgtcaaacagtttgtcaaacacatcggtgagctctattctaataaccagcatgggttctctgaggattttgaggaagtccagcgctgtactgctgatatgaacatcactgcagagcattccaatcatccagaaaacaagcacaaaaacagatacatcaacattttagcatatgatcacagtagggtgaagttaagacctttaccaggaaaagactctaagcacagcgactacattaatgcaaactatgttgatggttacaacaaagcaaaagcctacattgccacccaaggacctttgaagtctacatttgaagatttctggaggatgatttgggaacaaaacactggaatcattgtgatgattacgaaccttgtggaaaaaggaagacgaaaatgtgatcagtattggccaacagagaacagtgaggaatatggaaacattattgtcacgctgaagagcacaaaaatacatgcctgctacactgttcgtcgtttttcaatcagaaatacaaaagtgaaaaagggtcagaagggaaatcccaagggtcgtcagaatgaaagggtagtgatccagtatcactatacacagtggcctgacatgggagttcccgagtatgcccttccagtactgactttcgtgaggagatcctcagcagctcggatgccagaaacgggccctgtgttggtgcactgcagtgctggtgtgggcagaacaggcacctatattgtaatagacagcatgctgcaacagataaaagacaaaagcacagttaacgtcctgggattcctgaagcatatcaggacacagcgtaactacctcgtccagactgaggagcagtacattttcatccatgatgccttgttggaagccattcttggaaaggagactgaagtatcttcaaatcagctgcacagctatgttaacagcatccttataccaggagtaggaggaaagacacgactggaaaagcaattcaagctggtcacacagtgtaatgcaaaatatgtggaatgtttcagtgctcagaaagagtgtaacaaagaaaagaacagaaactcttcagttgtgccatctgagcgtgctcgagtgggtcttgcaccattgcctggaatgaaaggaacagattacattaatgcttcttatatcatgggctattataggagcaatgaatttattataactcagcatcctctgccacatactacgaaagatttctggcgaatgatttgggatcataacgcacagatcattgtcatgctgccagacaaccagagcttggccgaagatgagtttgtgtcggccgcagtctttggcaagaaagggatcctctagaacgccgc

SEQ ID NO: 290427 - DNA, 313 bp, Homo sapiens
gcagaagatgagtttgtgtactggccaagtcgagaagaatccatgaactgtgaggcctttaccgtcacccttatcagcaaagacagactgtgcctctctaatgaagaacaaattatcatccatgactttatccttgaagctacacaggtaacctaaacctcagttcctcactaatagccatacctgggccctggatcatcattctaagtaataatgaaataatttaccaccctcaagccaggctcaggcatttgagtaagacttaattttaaatatgtacattttccgtttttcttccttcaaatatttgctt

SEQ ID NO: 290428 - DNA, 671 bp, Homo sapiens
agccccgggaggtgcagggcccagtctgcccatctcgaccccagtgctctcctgccaggctgccctccggcccggccccaggtccatcttcatgtactcctcagtgccagtctcttcctctctgggagctggctggagctgggatggacacctgacagaaggaaattaaaattttaagggctaattccccttcattcaagaaatatttactgtgatgaagacatgttccatgcagaggaaatggccaatgcaaagagcccctgactggagggcatttggcacattctaggagagtgaggaggattctatgggccaggaattcagacagggcacagtgttgatggcttgtctgtgtcctggctgggatggctcaaatggttgtgggactatttgacttgaaaggctggagcctggaatcatttgaaacattgttcactcatgtgtctggcacctgcgttagaatgactgaaggctacatcaactagagtacttacatccggtctctccatgtgacttggacttttcacagcgtggaggctggatttcaaaggtcaactgagaatggcagaggactcatcccacctttgccacatggtgacttgccccactcccccaggtgaccttgctcgtgcatgtggatatttgctcagattaagaatgtttcccacaaa

SEQ ID NO: 290429 - DNA, 1147 bp, Homo sapiens
ttatgcttcatgtctttattgaataggttcaaatatgaagacattattggtgaaaaaacaaaaaacaaatagtggacaagaaataatagtcaccacaatcatctttttcaacctaacacaattcagaataatacataagcaatttttacatttttaatcttacaatcatcttttattctaccatactgtcaaatacttgtgaaaataaataaaaataaaatacatgatgcataggaagattttttttaaaactgaactattgcacaaatcaatgtgagaatatgcaagtaatataaaaatgcatttaaatatattgtcacaacatatttcgtaagtcataaatctatttcacctactgtttataatctctgggctctggaactagatgatttcttaccaactcatctccatgtggtacattataacattaatttactactgtaaaattcagtgagaaacaaatgtgtgccaattatttatctatcctttccttgagcagacaaaaagaattatgtggtcttaaaaaatacttgacaaaaaaacagtgctcagtattagataaaacaagtttaaagttctttatatgatttataacagaagtgatttaaatggaaatctaatatatgcattcatcttctaaattcattacagcttattttagttgatggactatttgtttctttgttttgacccataagactgaataaagataactgaggggaaaaaaattaacaactaatcaggaaataaactgtaagtaaaatgaccattcctattaagtttgtaactcctgcccaaactaaactaagctaataaatttcagataaattataagccacaattctttacattgtgtcttatagttgatcagaatcataaacaaaaaaaaaagctaggaattatataagagatttgtttgtacctttacagtaagatcaaagctctcttaggtttgattgaatagaaattactacagaattactgccatcaaggcaatctactactaactactatgatatactgaaagtgacaatgattaagagctgtgtcgtgatcaggttaaagagaacaaaaataattaaatttgtgtgtatgtttaattaggtaagtcaattatgcattaaaacaatacattttcagtggtcct

SEQ ID NO: 290430 - DNA, 2302 bp, Homo sapiens
tttcagtttccacgtcctgcgtttaatttggggtttgattttccaaatacaacacttaccagattaggtggacccacaggattatttttccttgaggtctcacctgagcaggtgcatgtacagcagacggagcagaaagagactgattagagaggttggagtggtagagggcgtgaccctcttaatcattcttcacttccttttttaaaagacgacttggcatcgtccaccacatccgcggcaacgcctccttggtgtcgtccgcttccaataacccagcttgcgtcctgcacacttgtggcttccgtgcacacattaacaactcatggttctagctcccagtcgccaagcgttgccaaggcgttgagagatcatctgggaagtcttttacccagaattgctttgattcaggccagctggtttttcctgcggtgattcggaaattcgcgaattcctctggtcctcatccaggtgcgcgggaagcaggtgcccaggagagaggggataatgaagattccatgctgatgatcccaaagattgaacctgcagaccaagcgcaaagtagaaactgaaagtacactgctggcggatcctacggaagttatggaaaaggcaaagcgcagagccacgccgtagtgtgtgccgccccccttgggatggatgaaactgcagtcgcggcgtgggtaagaggaaccagctgcagagatcaccctgcccaacacagactcggcaactccgcggaagaccagggtcctgggagtgactatgggcggtgagagcttgctcctgctccagttgcggtcatcatgactacgcccgcctcccgcagaccatgttccatgtttcttttaggtatatctttggacttcctcccctgatccttgttctgttgccagtagcatcatctgattgtgatattgaaggtaaagatggcaaacaatatgagagtgttctaatggtcagcatcgatcaattattggacagcatgaaagaaattggtagcaattgcctgaataatgaatttaacttttttaaaagacatatctgtgatgctaataaggaaggtatgtttttattccgtgctgctcgcaagttgaggcaatttcttaaaatgaatagcactggtgattttgatctccacttattaaaagtttcagaaggcacaacaatactgttgaactgcactggccaggttaaaggaagaaaaccagctgccctgggtgaagcccaaccaacaaagagtttggaagaaaataaatctttaaaggaacagaaaaaactgaatgacttgtgtttcctaaagagactattacaagagataaaaacttgttggaataaaattttgatgggcactaaagaacactgaaaaatatggagtggcaatatagaaacacgaactttagctgcatcctccaagaatctatctgcttatgcagtttttcagagtggaatgcttcctagaagttactgaatgcaccatggtcaaaacggattagggcatttgagaaatgcatattgtattactagaagatgaatacaaacaatggaaactgaatgctccagtcaacaaactatttcttatatatgtgaacatttatcaatcagtataattctgtactgatttttgtaagacaatccatgtaaggtatcagttgcaataatacttctcaaacctgtttaaatatttcaagacattaaatctatgaagtatataatggtttcaaagattcaaaattgacattgctttactgtcaaaataattttatggctcactatgaatctattatactgtattaagagtgaaaattgtcttcttctgtgctggagatgttttagagttaacaatgatatatggataatgccggtgagaataagagagtcataaaccttaagtaagcaacagcataacaaggtccaagatacctaaaagagatttcaagagatttaattaatcatgaatgtgtaacacagtgccttcaataaatggtatagcaaatgttttgacatgaaaaaaggacaatttcaaaaaaataaaataaaataaaaataaattcacctagtctaaggatgctaaaccttagtactgagttacattgtcatttatatagattataacttgtctaaataagtttgcaatttgggagatatatttttaagataataatatatgtttaccttttaattaatgaaatatctgtatttaattttgacactatatctgtatataaaatattttcatacagcattacaaattgcttactttggaatacatttctcctttgataaaataaatgagctatgt

SEQ ID NO: 290431 - DNA, 2170 bp, Homo sapiens
tttcagtttccacgtcctgcgtttaatttggggtttgattttccaaatacaacacttaccagattaggtggacccacaggattatttttccttgaggtctcacctgagcaggtgcatgtacagcagacggagcagaaagagactgattagagaggttggagtggtagagggcgtgaccctcttaatcattcttcacttccttttttaaaagacgacttggcatcgtccaccacatccgcggcaacgcctccttggtgtcgtccgcttccaataacccagcttgcgtcctgcacacttgtggcttccgtgcacacattaacaactcatggttctagctcccagtcgccaagcgttgccaaggcgttgagagatcatctgggaagtcttttacccagaattgctttgattcaggccagctggtttttcctgcggtgattcggaaattcgcgaattcctctggtcctcatccaggtgcgcgggaagcaggtgcccaggagagaggggataatgaagattccatgctgatgatcccaaagattgaacctgcagaccaagcgcaaagtagaaactgaaagtacactgctggcggatcctacggaagttatggaaaaggcaaagcgcagagccacgccgtagtgtgtgccgccccccttgggatggatgaaactgcagtcgcggcgtgggtaagaggaaccagctgcagagatcaccctgcccaacacagactcggcaactccgcggaagaccagggtcctgggagtgactatgggcggtgagagcttgctcctgctccagttgcggtcatcatgactacgcccgcctcccgcagaccatgttccatgtttcttttaggtatatctttggacttcctcccctgatccttgttctgttgccagtagcatcatctgattgtgatattgaaggtaaagatggcaaacaatatgagagtgttctaatggtcagcatcgatcaattattggacagcatgaaagaaattggtagcaattgcctgaataatgaatttaacttttttaaaagacatatctgtgatgctaataaggttaaaggaagaaaaccagctgccctgggtgaagcccaaccaacaaagagtttggaagaaaataaatctttaaaggaacagaaaaaactgaatgacttgtgtttcctaaagagactattacaagagataaaaacttgttggaataaaattttgatgggcactaaagaacactgaaaaatatggagtggcaatatagaaacacgaactttagctgcatcctccaagaatctatctgcttatgcagtttttcagagtggaatgcttcctagaagttactgaatgcaccatggtcaaaacggattagggcatttgagaaatgcatattgtattactagaagatgaatacaaacaatggaaactgaatgctccagtcaacaaactatttcttatatatgtgaacatttatcaatcagtataattctgtactgatttttgtaagacaatccatgtaaggtatcagttgcaataatacttctcaaacctgtttaaatatttcaagacattaaatctatgaagtatataatggtttcaaagattcaaaattgacattgctttactgtcaaaataattttatggctcactatgaatctattatactgtattaagagtgaaaattgtcttcttctgtgctggagatgttttagagttaacaatgatatatggataatgccggtgagaataagagagtcataaaccttaagtaagcaacagcataacaaggtccaagatacctaaaagagatttcaagagatttaattaatcatgaatgtgtaacacagtgccttcaataaatggtatagcaaatgttttgacatgaaaaaaggacaatttcaaaaaaataaaataaaataaaaataaattcacctagtctaaggatgctaaaccttagtactgagttacattgtcatttatatagattataacttgtctaaataagtttgcaatttgggagatatatttttaagataataatatatgtttaccttttaattaatgaaatatctgtatttaattttgacactatatctgtatataaaatattttcatacagcattacaaattgcttactttggaatacatttctcctttgataaaataaatgagctatgt

SEQ ID NO: 290432 - DNA, 2246 bp, Homo sapiens
tttcagtttccacgtcctgcgtttaatttggggtttgattttccaaatacaacacttaccagattaggtggacccacaggattatttttccttgaggtctcacctgagcaggtgcatgtacagcagacggagcagaaagagactgattagagaggttggagtggtagagggcgtgaccctcttaatcattcttcacttccttttttaaaagacgacttggcatcgtccaccacatccgcggcaacgcctccttggtgtcgtccgcttccaataacccagcttgcgtcctgcacacttgtggcttccgtgcacacattaacaactcatggttctagctcccagtcgccaagcgttgccaaggcgttgagagatcatctgggaagtcttttacccagaattgctttgattcaggccagctggtttttcctgcggtgattcggaaattcgcgaattcctctggtcctcatccaggtgcgcgggaagcaggtgcccaggagagaggggataatgaagattccatgctgatgatcccaaagattgaacctgcagaccaagcgcaaagtagaaactgaaagtacactgctggcggatcctacggaagttatggaaaaggcaaagcgcagagccacgccgtagtgtgtgccgccccccttgggatggatgaaactgcagtcgcggcgtgggtaagaggaaccagctgcagagatcaccctgcccaacacagactcggcaactccgcggaagaccagggtcctgggagtgactatgggcggtgagagcttgctcctgctccagttgcggtcatcatgactacgcccgcctcccgcagaccatgttccatgtttcttttaggtatatctttggacttcctcccctgatccttgttctgttgccagtagcatcatctgattgtgatattgaaggacagcatgaaagaaattggtagcaattgcctgaataatgaatttaacttttttaaaagacatatctgtgatgctaataaggaaggtatgtttttattccgtgctgctcgcaagttgaggcaatttcttaaaatgaatagcactggtgattttgatctccacttattaaaagtttcagaaggcacaacaatactgttgaactgcactggccaggttaaaggaagaaaaccagctgccctgggtgaagcccaaccaacaaagagtttggaagaaaataaatctttaaaggaacagaaaaaactgaatgacttgtgtttcctaaagagactattacaagagataaaaacttgttggaataaaattttgatgggcactaaagaacactgaaaaatatggagtggcaatatagaaacacgaactttagctgcatcctccaagaatctatctgcttatgcagtttttcagagtggaatgcttcctagaagttactgaatgcaccatggtcaaaacggattagggcatttgagaaatgcatattgtattactagaagatgaatacaaacaatggaaactgaatgctccagtcaacaaactatttcttatatatgtgaacatttatcaatcagtataattctgtactgatttttgtaagacaatccatgtaaggtatcagttgcaataatacttctcaaacctgtttaaatatttcaagacattaaatctatgaagtatataatggtttcaaagattcaaaattgacattgctttactgtcaaaataattttatggctcactatgaatctattatactgtattaagagtgaaaattgtcttcttctgtgctggagatgttttagagttaacaatgatatatggataatgccggtgagaataagagagtcataaaccttaagtaagcaacagcataacaaggtccaagatacctaaaagagatttcaagagatttaattaatcatgaatgtgtaacacagtgccttcaataaatggtatagcaaatgttttgacatgaaaaaaggacaatttcaaaaaaataaaataaaataaaaataaattcacctagtctaaggatgctaaaccttagtactgagttacattgtcatttatatagattataacttgtctaaataagtttgcaatttgggagatatatttttaagataataatatatgtttaccttttaattaatgaaatatctgtatttaattttgacactatatctgtatataaaatattttcatacagcattacaaattgcttactttggaatacatttctcctttgataaaataaatgagctatgt

SEQ ID NO: 290433 - DNA, 2272 bp, Homo sapiens
cctggactgtgaactttcagtgctgctcttttttttcccctccttaggtggtacagggcagccttccaacatgtgaaaaactagaggacccttgagctgggtatttttttccccaggcagatcagactctgataaaacctcagaaggttaggctctggtaaaatagtcacccttgagtttaggccctttaaaggagaacagactattcagctttttagaaattagtattttttttttgagacagggtcttactgtcacccaggctggagtgcagtgatataaatcatggctcactgcagccttgacctcctgggttcaagtgatgctcctatttcaacctgagtagctgggaccaccagcatgtgccaccatgcatggctaatttttttgtaattgtttgtaaagataggatctcactatgttgtccaggctggtctcaaacttctgggctcaagtgatcctcccacctctggcttattttataatagttttttcccctcctcctaccagaagcacaagaggactttctcatctgatacttactgtgaggacctagtagttagagctcctaaagatcaaactcataaaagtatatagcccccacaactatgactgggtacccttggagtttttaattctctaagttgtttcacactgagccttcagcaatttgccaattacagtttaattttttctacccccacaatggttgctatggaggtttctgctcatggatctctgcttcaaatcagccctacaaaaagaaagaaaaaagaacagaaaggaagcagcaatcagctatgagcaataattagacattcgtttgctagctctagcacatgtgaccatgaagagtaactgtgaaccatattgactttctctcctgaaaagaaaaatatgaaaaaaattcagaagaaaactgtcctatcacaaagaatacagaaattgggacagcatgaaagaaattggtagcaattgcctgaataatgaatttaacttttttaaaagacatatctgtgatgctaataaggaaggtatgtttttattccgtgctgctcgcaagttgaggcaatttcttaaaatgaatagcactggtgattttgatctccacttattaaaagtttcagaaggcacaacaatactgttgaactgcactggccaggttaaaggaagaaaaccagctgccctgggtgaagcccaaccaacaaagagtttggaagaaaataaatctttaaaggaacagaaaaaactgaatgacttgtgtttcctaaagagactattacaagagataaaaacttgttggaataaaattttgatgggcactaaagaacactgaaaaatatggagtggcaatatagaaacacgaactttagctgcatcctccaagaatctatctgcttatgcagtttttcagagtggaatgcttcctagaagttactgaatgcaccatggtcaaaacggattagggcatttgagaaatgcatattgtattactagaagatgaatacaaacaatggaaactgaatgctccagtcaacaaactatttcttatatatgtgaacatttatcaatcagtataattctgtactgatttttgtaagacaatccatgtaaggtatcagttgcaataatacttctcaaacctgtttaaatatttcaagacattaaatctatgaagtatataatggtttcaaagattcaaaattgacattgctttactgtcaaaataattttatggctcactatgaatctattatactgtattaagagtgaaaattgtcttcttctgtgctggagatgttttagagttaacaatgatatatggataatgccggtgagaataagagagtcataaaccttaagtaagcaacagcataacaaggtccaagatacctaaaagagatttcaagagatttaattaatcatgaatgtgtaacacagtgccttcaataaatggtatagcaaatgttttgacatgaaaaaaggacaatttcaaaaaaataaaataaaataaaaataaattcacctagtctaaggatgctaaaccttagtactgagttacattgtcatttatatagattataacttgtctaaataagtttgcaatttgggagatatatttttaagataataatatatgtttaccttttaattaatgaaatatctgtatttaattttgacactatatctgtatataaaatattttcatacagcattacaaattgcttactttggaatacatttctcctttgataaaataaatgagctatgt

SEQ ID NO: 290434 - DNA, 1664 bp, Homo sapiens
tttcagtttccacgtcctgcgtttaatttggggtttgattttccaaatacaacacttaccagattaggtggacccacaggattatttttccttgaggtctcacctgagcaggtgcatgtacagcagacggagcagaaagagactgattagagaggttggagtggtagagggcgtgaccctcttaatcattcttcacttccttttttaaaagacgacttggcatcgtccaccacatccgcggcaacgcctccttggtgtcgtccgcttccaataacccagcttgcgtcctgcacacttgtggcttccgtgcacacattaacaactcatggttctagctcccagtcgccaagcgttgccaaggcgttgagagatcatctgggaagtcttttacccagaattgctttgattcaggccagctggtttttcctgcggtgattcggaaattcgcgaattcctctggtcctcatccaggtgcgcgggaagcaggtgcccaggagagaggggataatgaagattccatgctgatgatcccaaagattgaacctgcagaccaagcgcaaagtagaaactgaaagtacactgctggcggatcctacggaagttatggaaaaggcaaagcgcagagccacgccgtagtgtgtgccgccccccttgggatggatgaaactgcagtcgcggcgtgggtaagaggaaccagctgcagagatcaccctgcccaacacagactcggcaactccgcggaagaccagggtcctgggagtgactatgggcggtgagagcttgctcctgctccagttgcggtcatcatgactacgcccgcctcccgcagaccatgttccatgtttcttttaggtatatctttggacttcctcccctgatccttgttctgttgccagtagcatcatctgattgtgatattgaaggacagcatgaaagaaattggtagcaattgcctgaataatgaatttaacttttttaaaagacatatctgtgatgctaataaggaaggtatgtttttattccgtgctgctcgcaagttgaggcaatttcttaaaatgaatagcactggtgattttgatctccacttattaaaagtttcagaaggcacaacaatactgttgaactgcactggccaggttaaaggaagaaaaccagctgccctgggtgaagcccaaccaacaaagagtttgtcctcaggactacagaagcagttcacattttacagatcaaacggacgacacacacattctttccactgcaaattgtcctttctccactagaaggtatcagtttctccaaataaattgtatcaacttgagggcagacacttaattacatcttattatctcgatccccatcattgcatatccagaaagagcacataaagcgtttttcaatgcttattttagttgatggactatttgtttctttgttttgacccataagactgaataaagataactgaggggaaaaaaattaacaactaatcaggaaataaacttttttcggatttatgaaataatttgttgacatgctctacaggagtgaccttaacatacctaatggtaactaaaactgttctctttaattacaaaattcccagcatctatcctactatgatactatctgaagataggcaccaataatacaaatgtttatccaaa

SEQ ID NO: 290435 - DNA, 1416 bp, Homo sapiens
tttcagtttccacgtcctgcgtttaatttggggtttgattttccaaatacaacacttaccagattaggtggacccacaggattatttttccttgaggtctcacctgagcaggtgcatgtacagcagacggagcagaaagagactgattagagaggttggagtggtagagggcgtgaccctcttaatcattcttcacttccttttttaaaagacgacttggcatcgtccaccacatccgcggcaacgcctccttggtgtcgtccgcttccaataacccagcttgcgtcctgcacacttgtggcttccgtgcacacattaacaactcatggttctagctcccagtcgccaagcgttgccaaggcgttgagagatcatctgggaagtcttttacccagaattgctttgattcaggccagctggtttttcctgcggtgattcggaaattcgcgaattcctctggtcctcatccaggtgcgcgggaagcaggtgcccaggagagaggggataatgaagattccatgctgatgatcccaaagattgaacctgcagaccaagcgcaaagtagaaactgaaagtacactgctggcggatcctacggaagttatggaaaaggcaaagcgcagagccacgccgtagtgtgtgccgccccccttgggatggatgaaactgcagtcgcggcgtgggtaagaggaaccagctgcagagatcaccctgcccaacacagactcggcaactccgcggaagaccagggtcctgggagtgactatgggcggtgagagcttgctcctgctccagttgcggtcatcatgactacgcccgcctcccgcagaccatgttccatgtttcttttaggtatatctttggacttcctcccctgatccttgttctgttgccagtagcatcatctgattgtgatattgaaggacagcatgaaagaaattggtagcaattgcctgaataatgaatttaacttttttaaaagacatatctgtgatgctaataaggaaggtatgtttttattccgtgctgctcgcaagttgaggcaatttcttaaaatgaatagcactggtgattttgatctccacttattaaaagtttcagaaggcacaacaatactgttgaactgcactggccaggttaaaggaagaaaaccagctgccctgggtgaagcccaaccaacaaagagtttggtggaactgatcattccttcatgtatgcctccactgctcagctcaacaagtaactcttaataacctaccacctgttatctctgggagagggacatatgtttgccaatttctatcttcaatgcttatcacaaattttcttatatttgaaataatctgattcaaatgagaactttaacctaaaactttaattggaaagacaatcttataaaaatcttataacatattc

SEQ ID NO: 290436 - DNA, 502 bp, Homo sapiens
aagatcgtgccactgcactgcagcctggacaacagcgcaagactccatctcaaaaaaaagaaaaattactggtgaaaaggccatcttccagaataccatgaggttagtggttgctatcttctggggaaagatgcccaactgcatttaatatttccaaactagaaacacaaggccctggtttgaaagcaactcatgatcttctgaatgctattcccctccaccctttgcccttgcccccaagtgcaggggcagtgtagttctacagggctgtcattctacaaatcctggtgccctttaaaaaaaaaaacaaaacaaacaaacaaaaaacggcggtacggtggctcacacctgtaatcccagcctttgggaggctgagatgggcagagcacttgaggtcaggagttcaagacagcctggccaacacagtgaaaccccatctctattaaaaatacaaaaattagccaggcatggtggcacacccctgtaatcccagctactcggg

SEQ ID NO: 290437 - DNA, 451 bp, Homo sapiens
aagatcgtgccactgcactgcagcctggacaacagcgcaagactccatctcaaaaaaaagaaaaattactggtgaaaaggccatcttccagaataccatgagagacaaggtttccctctgtaacccaggctggagtgcagtggaacttctgagctcaagtagtcttcacatctcagccttccaagtagctgtgactagagcttgtgacagtccagccccttcagcctggagttccacctaccagtccccacatgtgctgtctctcaccaaggttgccagtgacctctgaccaaaacaatctttggctccccatcactggcctgtcctatgggaaaacatttgcattccttaactcagcctagaaggcctctgtgacttgctgtctacttatctggcccttctcatgcttcctttctggctgtagcaaccttgaagatatcgtacttcccca

SEQ ID NO: 290438 - DNA, 327 bp, Homo sapiens
aacataatgtaaaacacttcatagtgagagacaaaatgaatgcacgattctctagcaaggccagtattcttcaatcagctttgagaacctacatttcttattttggtaaactactgtcatgtttcctcaattgtgttaattgatctaccaggaagaagacaaaaatgagtttctagtacctttattaagaaaccctgttaagattggaaggctgatggaacctgggtctggaccagatccgtgagatcagagtggtttaacagcttttatggtctgtttttgctgattcttacttttctgtttgtgcctagaagtctggaacgtttt

SEQ ID NO: 290439 - DNA, 660 bp, Homo sapiens
cgtctctacttaaaatacaaaattagcagggtgtggtggtgcatgcctgtaatcccagctacttgggaggctgaggcagaggttgcagtgagatgagatcgtgtcattgcactccagcctgggcaacaacgtgaaactccgtctcaaaaaaaaaaaattgtttcattgttgaataaaaagaaaaataagttatgtcattggtggacagaatcaacttatatctgaataaaataactataccaattaaaactaaagtaggccaggcgtagtggctcacgcctataatcccagcactttgggaggccaaggtgggtggatcatttgcgatcaggagtttgagaccagcgtggccaacatagtgaaaccctgtctctactaaaaatacaaaattagccaggcaaggtggtgggcacctgtagtcccagctacttggaggattgaggcaggagaatcgcttgaacctgggaagcagaggttgcagtgagctgagatcacaccactatactccagcctaggcaagagtaagactccatctcaaaaaaaaaataaaaataaaaataaaataaaaacaaaaactaaagttaaaaggtctggtatactgaactggtaaactaattacaattttgctttccaacctcctcaagtatttaaaagacccaa

SEQ ID NO: 290440 - DNA, 878 bp, Homo sapiens
aaaggcacacgcgcttcccggcgccggcttccggcccggcgaggtttgagcgcgtccgcgggctgggaggccgctggacccgggcgcatggcctcccccgggcagttatctccttgccgcgaccttgaggtcttcggtaagaactggcgttcctctttctaacgccggctttcggccttcgcccttgacgcccaggcccggggaggccgtcactcagaaactgctccatccgagtccgccgcctcggagatgccgagagcctggtcctgccctctgcccccggccccttcctagactcactacttcagaccgtgtgctgtcctggagccagtgaaaccagacgaaattaagggaacagcagacgaaggaactgccaccgtgccccagaccctggtttgcaaatacagttcgacaaagatcttgccaggaattggcctgggagagtccaaaggactgggctgggggtggggaaatgattttagccagaagacaaatatagaggttgtacccagaaggttaagaggcttaggaaggttaagaactacgttaacatttggctcccaggaccccaggtaaagtgcccttggattgaatagatttctgaactccagaaacatttagaggaatcaatagaattagattggcagccattgtgccaatggacaagtgcttactgagccccttaatcccttcactgggtaagcatttgccacacatgtcctcaaaaacctacttgttagcttaagtggactccctcaagttcagaacaggagcaaatagtgtaatcacaagttccgtgtctgaataatcataacaatgtttataaaaataaggacgactgttgaaaactgcaactgcagctgaaccttatgtgccca

SEQ ID NO: 290441 - DNA, 380 bp, Homo sapiens
aaaggcacacgcgcttcccggcgccggcttccggcccggcgaggtttgagcgcgtccgcgggctgggaggccgctggacccgggcgcatggcctcccccgggcagttatctccttgccgcgaccttgaggtcttcggtaagaactggcgttcctctttctaacgccggctttcggccttcgcccttgacgcccaggcccggggaggccgtcactcagaaactgctccatccgagtccgccgcctcggagatgccgagagcctggtcctgccctctgcccccggccccttcctagactcactacttcaggtcactaaaggcgcctcccaccagtttgacttctgttctgcctctgcgccccgctctggcctctcctaagcc

SEQ ID NO: 290442 - DNA, 3692 bp, Homo sapiens
  misc_feature (1)..(1): n is a, c, g, or t
  misc_feature (93)..(93): n is a, c, g, or t
  misc_feature (318)..(318): n is a, c, g, or t
nctcaggatggctacttttctcatcggccgaaagagaaagtgcgaacagacagcaacaacgagaactctgtccccaaagactttgagaatgtngacaacagcaacttcgcacccaggactcaaaagcagaagcaccagcctgagttggcgaagaagccaccgagtagacagaaggagcttttgaaaaggaagctggaacagcaggagaaaggaaaaggacatacattccctgggaaaggccccggtgaggtgctgcctcccggggacagagccgcagccaacagcagccacgggaaggatgtgtccagaccgcctcangccaggaaaactgggggcagctcccccgagaccaagtatgaccagccccctaagtgtgacatctcaggcaaggaggccatctctgccctgtcccgtgctaagtccaagcactgccgccaggagattggggagacttactgccgccacaagttagggctgctgatgcctgagaaggtgactcggttctgccccctcgagggtaaagccaacaagaacgtgcagtgggacgaggactccgtggagtacatgccagccaacccggtcagaatcgcctttgtcctggtggtccacggccgtgcctctcggcagttgcagcgcatgttcaaggccatctaccacaaagaccacttctactacatccacgtggacaagcgctctaattacctgcatcggcaagtgctccaggtctccaggcagtacagcaatgtccgcgtcaccccctggagaatggccaccatctggggaggagccagcctcctgtccacctacctgcagagcatgcgggacctcctggagatgaccgactggccctgggacttcttcatcaacctgagtgcggccgactaccccatcaggacaaatgaccagttggtggcgtttctctcccgataccgagatatgaatttcttgaagtcacacggccgggacaatgcaaggttcattcggaagcagggcctggatcggctcttcctggagtgcgacgctcacatgtggcgcctgggagatcggcggatcccagagggcattgccgtggatggcggttcggactggttcctgctgaaccggaggtttgtagaatatgtgaccttctccacagacgatctggtgaccaagatgaaacagttctactcctacaccctgcttcctgctgagtccttcttccatacggtcctggagaacagcccccactgcgacaccatggtggacaacaacctgcgcatcaccaactggaatcgcaagctgggctgcaagtgccagtacaagcacatcgtggactggtgcggctgctcccccaatgacttcaagccgcaggacttccaccgcttccagcagacagcccggcctaccttctttgcccgcaagtttgaagccgtggtgaatcaggaaatcattgggcagctggactattacctgtacgggaactaccctgcaggtaccccgggcctgcgctcctactgggagaatgtctacgatgagcctgacggcatccacagcctgagcgacgtgacactcaccttgtaccactcctttgcccgcctgggtcttcgacgggccgagacgtccctgcacacggatggggagaacagctgccgatactacccaatgggccacccagcatctgtgcacctctacttccttgctgaccgcttccagggctttctgatcaagcatcatgctaccaatctggctgtgagcaaactagagactctggagacctgggtgatgccgaaaaaagtcttcaagatcgcaagcccacccagtgactttgggaggcttcagttttccgaggtcggcactgactgggatgccaaggagaggctattccgcaactttgggggtcttctggggcccatggatgagccggtgggtatgcagaagtgggggaagggacctaatgtgaccgtgaccgtcatttgggtggatcccgtcaatgtcatcgcagccacctacgacatcctcattgagtccactgccgaattcacacactacaagccccctttgaacttgcccctgaggcctggggtctggacagtgaaaattctccaccactgggtgccagttgcagagaccaaattcctcgttgcgcctctgaccttctcgaacaggcagcccatcaaacctgaggaggcactgaagctgcacaatgggcccctccgcaatgcctacatggagcagagcttccagagcctaaaccccgtcctcagcctgcccatcaaccccgcccaggtggaacaggcacggaggaacgcagcctccacgggcacagcgctggagggatggctggactcgttggtgggcgggatgtggactgccatggacatctgtgccacgggccccacagcctgcccggtcatgcagacctgcagccagacggcctggagctccttcagccctgaccccaagtcggagctgggggcagtcaaacctgatggccggctcaggtagcactgggcacgaggagtgggccacagcaggatctcaacgggaaagcagccagaggggttgtggggcctgaaccccggcctcccaccctgggggaggccctctgtgaatgggtctctcctggccatagaatgatggaaagggaaggtcagcaggtcaaagcaggatcagccaacaacctgcctttggcaagctgcgggtgggatggctcagtccctgcactgtgactgtctcacctcttctggttgatcctcaagtcctacaggttccttgtcttccccttccagtgacccacccctgaccccagacgtgtgattttcagacttttctttcgagcagcagaacttcgtttacggagcacagtcataagtggaggttcagggtgctgacgaaatccaagctgctctggttgaagctgacaagtgcgaggttccctcccaaagctcagccctctgggcggtccccttgcccagggtatctcctacggtacctcttcagaacccaagggctctgcaaatgccagtttgacaagcactgcccagaccaaccatgggttcaaactccagccctgccctttggttcatttttctgcttctcttggctgggggactctggtgccagccttgaaagtcatggtcgtgggccctttcccatggaggctgcagccttaggagagctctgagcctctcagcagccctccttgggttgaactattctccttagtaactaggtaagtgggaaagccttttgatgtggcatggccaaggtccagccacaagtgcaactgccacctgtccaggggtctgggcctccttccctcaaggctgccacacaaagtagcagaaataggatgatgtttgtgagcaccagactcaagaccatgaccttctttgatccttgaaaatgggaactttgacagccatgaccatgaaactcacaaggcaacgcgatgaaactcacaaagcaatgcttggagcaaaactcctgagctagacagcacagcagcacccatcccctgccagagcccttccgttctgaggtcagacacacaaaaccttcgtcaattgcacaccggtgctgttgggagtgaccaaaccacatgaaccagacttttcccgtccaggaaatagcatttcagatttggtttttaatttcatgcccttcggccacaggctcaacgggacatgcaacataaaaatgggaaggttatt

SEQ ID NO: 290443 - DNA, 3784 bp, Homo sapiens
  misc_feature (1)..(1): n is a, c, g, or t
  misc_feature (93)..(93): n is a, c, g, or t
  misc_feature (318)..(318): n is a, c, g, or t
nctcaggatggctacttttctcatcggccgaaagagaaagtgcgaacagacagcaacaacgagaactctgtccccaaagactttgagaatgtngacaacagcaacttcgcacccaggactcaaaagcagaagcaccagcctgagttggcgaagaagccaccgagtagacagaaggagcttttgaaaaggaagctggaacagcaggagaaaggaaaaggacatacattccctgggaaaggccccggtgaggtgctgcctcccggggacagagccgcagccaacagcagccacgggaaggatgtgtccagaccgcctcangccaggaaaactgggggcagctcccccgagaccaagtatgaccagccccctaagtgtgacatctcaggcaaggaggccatctctgccctgtcccgtgctaagtccaagcactgccgccaggagattggggagacttactgccgccacaagttagggctgctgatgcctgagaaggtgactcggttctgccccctcgagggtaaagccaacaagaacgtgcagtgggacgaggactccgtggagtacatgccagccaacccggtcagaatcgcctttgtcctggtggtccacggccgtgcctctcggcagttgcagcgcatgttcaaggccatctaccacaaagaccacttctactacatccacgtggacaagcgctctaattacctgcatcggcaagtgctccaggtctccaggcagtacagcaatgtccgcgtcaccccctggagaatggccaccatctggggaggagccagcctcctgtccacctacctgcagagcatgcgggacctcctggagatgaccgactggccctgggacttcttcatcaacctgagtgcggccgactaccccatcaggacaaatgaccagttggtggcgtttctctcccgataccgagatatgaatttcttgaagtcacacggccgggacaatgcaaggttcattcggaagcagggcctggatcggctcttcctggagtgcgacgctcacatgtggcgcctgggagatcggcggatcccagagggcattgccgtggatggcggttcggactggttcctgctgaaccggaggtttgtagaatatgtgaccttctccacagacgatctggtgaccaagatgaaacagttctactcctacaccctgcttcctgctgagtccttcttccatacggtcctggagaacagcccccactgcgacaccatggtggacaacaacctgcgcatcaccaactggaatcgcaagctgggctgcaagtgccagtacaagcacatcgtggactggtgcggctgctcccccaatgacttcaagccgcaggacttccaccgcttccagcagacagcccggcctaccttctttgcccgcaagtttgaagccgtggtgaatcaggaaatcattgggcagctggactattacctgtacgggaactaccctgcaggtaccccgggcctgcgctcctactgggagaatgtctacgatgagcctgacggcatccacagcctgagcgacgtgacactcaccttgtaccactcctttgcccgcctgggtcttcgacgggccgagacgtccctgcacacggatggggagaacagctgccgatactacccaatgggccacccagcatctgtgcacctctacttccttgctgaccgcttccagggctttctgatcaagcatcatgctaccaatctggctgtgagcaaactagagactctggagacctgggtgatgccgaaaaaagtcttcaagatcgcaagcccacccagtgactttgggaggcttcagttttccgaggtcggcactgactgggatgccaaggagaggctattccgcaactttgggggtcttctggggcccatggatgagccggtgggtatgcagaagtgggggaagggacctaatgtgaccgtgaccgtcatttgggtggatcccgtcaatgtcatcgcagccacctacgacatcctcattgagtccactgccgaattcacacactacaagccccctttgaacttgcccctgaggcctggggtctggacagtgaaaattctccaccactgggtgccagttgcagagaccaaattcctcgttgcgcctctgaccttctcgaacaggcagcccatcaaacctgaggaggcactgaagctgcacaatgggcccctccgcaatgcctacatggagcagagcttccagagcctaaaccccgtcctcagcctgcccatcaaccccgcccaggtggaacaggcacggaggaacgcagcctccacgggcacagcgctggagggatggctggactcgttggtgggcgggatgtggactgccatggacatctgtgccacgggccccacagcctgcccggtcatgcagacctgcagccagacggcctggagctccttcagccctgaccccaagtcggagctgggggcagtcaaacctgatggccggctcaggtagcactgggcacgaggagtgggccacagcaggatctcaacgggaaagcagccagaggggttgtggggcctgaaccccggcctcccaccctgggggaggccctctgtgaatgggtctctcctggccatagaatgatggaaagggaaggtcagcaggtcaaagcaggatcagccaacaacctgcctttggcaagctgcgggtgggatggctcagtccctgcactgtgactgtctcacctcttctggttgatcctcaagtcctacaggttccttgtcttccccttccagtgacccacccctgaccccagacgtgtgattttcagacttttctttcgagcagcagaacttcgtttacggagcacagtcataagtggaggttcagggtgctgacgaaatccaagctgctctggttgaagctgacaagtgcgaggttccctcccaaagctcagccctctgggcggtccccttgcccagggtatctcctacggtacctcttcagaacccaagggctctgcaaatgccagtttgacaagcactgcccagaccaaccatgggttcaaactccagccctgccctttggttcatttttctgcttctcttggctgggggactctggtgccagccttgaaagtcatggtcgtgggccctttcccatggaggctgcagccttaggagagctctgagcctctcagcagccctccttgggttgaactattctccttagtaactaggtaagtgggaaagccttttgatgtggcatggccaaggtccagccacaagtgcaactgccacctgtccaggggtctgggcctccttccctcaaggctgccacacaaagtagcagaaataggatgatgtttgtgagcaccagactcaagaccatgaccttctttgatccttgaaaatgggaactttgacagccatgaccatgaaactcacaaggcaacgcgatgaaactcacaaagcaatgcttggagcaaaactcctgagctagacagcacagcagcacccatcccctgccagagcccttccgttctgaggtcagacacacaaaaccttcgtcaattgcacaccggtgctgttgggagtgaccaaaccacatgaaccagacttttcccgtccaggaaatagcatttcagatttggtttttaatttcatgcccttcggccacaggctcaacgggacatgcaacataaaaatgggaaggttatttaaacaacaaaaaacagtatgatttaagtgttgagttaccagaaacccaaaaggtttccttgccacgagccccctggagtgtcatccctgtt

SEQ ID NO: 290444 - DNA, 2770 bp, Homo sapiens
tgccctagatgagtggcatgtgacctgtacctaaatgatgtctgagatccatcccagctattaccatctaaaattatttagtttatttaacagacatctaaatgatgcttactaagaaatgatgcttactaagtgcctatcattgctttagatgttctgcacacgattaactcacacccttattataacccattttacagatgttgaaactgagaacacagaggtgcaaaaagtatcggagctaattcgggtccagcagagctttgcttctaaccacaggatatgcccttaggttccccccaacccccagcactcgctgatgtggcttttctatttttaatcccatgagtacagcagacagcccggcctaccttctttgcccgcaagtttgaagccgtggtgaatcaggaaatcattgggcagctggactattacctgtacgggaactaccctgcaggtaccccgggcctgcgctcctactgggagaatgtctacgatgagcctgacggcatccacagcctgagcgacgtgacactcaccttgtaccactcctttgcccgcctgggtcttcgacgggccgagacgtccctgcacacggatggggagaacagctgccgatactacccaatgggccacccagcatctgtgcacctctacttccttgctgaccgcttccagggctttctgatcaagcatcatgctaccaatctggctgtgagcaaactagagactctggagacctgggtgatgccgaaaaaagtcttcaagatcgcaagcccacccagtgactttgggaggcttcagttttccgaggtcggcactgactgggatgccaaggagaggctattccgcaactttgggggtcttctggggcccatggatgagccggtgggtatgcagaagtgggggaagggacctaatgtgaccgtgaccgtcatttgggtggatcccgtcaatgtcatcgcagccacctacgacatcctcattgagtccactgccgaattcacacactacaagccccctttgaacttgcccctgaggcctggggtctggacagtgaaaattctccaccactgggtgccagttgcagagaccaaattcctcgttgcgcctctgaccttctcgaacaggcagcccatcaaacctgaggaggcactgaagctgcacaatgggcccctccgcaatgcctacatggagcagagcttccagagcctaaaccccgtcctcagcctgcccatcaaccccgcccaggtggaacaggcacggaggaacgcagcctccacgggcacagcgctggagggatggctggactcgttggtgggcgggatgtggactgccatggacatctgtgccacgggccccacagcctgcccggtcatgcagacctgcagccagacggcctggagctccttcagccctgaccccaagtcggagctgggggcagtcaaacctgatggccggctcaggtagcactgggcacgaggagtgggccacagcaggatctcaacgggaaagcagccagaggggttgtggggcctgaaccccggcctcccaccctgggggaggccctctgtgaatgggtctctcctggccatagaatgatggaaagggaaggtcagcaggtcaaagcaggatcagccaacaacctgcctttggcaagctgcgggtgggatggctcagtccctgcactgtgactgtctcacctcttctggttgatcctcaagtcctacaggttccttgtcttccccttccagtgacccacccctgaccccagacgtgtgattttcagacttttctttcgagcagcagaacttcgtttacggagcacagtcataagtggaggttcagggtgctgacgaaatccaagctgctctggttgaagctgacaagtgcgaggttccctcccaaagctcagccctctgggcggtccccttgcccagggtatctcctacggtacctcttcagaacccaagggctctgcaaatgccagtttgacaagcactgcccagaccaaccatgggttcaaactccagccctgccctttggttcatttttctgcttctcttggctgggggactctggtgccagccttgaaagtcatggtcgtgggccctttcccatggaggctgcagccttaggagagctctgagcctctcagcagccctccttgggttgaactattctccttagtaactaggtaagtgggaaagccttttgatgtggcatggccaaggtccagccacaagtgcaactgccacctgtccaggggtctgggcctccttccctcaaggctgccacacaaagtagcagaaataggatgatgtttgtgagcaccagactcaagaccatgaccttctttgatccttgaaaatgggaactttgacagccatgaccatgaaactcacaaggcaacgcgatgaaactcacaaagcaatgcttggagcaaaactcctgagctagacagcacagcagcacccatcccctgccagagcccttccgttctgaggtcagacacacaaaaccttcgtcaattgcacaccggtgctgttgggagtgaccaaaccacatgaaccagacttttcccgtccaggaaatagcatttcagatttggtttttaatttcatgcccttcggccacaggctcaacgggacatgcaacataaaaatgggaaggttatttaaacaacaaaaaacagtatgatttaagtgttgagttaccagaaacccaaaaggtttccttgccacgagccccctggagtgtcatccctgtt

SEQ ID NO: 290445 - DNA, 1866 bp, Homo sapiens
  misc_feature (1)..(1): n is a, c, g, or t
  misc_feature (93)..(93): n is a, c, g, or t
  misc_feature (318)..(318): n is a, c, g, or t
nctcaggatggctacttttctcatcggccgaaagagaaagtgcgaacagacagcaacaacgagaactctgtccccaaagactttgagaatgtngacaacagcaacttcgcacccaggactcaaaagcagaagcaccagcctgagttggcgaagaagccaccgagtagacagaaggagcttttgaaaaggaagctggaacagcaggagaaaggaaaaggacatacattccctgggaaaggccccggtgaggtgctgcctcccggggacagagccgcagccaacagcagccacgggaaggatgtgtccagaccgcctcangccaggaaaactgggggcagctcccccgagaccaagtatgaccagccccctaagtgtgacatctcaggcaaggaggccatctctgccctgtcccgtgctaagtccaagcactgccgccaggagattggggagacttactgccgccacaagttagggctgctgatgcctgagaaggtgactcggttctgccccctcgagggtaaagccaacaagaacgtgcagtgggacgaggactccgtggagtacatgccagccaacccggtcagaatcgcctttgtcctggtggtccacggccgtgcctctcggcagttgcagcgcatgttcaaggccatctaccacaaagaccacttctactacatccacgtggacaagcgctctaattacctgcatcggcaagtgctccaggtctccaggcagtacagcaatgtccgcgtcaccccctggagaatggccaccatctggggaggagccagcctcctgtccacctacctgcagagcatgcgggacctcctggagatgaccgactggccctgggacttcttcatcaacctgagtgcggccgactaccccatcaggacaaatgaccagttggtggcgtttctctcccgataccgagatatgaatttcttgaagtcacacggccgggacaatgcaaggttcattcggaagcagggcctggatcggctcttcctggagtgcgacgctcacatgtggcgcctgggagatcggcggatcccagagggcattgccgtggatggcggttcggactggttcctgctgaaccggaggtttgtagaatatgtgaccttctccacagacgatctggtgaccaagatgaaacagttctactcctacaccctgcttcctgctgagtccttcttccatacggtcctggagaacagcccccactgcgacaccatggtggacaacaacctgcgcatcaccaactggaatcgcaagctgggctgcaagtgccagtacaagcacatcgtggactggtgcggctgctcccccaatgacttcaagccgcaggacttccaccgcttccaggtgagactttctcatggtctgccagcctcctaagtgatgccttcccaacaaacctctgcagaaatccaaggccagacctgcaggtcatcttatcacatggtgcccaaacctggctgttgataataatagttaacagtatcaacaatagccagtgtttattgagcacttacttcagggatgttctaaccacattgactcattaacccaaaaacaacaaatgacctttcattattattccattttagggatatgaaaactgtgaggcacagaaaggttaaaaaaaactttccaaaggccatactcatatcatcttctctttattcccttttcatcagaatctcccaaaatatttgttacatttgtacccaggaatatgcttttaagtatatatctagggctgagcttttcaacctcagaactcttgccattgtggctggatgattctctgttgggacatgctgtcccatgcatgggtaggatgcttagcagcacctctgg

SEQ ID NO: 290446 - DNA, 945 bp, Homo sapiens
ttctcctgttgctcggagttactcctgctgctgaaatccaagctgctctggttgaagctgacaagtgcgaggttccctcccaaagctcagccctctgggcggtccccttgcccagggtatctcctacggtacctcttcagaacccaagggctctgcaaatgccagtttgacaagcactgcccagaccaaccatgggttcaaactccagccctgccctttggttcatttttctgcttctcttggctgggggactctggtgccagccttgaaagtcatggtcgtgggccctttcccatggaggctgcagccttaggagagctctgagcctctcagcagccctccttgggttgaactattctccttagtaactaggtaagtgggaaagccttttgatgtggcatggccaaggtccagccacaagtgcaactgccacctgtccaggggtctgggcctccttccctcaaggctgccacacaaagtagcagaaataggatgatgtttgtgagcaccagactcaagaccatgaccttctttgatccttgaaaatgggaactttgacagccatgaccatgaaactcacaaggcaacgcgatgaaactcacaaagcaatgcttggagcaaaactcctgagctagacagcacagcagcacccatcccctgccagagcccttccgttctgaggtcagacacacaaaaccttcgtcaattgcacaccggtgctgttgggagtgaccaaaccacatgaaccagacttttcccgtccaggaaatagcatttcagatttggtttttaatttcatgcccttcggccacaggctcaacgggacatgcaacataaaaatgggaaggttatttaaacaacaaaaaacagtatgatttaagtgttgagttaccagaaacccaaaaggtttccttgccacgagccccctggagtgtcatccctgtt

SEQ ID NO: 290447 - DNA, 2368 bp, Homo sapiens
  misc_feature (4)..(4): n is a, c, g, or t
  misc_feature (6)..(8): n is a, c, g, or t
ggcncnnngtttccccgcccctcgcctcggccctttctcttcccagcacctcggctgttccccggcggcggcagcggcagcggcggcccacacagcagcgagaggcgagaggaggctgcctcgaggatgaagtgcaaacccaaccagacgcggacctacgaccccgaggggttcaagaagcgggcggcgtgcctgtgcttccggagcgaacgcgaggacgaggtcctgttagtgagtagcagccggtacccggaccgctggatcgtgccgggcgggggcatggagcccgaggaggagccgggcggtgcggcggtccgagaggtgtacgaagaagcgggagtcaaggggaagttaggccggctcctgggcgtcttcgaacagaaccaggatcgcaagcacagaacgtacgtgtatgtactgactgtcacggagctgctggaggattgggaagattcggttagcattgggaggaagcgagagtggttcaaagtcgaagatgccatcaaggttctccagtgccacaagcccgtgcacgccgaatatctggagaaactaaagctgggcggttccccaaccaatggaaactccatggccccatcctcgccagatagcgatccctaatgaacagcaaagatgttcagtattgtgctgaaagaaacattgatgtgaacccagtgatcagtggaattgtcaagtacaggtgagcacttctgtgttcccaagaagacagctcatctggtttcttcctgcatcttgggacactccttccctgtctataccactgactcttgctctggttgttgtactcttatacgtgaatagactcttaattcagcacctatagccttttgttgtgcttttttgatgtgtctgccttcattagactatgatgtctttgagagcaaagactatttttccttactctttgcatattctgcatctgagacactacttgaaatatggttggcatcactgaaggttctttgattcaattaatattttgtaatcaccgtgtggcaaaacattccccttccaatctggtgctagtagagtatatgctatctaggcaccatgtgtgtggcttttgtgtatcaggtgtttcagaaatatttcaagacagttgtaagatgtttgaggacaagaattattactcctatttctatgtcataccacacagtagctgcacagttttaagattatgccatcacctagggtaatgttttgtagaatcagtccttcgtgtaacaactctagtgtttttgtactgttgatgatttgcttaaattttattcaaaaactatcacttgctataaaggtaattgtaaaaataaatacagtggacgcaaaataatgttgtgagtttttataaaaataaattttaaaatgatatataagacatttttttgcaatgcctgccctaaccacttcttacatgtcatcttaacatctctttgaggaaacactgtttcctcattttacagatttaacatactgtattatttgatgccagagccaacaggctatatcataggcagtttccaaacttaattatgccatttagtttgtctagatttcttttgcctctctcactgatccatttggctgtagttttcatcccttttccagtacacacagctagctcctcatcctacctggtttctgcatatgagaatgcagagggctgagagagggcaaaattgttgtcatttagaaaaggcatttaggaaagaggctgctattagaggggaacacaaagtgaaggtttttttaaaaaagaggacttgcatcagctgcctccagaacaattttaagaaaataacaaagatgtttagaagaaatcttacggagtttgccatgggatgtgtgatatcagcagtcttcagctccttacaaattaccaaaagtggttctaatatgctagtttgtttgattttttcttttatattataaagcaattgcatcgataaaagcttggactccattttagtgtgacactcttcctcatgataccagtgaaatgtattgattgtgtccccagttgttacataatttgaaataaaaatataacttcttgatttattgttttttaagatgtgatatggtactgtggttatgttgttttaaaaaatgattatcttttagagaagtatactgaaaaatgtacaggtgaaatgatatgttactggtattcgcttcaaaatcatctgagtgtggggtaattgagtacatagatgaaacaagattggccataaattggtaattgctgaagctgtgtgatggatgtttgagagttcattatactattctctatacttttgtatatgtttgaaattttccataataaaaattgaaaaaagtaaaaaaaaaa

SEQ ID NO: 290448 - DNA, 1300 bp, Homo sapiens
  misc_feature (9)..(9): n is a, c, g, or t
cttgatccnagggcgcccctgacctttgagccggctcgggttccggctctggcgcgtgcacactcgcctcgccgttcgggaccagccagatcgcggcggcctcgcgggcggtctggtcggtgaggtcttggccgcgcgcggcaatgctgaggctgctggcgtccgggtgcgcccggggcccggggcccggcgtgggcgcgcgtcctgccgcagggctctttcatccggggcgccgccagagccgccaggcttccgatgcgccccggaaccagccccccagccccgagttcgtggcccggccggtgggcgtctgctccatgatgcgcctgccggtgcagacctcccccgaggggctggacgctgccttcatcggggtgcccctggatactgggacctccaaccggcctggggcgagattcggacctcgccgcatccgggaagaatcagtgatgcttcggacagtcaatcctagcacgggggccctccccttccagtccctcatggttgcagacctaggcgatgtgaatgtcaatctttacaaccttcaggacagctgccggcgaattcaagaggcctatgagaaaattgtagcagctggctgtattcctctgaccttgggtggagatcacacaatcacatatcccatattgcaagcgatggcaaaaaagcatggcccagtggggctgctgcacgtggatgcgcacacggacacgaccgacaaggccctaggagagaagctctaccacggggcgcccttccgccggtgtgtggatgagggtctcctggactgtaagcgtgtggtgcagattggcatccggggctcttccacgaccttggatccctacagatacaaccggagccagggcttccgggtagtcctggctgaagactgctggatgaagtcgctggttcctctgatgggggaagtcaggcagcagatgggaggcaaacccatttatatcagctttgatattgacgctctggatcctgcctatgcgccagggacagggacacctgaaattgctggtctcactcctagtcaggctctggagatcatcaggggttgtcaaggcctgaacgtgatgggctgtgatcttgtcgaagtttcaccaccgtatgatctttctgggaacacagccctgctggcggctaacctgctgtttgagatgctatgtgctctccccaaagtgacaaccgtctgagtcttgtgctcttcaagacaaaacagattgcgtcgctgacaagttctcaagaagaacttatgagtaagcagtctgagaactaaagagtttatgccaag

SEQ ID NO: 290449 - DNA, 1709 bp, Homo sapiens
  misc_feature (9)..(9): n is a, c, g, or t
cttgatccnagggcgcccctgacctttgagccggctcgggttccggctctggcgcgtgcacactcgcctcgccgttcgggaccagccagatcgcggcggcctcgcgggcggtctggtcggtgaggtcttggccgcgcgcggcaatgctgaggctgctggcgtccgggtgcgcccggggcccggggcccggcgtgggcgcgcgtcctgccgcagggctctttcatccggggcgccgccagagccgccaggcttccgatgcgccccggaaccagccccccagccccgagttcgtggcccggccggtgggcgtctgctccatgatgcgcctgccggtgcagacctcccccgaggggctggacgctgccttcatcggggtgcccctggatactgggacctccaaccggcctggggcgagattcggacctcgccgcatccgggaagaatcagtgatgcttcggacagtcaatcctagcacgggggccctccccttccagtccctcatggttgcagacctaggcgatgtgaatgtcaatctttacaaccttcaggacagctgccggcgaattcaagaggcctatgagaaaattgtagcagctggctgtattcctctgaccttgggtggagatcacacaatcacatatcccatattgcaagcgatggcaaaaaagcatggcccagtggggctgctgcacgtggatgcgcacacggacacgaccgacaaggccctaggagagaagctctaccacggggcgcccttccgccggtgtgtggatgagggtctcctggactgtaagcgtgtggtgcagattggcatccggggctcttccacgaccttggatccctacagatacaaccggagccagggcttccgggtagtcctggctgaagactgctggatgaagtcgctggttcctctgatgggggaagtcaggcagcagatgggaggcaaacccatttatatcagctttgatattgacgctctggatcctgcctatgcgccagggacagggacacctgaaattgctggtctcactcctagtcaggctctggagatcatcaggggttgtcaaggcctgaacgtgatgggctgtgatcttgtcgaagtttcaccaccgtatgatctttctgggaacacagccctgctggcggctaacctgctgtttgagatgctatgtgctctccccaaagtgacaaccgtctgagtcttgtgctcttcaagacaaaacagattgcgtcgctgacaagttctcaagaagaacttatgagtaagcagtctgagaactaaagagtttatgccaagaaaactttctgctgaaagtgtcattgctggctgtgaagtcgggataatcagtagaattctcacccaaacagcaacatttctaaggaacttggattaattgggggaaaaaaaaaggagtacttgtactgctttgattttttttcctttgatgaaagatggaggataaaggggaagtgaggagaatttctttcaagattatctaaacattagaaacatgacatttaaaaaaactatgaaataatactgtataagcattccatctcaaaaaaaaaaaaaaaaaatacagcttctcctatgaggtgcttagggctgcatcttggttttaggacccctgtgaacgtaagtaaaaagtataaagtaacacggagagcctgggtgacagagtgagactccgtctccaaaaaaaaaa

SEQ ID NO: 290450 - DNA, 567 bp, Homo sapiens
  misc_feature (3)..(3): n is a, c, g, or t
  misc_feature (5)..(5): n is a, c, g, or t
tgngntagagttttgcttgtcacccaggctggagtgcaatggcatgatctcggttcattgcaacctccgcctcccgagttcaatcgattctcctgcctcagcctcctgagtacctgggattacaggtgcctgccaccacgcctggctaatttttgtatttttagtagagacagggtttcaccacattggccaggctggtcttgaactcctgacctaaggtgatccgcccgcctcagcctccttaaagtgctgggattacaggcatgagccaccgcacccagccgctttttaaaattttgatgatctgcttcctagagtattgagtatcttcctttaaactacagctcctcctcggacgctgcagtgagctgagatcgcaccactgcactccagcctgggtgccagagcaggactccatctcaaaaaaaaaaaaaaaaaatacagcttctcctatgaggtgcttagggctgcatcttggttttaggacccctgtgaacgtaagtaaaaagtataaagtaacacggagagcctgggtgacagagtgagactccgtctccaaaaaaaaaa

SEQ ID NO: 290451 - DNA, 385 bp, Homo sapiens
agcttctcctatgaggtgcttagggctgcatcttggttttaggaccactgtgaacgtaagtaaaaagtataaagtaacccggagagccaccgcgcccagccgctttttaaaattttgatgatctgcttcctagagtattgagtatcttcctttaaactacagctcctcctcggacgctgcagtgagctgagatcgcaccactgcactccagcctgggtgccagagcaggactccatctcaaaaaaaaaaaaaaaaaatacagcttctcctatgaggtgcttagggctgcatcttggttttaggacccctgtgaacgtaagtaaaaagtataaagtaacacggagagcctgggtgacagagtgagactccgtctccaaaaaaaaaa

SEQ ID NO: 290452 - DNA, 393 bp, Homo sapiens
ttttttgagatggagtctcgctctgtcgctcaggctagagtacagtggcgcgatcttggctcactgcgacctccacctcctgggttcaagcgattctcctgccccagccgctttttaaaattttgatgatctgcttcctagagtattgagtatcttcctttaaactacagctcctcctcggacgctgcagtgagctgagatcgcaccactgcactccagcctgggtgccagagcaggactccatctcaaaaaaaaaaaaaaaaaatacagcttctcctatgaggtgcttagggctgcatcttggttttaggacccctgtgaacgtaagtaaaaagtataaagtaacacggagagcctgggtgacagagtgagactccgtctccaaaaaaaaaa

SEQ ID NO: 290453 - DNA, 891 bp, Homo sapiens
ggttgaaaagggagtacccatctgatatctaggcagcatgaattggcctttggttccctgccacccgacccttttctcctgcctcttactgctctagtgataccacttatgctattgtctatggcaggtttatttgtatctatcctgcttatttaaataataagaagaccatcgcagagggaaggcgaatccccataagtaaggctgttgaaaatcctacagctacagagattcaagatgtatgttcagcagttggacttaacgtatttcttgagaaaaataaaatgtactctagagaatggaatcgtgatgtccaatacagaggcagagtccgggtccagctcaaacaggaagatgggagcctctgccttgtacagttcccatcacgtaagtcagtaatgttgtatgcagcagaaatgatacctaaactaaaaacaaggacacaaaaaacaggaggtgctgaccaaagtcttcaacaaggagagggaagtaaaaaagggaaaggaaagaaaaagaagtaacctagtatcagcatcaagtatgtggtactactgtaagagacatgaatggagacttctaatttgtatcggagggaaacagaagctttttgtttgcatcatttaactgaactgtgaacccttgtgcctctcatctttatcatcggagttgacagtgaaacaaatttacatcagaagtttgcatctcgcgtatatgccgtataaaagaatttttttgtctttcaatgcagttttttggaagaaaatatttttaaatggacaatggactgtacaataagttacttgaaataagttgtttcagataaatttcaattagatttaaaataaacattatgtccaccttttaagttaatgaaataaaatttgaaactga

SEQ ID NO: 290454 - DNA, 912 bp, Homo sapiens
agcgggggcggaaaagcgggctgtctcggaaactcagagccgggttcctcccgggtttctgccgggtttctccctgcggctcctgggttgttgagactcttgtgaagatggcttgcgctgccgcgcggtccccggccgaccaggacaggtttatttgtatctatcctgcttatttaaataataagaagaccatcgcagagggaaggcgaatccccataagtaaggctgttgaaaatcctacagctacagagattcaagatgtatgttcagcagttggacttaacgtatttcttgagaaaaataaaatgtactctagagaatggaatcgtgatgtccaatacagaggcagagtccgggtccagctcaaacaggaagatgggagcctctgccttgtacagttcccatcacgtaagtcagtaatgttgtatgcagcagaaatgatacctaaactaaaaacaaggacacaaaaaacaggaggtgctgaccaaagtcttcaacaaggagagggaagtaaaaaagggaaaggaaagaaaaagaagtaacctagtatcagcatcaagtatgtggtactactgtaagagacatgaatggagacttctaatttgtatcggagggaaacagaagctttttgtttgcatcatttaactgaactgtgaacccttgtgcctctcatctttatcatcggagttgacagtgaaacaaatttacatcagaagtttgcatctcgcgtatatgccgtataaaagaatttttttgtctttcaatgcagttttttggaagaaaatatttttaaatggacaatggactgtacaataagttacttgaaataagttgtttcagataaatttcaattagatttaaaataaacattatgtccaccttttaagttaatgaaataaaatttgaaactga

SEQ ID NO: 290455 - DNA, 1399 bp, Homo sapiens
agcgggggcggaaaagcgggctgtctcggaaactcagagccgggttcctcccgggtttctgccgggtttctccctgcggctcctgggttgttgagactcttgtgaagatggcttgcgctgccgcgcggtccccggccgaccaggacaggtttatttgtatctatcctgcttatttaaataataagaagaccatcgcagagggaaggcgaatccccataagtaaggctgttgaaaatcctacagctacagagattcaagatgtatgttcagcagttggacttaacgtatttcttgagaaaaataaaatgtactctagagaatggaatcgtgatgtccaatacagaggcagagtccgggtccagctcaaacaggaagatgggagcctctgccttgtacagttcccatcacgtaagtcagtaatgttgtatgcagcagaaatgatacctaaactaaaaacaaggacacaaaaaacaggaggtgctgaccaaagtcttcaacaaggagagggaagtaaaaaagggaaaggaaagaaaaagaagtaacctagtatcagcatcaagtatgtggtactactgtaagagacatgaatggagacttctaatttgtatcggagggaaacagaagctttttgtttgcatcatttaactgaactgtgaacccttgtgcctctcatctttatcatcggagttgacagtgaaacaaatttacatcagaagtttgcatctcgcgtatatgccgtataaaagaatttttttgtctttcaatgcagttttttggaagaaaatatttttaaatggacaatggactgtacaataagttacttgaaataagttgtttcagataaatttcaattagatttaaaataaacattatgtccaccttttaagttaatgaaataaaatttgaaactgacaattgcagcttttgcttatatactaatgctaggagaggagggataattaagaataaaatatgtagtgaaagtttccatagtgtgaggctaaaactagaagaaactgtggtaggtccttttgtgggtgggggacaggggagtctgtaaaaagccagtctgtagatgatattttaatatattattgtaatcgaatcgttcagttgttttttgacatggaaagtcctggattttaagctttaaatttgcttattttgtaggtttaagaacatgattttcatgggagttgtaaaattaactgtgctttagcaccttgaggtacactttccttcaacaaatgaaattggattggtgctccagaatttcagagcggtttctgaaagtagtgattttgagctatcccaattcctgttcttcctgaggcctggtttagctcttccttgaattctgcaagctatctcatattttcagtaaattccatttttttta

SEQ ID NO: 290456 - DNA, 797 bp, Homo sapiens
agcgggggcggaaaagcgggctgtctcggaaactcagagccgggttcctcccgggtttctgccgggtttctccctgcggctcctgggttgttgagactcttgtgaagatggcttgcgctgccgcgcggtccccggccgaccaggacaggtttatttgtatctatcctgcttatttaaataataagaagaccatcgcagagggaaggcgaatccccataagtaaggctgttgaaaatcctacagctacagagattcaagatgtatgttcagcagttggacttaacgtatttcttgagaaaaataaaatgtactctagagaatggaatcgtgatgtccaatacagaggcagagtccgggtccagctcaaacaggaagatgggagcctctgccttgtacagttcccatcacgtaagtcagtaatgttgtatgcagcagaaatgatacctaaactaaaaacaaggacacaaaaaacaggaggtgctgaccaaagtcttcaacaaggagagggaagtaaaacaaccaaaaaaaaaaaaagccgagactagtgctctctctcccggcagctcgagtccaccaggagcgccgtccgtggaccgagatgctgcgggcctgaccagcatcgggggtagaccgccgccgcccagagtggtcctctgggggcaagctgggcctccgtccatggcggaccatgccgcaagatactctactacaggcaggccgggtgacaccgggccaccatggttggagtggacatctagcacggcggcgaggcatggcggcgcacaacccaacatgga

SEQ ID NO: 290457 - DNA, 825 bp, Homo sapiens
  misc_feature (824)..(824): n is a, c, g, or t
agcgggggcggaaaagcgggctgtctcggaaactcagagccgggttcctcccgggtttctgccgggtttctccctgcggctcctgggttgttgagactcttgtgaagatggcttgcgctgccgcgcggtccccggccgaccaggacaggtttatttgtatctatcctgcttatttaaataataagaagaccatcgcagagggaaggcgaatccccataagtaaggctgttgaaaatcctacagctacagagattcaagatgtatgttcagcagttggacttaacgtatttcttgagaaaaataaaatgtactctagagaatggaatcgtgatgtccaatacagaggcagagtccgggtccagctcaaacaggaagatgggagcctctgccttgtacagttcccatcacattatacactaagcctaacttctggttccgtaagtcagtaatgttgtatgcagcagaaatgatacctaaactaaaaacaaggacacaaaaaacaggaggtgctgaccaaagtcttcaacaaggagagggaagtaaaaaaaaaaaaaaacaaaaaaaaacaatttgtggcgccggcctcggagcccgaagaaaggttttctacaaaccccttcgcttgtggcggcggcggcccgagagggaattacaaccttggccataacgctgcttcaaaggaaacccttgcccacagccagtgggtgtgggttcccacccattaaaaaaccgcggcgggacccgggcgttctgaccaaccaaatgcgtccgggccaccggtctcacaacgggtcaggagcatgagtcccgcgccccgggggggnc

SEQ ID NO: 290458 - DNA, 1364 bp, Homo sapiens
tcttgggctcaagcaaccctcctgcctcagcctcccaagtagctgggaatatcggcacatgattttttattttttctagagatggggttttgctatgtttcctaagccagtctcaaactcgtggacacaagtgatcctcctgcctcagcctcccaaagagctgagattacagacatgacccactgggctcagcctaaaatagattgttttttatatactaaaacccatcaggattggtaggtattgctagatgcttcaggttgtgactaaggagtgacatcatattctgatatgttttttctccttaacattttcctatattatatctcaaaagaccaaaaacaaacaaaaacttgtaattaactagtagataaaataggggtagaagttgtggtgagaacatgtcacttcctatttccagtaagacccaagtaagatagtaaaaagaaagcagagctgaggaacttggtctgttgggggtgaaggtagctggttgtaggtgtgcagagcaggaatgcatgtaagtgtagatcatctgatcttacccatcggatcgcttgtaacttgatgatactgtttttttgttgtaagactgagaaaaccctgtatttcagtgtcttaagatacagtgatattctgactctgtttctacctgaggtatatttggatacatactccttagatcttcaagctgattactaggaccaaaccaaaatttttgtttcatacttagtgttttgccttttgattttattcatttaaatattttcagcattattctcactctcagtacatttcccccgacttgagctagtcagtgtcttcagtcatttgatttttgattttttaaaaaagttattttccattttcttgatgtgatagtttcttacactttgtgatattcaatttgatgactttttatgtcttatttctcagattatacactaagcctaacttctggttccgtaagtcagtaatgttgtatgcagcagaaatgatacctaaactaaaaacaaggacacaaaaaacaggaggtgctgaccaaagtcttcaacaaggagagggaagtaaaaaagggaaaggaaagaaaaagaagtaacctagtatcagcatcaagtatgtggtactactgtaagagacatgaatggagacttctaatttgtatcggagggaaacagaagctttttgtttgcatcatttaactgaactgtgaacccttgtgcctctcatctttatcatcggagttgacagtgaaacaaatttacatcagaagtttgcatctcgcgtatatgccgtataaaaaaaaaaccccaccacctataagtaaaataatagggcggggggtagggggggggaaacacaca

SEQ ID NO: 290459 - DNA, 886 bp, Homo sapiens
agcgggggcggaaaagcgggctgtctcggaaactcagagccgggttcctcccgggtttctgccgggtttctccctgcggctcctgggttgttgagactcttgtgaagatggcttgcgctgccgcgcggtccccggccgaccaggacaggtttatttgtatctatcctgcttatttaaataataagaagaccatcgcagagggaaggcgaatccccataagtaaggctgttgaaaatcctacagctacagagattcaagatgtatgttcagcagttggacttaacgtatttcttgaggtatgacgtggttcttcactattttccatactcatctaattgatgtaataactttcttaagtcctgtttttcttttgtttcgtttatgttagaaaaataaaatgtactctagagaatggaatcgtgatgtccaatacagaggcagagtccgggtccagctcaaacaggaagatgggagcctctgccttgtacagttcccatcacgtaagcttgtttaaatgaatcagtggggctcagggataggtttctcctacacaacacaaaaaaggttctaaaactgaaaggtaaaagtcagaatttgcattctgaagattaatttaaagacaggactactgctcatggagagaagcagtagttctaatttctttgaggtgaatgacctctttgaaaatgtaatgagacccactaaacatttttcaaaaaaattgttgtgtgaacattttataaacctctggaagtctgtcattgctcccaggttaagaatataaaattattaaatcgttggatgttaattgccatttcagatcctagaggtccttgaggtctgttaatatctataatatctaatgattctatcattaataaatctg

SEQ ID NO: 290460 - DNA, 1019 bp, Homo sapiens
tgacaaacttgacttttggagatgtagccaacaaggctacgctatgctctatgaaaggctgcatgagagcacttgtggcccaactaaaatctgaaagtgaagacttacagcaggttattgcgagtgttttgaggaatttgtcttggcgagcagatgtaaatagtaaaaagacgttgcgagaagttggaagtgtgaaagcattgatggaatgtgctttagaagttaaaaagatggctctacaaaaacaattccatggtttatttgtatctatcctgcttatttaaataataagaagaccatcgcagagggaaggcgaatccccataagtaaggctgttgaaaatcctacagctacagagattcaagatgtatgttcagcagttggacttaacgtatttcttgagaaaaataaaatgtactctagagaatggaatcgtgatgtccaatacagaggcagagtccgggtccagctcaaacaggaagatgggagcctctgccttgtacagttcccatcacgtaagtcagtaatgttgtatgcagcagaaatgatacctaaactaaaaacaaggacacaaaaaacaggaggtgctgaccaaagtcttcaacaaggagagggaagtaaaaaagggaaaggaaagaaaaagaagtaacctagtatcagcatcaagtatgtggtactactgtaagagacatgaatggagacttctaatttgtatcggagggaaacagaagctttttgtttgcatcatttaactgaactgtgaacccttgtgcctctcatctttatcatcggagttgacagtgaaacaaatttacatcagaagtttgcatctcgcgtatatgccgtataaaagaatttttttgtctttcaatgcagttttttggaagaaaatatttttaaatggacaatggactgtacaataagttacttgaaataagttgtttcagataaatttcaattagatttaaaataaacattatgtccaccttttaagttaatgaaataaaatttgaaactga

SEQ ID NO: 290461 - DNA, 941 bp, Homo sapiens
agcgggggcggaaaagcgggctgtctcggaaactcagagccgggttcctcccgggtttctgccgggtttctccctgcggctcctgggttgttgagactcttgtgaagatggcttgcgctgccgcgcggtccccggccgaccaggacaggtttatttgtatctatcctgcttatttaaataataagaagaccatcgcagagggaaggcgaatccccataagtaaggctgttgaaaatcctacagctacagagattcaagatgtatgttcagcagttggacttaacgtatttcttgagaaaaataaaatgtactctagagaatggaatcgtgatgtccaatacagaggcagagtccgggtccagctcaaacaggaagatgggagcctctgccttgtacagttcccatcacattatacactaagcctaacttctggttccgtaagtcagtaatgttgtatgcagcagaaatgatacctaaactaaaaacaaggacacaaaaaacaggaggtgctgaccaaagtcttcaacaaggagagggaagtaaaaaagggaaaggaaagaaaaagaagtaacctagtatcagcatcaagtatgtggtactactgtaagagacatgaatggagacttctaatttgtatcggagggaaacagaagctttttgtttgcatcatttaactgaactgtgaacccttgtgcctctcatctttatcatcggagttgacagtgaaacaaatttacatcagaagtttgcatctcgcgtatatgccgtataaaagaatttttttgtctttcaatgcagttttttggaagaaaatatttttaaatggacaatggactgtacaataagttacttgaaataagttgtttcagataaatttcaattagatttaaaataaacattatgtccaccttttaagttaatgaaataaaatttgaaactga

SEQ ID NO: 290462 - DNA, 1469 bp, Homo sapiens
tcttgggctcaagcaaccctcctgcctcagcctcccaagtagctgggaatatcggcacatgattttttattttttctagagatggggttttgctatgtttcctaagccagtctcaaactcgtggacacaagtgatcctcctgcctcagcctcccaaagagctgagattacagacatgacccactgggctcagcctaaaatagattgttttttatatactaaaacccatcaggattggtaggtattgctagatgcttcaggttgtgactaaggagtgacatcatattctgatatgttttttctccttaacattttcctatattatatctcaaaagaccaaaaacaaacaaaaacttgtaattaactagtagataaaataggggtagaagttgtggtgagaacatgtcacttcctatttccagtaagacccaagtaagatagtaaaaagaaagcagagctgaggaacttggtctgttgggggtgaaggtagctggttgtaggtgtgcagagcaggaatgcatgtaagtgtagatcatctgatcttacccatcggatcgcttgtaacttgatgatactgtttttttgttgtaagactgagaaaaccctgtatttcagtgtcttaagatacagtgatattctgactctgtttctacctgaggtatatttggatacatactccttagatcttcaagctgattactaggaccaaaccaaaatttttgtttcatacttagtgttttgccttttgattttattcatttaaatattttcagcattattctcactctcagtacatttcccccgacttgagctagtcagtgtcttcagtcatttgatttttgattttttaaaaaagttattttccattttcttgatgtgatagtttcttacactttgtgatattcaatttgatgactttttatgtcttatttctcagattatacactaagcctaacttctggttccgtaagtcagtaatgttgtatgcagcagaaatgatacctaaactaaaaacaaggacacaaaaaacaggaggtgctgaccaaagtcttcaacaaggagagggaagtaaaaaagggaaaggaaagaaaaagaagtaacctagtatcagcatcaagtatgtggtactactgtaagagacatgaatggagacttctaatttgtatcggagggaaacagaagctttttgtttgcatcatttaactgaactgtgaacccttgtgcctctcatctttatcatcggagttgacagtgaaacaaatttacatcagaagtttgcatctcgcgtatatgccgtataaaagaatttttttgtctttcaatgcagttttttggaagaaaatatttttaaatggacaatggactgtacaataagttacttgaaataagttgtttcagataaatttcaattagatttaaaataaacattatgtccaccttttaagttaatgaaataaaatttgaaactga

SEQ ID NO: 290463 - DNA, 581 bp, Homo sapiens
aaaagaagaaaggacaaacaaaaccaacacccaccgcccccccgaacccccacaacactaattaaaacaagaactacgtaagtcagtaatgttgtatgcagcagaaatgatacctaaactaaaaacaaggacacaaaaaacaggaggtgctgaccaaagtcttcaacaaggagagggaagtaaaaaagggaaaggaaagaaaaagaagtaacctagtatcagcatcaagtatgtggtactactgtaagagacatgaatggagacttctaatttgtatcggagggaaacagaagctttttgtttgcatcatttaactgaactgtgaacccttgtgcctctcatctttatcatcggagttgacagtgaaacaaatttacatcagaagtttgcatctcgcgtatatgccgtataaaagaatttttttgtctttcaatgcagttttttggaagaaaatatttttaaatggacaatggactgtacaataagttacttgaaataagttgtttcagataaatttcaattagatttaaaataaacattatgtccaccttttaagttaatgaaataaaatttgaaactga

SEQ ID NO: 290464 - DNA, 794 bp, Homo sapiens
agcgggggcggaaaagcgggctgtctcggaaactcagagccgggttcctcccgggtttctgccgggtttctccctgcggctcctgggttgttgagactcttgtgaagatggcttgcgctgccgcgcggtccccggccgaccaggacaggtttatttgtatctatcctgcttatttaaataataagaagaccatcgcagagggaaggcgaatccccataagtaaggctgttgaaaatcctacagctacagagattcaagatgtatgttcagcagttggacttaacgtatttcttgagaaaaataaaatgtactctagagaatggaatcgtgatgtccaatacagaggcagagtccgggtccagctcaaacaggaagatgggagcctctgccttgtacagttcccatcacgtaagcttgtttaaatgaatcagtggggctcagggataggtttctcctacacaacacaaaaaaggttctaaaactgaaaggtaaaagtcagaatttgcattctgaagattaatttaaagacaggactactgctcatggagagaagcagtagttctaatttctttgaggtgaatgacctctttgaaaatgtaatgagacccactaaacatttttcaaaaaaattgttgtgtgaacattttataaacctctggaagtctgtcattgctcccaggttaagaatataaaattattaaatcgttggatgttaattgccatttcagatcctagaggtccttgaggtctgttaatatctataatatctaatgattctatcattaataaatctg

SEQ ID NO: 290465 - DNA, 421 bp, Homo sapiens
ttttttttttgagacagggtcttgctctgttgctcaggctggagtgcagtggcatgatcacagctcaacgcagcctcaatctgctgggctcaagcaatcctcccacttcagcctcctgagtaactgggactacaggcacacaccaccacgaccagccaatatttttattttttgtcgagatggggtctcctatgttgtccaggctagtcttgaattcctgggctcaagtgaacctcccattttggcctcccaaaatgtgggcaatcaaatattttgttgtatccaaggtgagcaggggggtagggagagggagagggagagagagggagacagagggagacagagggagagagagggagacagagggagacagagggagagagaggggaagagacagagggagacagagggagagaacaca

SEQ ID NO: 290466 - DNA, 1970 bp, Homo sapiens
ccatcctattacgactcactatagggctcgagcggccgcccgggcagtgtgtcgctctcctgagggcgaggatggcaacgagatggtcttctgtgacaagtgcaacgtctgtgtgcatcaggcatgctacgggatcctcaaggtgcccacgggcagctggctgtgccggacgtgtgccctgggtgtccagccaaagtgcctgctctgccccaagcgaggaggagccttgaagcccactagaagtgggaccaagtgggtgcatgtcagctgtgccctatggattcctgaggtcagcatcggctgcccagagaagatggagcccatcaccaagatctcgcatatcccagccagccgctgggctctgtcctgcagcctctgcaaggaatgcacaggcacctgcatccagtgttccatgccttcctgcgtcacagcgttccatgtcacatgcgcctttgaccacggcctggaaatgcggactatattagcagacaacgatgaggtcaagttcaagtcattctgccaggagcacagtgacgggggcccacgtaatgagcccacatctgagcccacggaacccagccaggctggcgaggacctggaaaaggtgaccctgcgcaagcagcggctgcagcagctagaggaggacttctacgagctggtggagccggctgaggtggctgagcggctggacctggctgaggcactggtcgacttcatctaccagtactggaagctgaagaggaaagccaatgccaaccagccgctgctgacccccaagaccgacgaggtggacaacctggcccagcaggagcaggacgtcctctaccgccgcctgaagctcttcacccatctgcggcaggacctagagagggttagaaatctgtgctacatggtgacaaggcgcgagagaacgaaacacgccatctgcaaactccaggagcagatattccacctgcagatgaaacttattgaacaggatctgtgtcgagcaggcctgtccacctcattccccatcgatggcaccttcttcaacagctggctggcacagtcggtgcagatcacagcagagaacatggccatgagcgagtggccactgaacaatgggcaccgcgaggaccctgctccagggctgctgtcagaggaactgctgcaggacgaggagacactgctcagcttcatgcgggacccctcgctgcgacctggtgaccctgctaggaaggcccgaggccgcacccgcctgcctgccaagaagaaaccaccaccaccaccaccgcaggacgggcctggttcacggacgactccagacaaagcccccaagaagacctggggccaggatgcaggcagtggcaaggggggtcaagggccacctaccaggaagccaccacgtcggacatcttctcacttgccgtccagccctgcagccggggactgtcccatcctagccacccctgaaagccccccgccactggcccctgagaccccggacgaggcagcctcagtagctgctgactcagatgtccaagtgcctggccctgcagcaagccctaagcctttgggccggctccggccaccccgcgagagcaaggtaacccggagattgccgggtgccaggcctgatgctgggatgggaccaccttcagctgtggctgagaggcccaaggtcagcctgcattttgacactgagactgatggctacttctctgatggggagatgagcgactcagatgtagaggccgaggacggtggggtgcagcggggtccccgggaggcaggggcagaggaggtggtccgcatgggcgtactggcctcctaactcacccccttccctgtcccaggccctgccctggtccccccacaaggcctcagcccagtcacaactgccatttccagtctctgctgagtgtcccagaccctcgaggctgccactccgtcgtggttttatttttaatatagagagagttttgaattct

SEQ ID NO: 290467 - DNA, 672 bp, Homo sapiens
gaacatacacagggggttggtgaatggtgccgaccgcggccatcgcagttggaggctattttttggggggggtgagtagcgtccatggagttactttgcgcccactcctagcggcaccggcttaggtcctgcgggccgaccgtccccggcggggggcgtggggcctgggacgccgcgggcccggcgcctccctcgccgcgacccggatggatgcgcgccccccgccctcccgcgccggccccaggagctcccggcttcgggagcatccttcccgcgccggtccctgcagcggcgcgtagccgagggcagcgcccgtcaggggggcaccgcggagcaagatggaagagaagaggcgaaaatactccatcagcagtgacaactctgacaccactgacagtcatgcgacatctacatccgcatcaagatgctccaaactgcccagcagcaccaagtcgggctggccccgacagaacgaaaagaagccctccgaggttttccggacagacttgatcacagccatgaagatcccggactcataccagctcagcccggatgactactacatcctggcagacccatggcgacaggaatgggagaaaggtgtgcaggtgcctgccggggcagaggccatcccagagcccgtggtgaggatgagccaggcagcccaggcta

SEQ ID NO: 290468 - DNA, 6627 bp, Homo sapiens
gaacatacacagggggttggtgaatggtgccgaccgcggccatcgcagttggaggctattttttggggggggtgagtagcgtccatggagttactttgcgcccactcctagcggcaccggcttaggtcctgcgggccgaccgtccccggcggggggcgtggggcctgggacgccgcgggcccggcgcctccctcgccgcgacccggatggatgcgcgccccccgccctcccgcgccggccccaggagctcccggcttcgggagcatccttcccgcgccggtccctgcagcggcgcgtagccgagggcagcgcccgtcaggggggcaccgcggagcaagatggaagagaagaggcgaaaatactccatcagcagtgacaactctgacaccactgacagtcatgcgacatctacatccgcatcaagatgctccaaactgcccagcagcaccaagtcgggctggccccgacagaacgaaaagaagccctccgaggttttccggacagacttgatcacagccatgaagatcccggactcataccagctcagcccggatgactactacatcctggcagacccatggcgacaggaatgggagaaaggtgtgcaggtgcctgccggggcagaggccatcccagagcccgtggtgaggatcctcccaccactggaaggcccccctgcccaggcatccccgagcagcaccatgcttggtgagggctcccagcctgattggccagggggcagccgctatgacttggacgagattgatgcctactggctggagctcatcaactcggagcttaaggagatggagaggccggagctggacgagctgacattagagcgtgtgctggaggagctggagaccctgtgccaccagaatatggccagggccattgagacgcaggaggggctgggcatcgagtacgacgaggatgttgtctgcgacgtgtgtcgctctcctgagggcgaggatggcaacgagatggtcttctgtgacaagtgcaacgtctgtgtgcatcaggcatgctacgggatcctcaaggtgcccacgggcagctggctgtgccggacgtgtgccctgggtgtccagccaaagtgcctgctctgccccaagcgaggaggagccttgaagcccactagaagtgggaccaagtgggtgcatgtcagctgtgccctatggattcctgaggtcagcatcggctgcccagagaagatggagcccatcaccaagatctcgcatatcccagccagccgctgggctctgtcctgcagcctctgcaaggaatgcacaggcacctgcatccagtgttccatgccttcctgcgtcacagcgttccatgtcacatgcgcctttgaccacggcctggaaatgcggactatattagcagacaacgatgaggtcaagttcaagtcattctgccaggagcacagtgacgggggcccacgtaatgagcccacatctgagcccacggaacccagccaggctggcgaggacctggaaaaggtgaccctgcgcaagcagcggctgcagcagctagaggaggacttctacgagctggtggagccggctgaggtggctgagcggctggacctggctgaggcactggtcgacttcatctaccagtactggaagctgaagaggaaagccaatgccaaccagccgctgctgacccccaagaccgacgaggtggacaacctggcccagcaggagcaggacgtcctctaccgccgcctgaagctcttcacccatctgcggcaggacctagagagggttagaaatctgtgctacatggtgacaaggcgcgagagaacgaaacacgccatctgcaaactccaggagcagatattccacctgcagatgaaacttattgaacaggatctgtgtcgagcaggcctgtccacctcattccccatcgatggcaccttcttcaacagctggctggcacagtcggtgcagatcacagcagagaacatggccatgagcgagtggccactgaacaatgggcaccgcgaggaccctgctccagggctgctgtcagaggaactgctgcaggacgaggagacactgctcagcttcatgcgggacccctcgctgcgacctggtgaccctgctaggaaggcccgaggccgcacccgcctgcctgccaagaagaaaccaccaccaccaccaccgcaggacgggcctggttcacggacgactccagacaaagcccccaagaagacctggggccaggatgcaggcagtggcaaggggggtcaagggccacctaccaggaagccaccacgtcggacatcttctcacttgccgtccagccctgcagccggggactgtcccatcctagccacccctgaaagccccccgccactggcccctgagaccccggacgaggcagcctcagtagctgctgactcagatgtccaagtgcctggccctgcagcaagccctaagcctttgggccggctccggccaccccgcgagagcaaggtaacccggagattgccgggtgccaggcctgatgctgggatgggaccaccttcagctgtggctgagaggcccaaggtcagcctgcattttgacactgagactgatggctacttctctgatggggagatgagcgactcagatgtagaggccgaggacggtggggtgcagcggggtccccgggaggcaggggcagaggaggtggtccgcatgggcgtactggcctcctaactcacccccttccctgtcccaggccctgccctggtccccccacaaggcctcagcccagtcacaactgccatttccagtctctgctgagtgtcccagaccctcgaggctgccactccgtcgtggttttatttttaatatagagagagttttgaattctacactgttgtctttcctctgtgctggcctaggacattaggattccttccacggctccggccgctaggaccctgccaggtcccgcgcaccatccctgccctgcccacgtggtattgctgggctcctggctagatgcaagcaaggtggacaagagctcaggactccagcccactgccactgggtgacacagactgtcgtttgggcattatttcatggcagatgggccagtccagggcctaccccgccttgcccccagatcccactggggtccatttggggggtcctgctacactccaccgatccccaaggaagtataataaacgatacccagccagagtctactcactgtcacaagcacaacgagtttatatgagaaagcactgagggggtgcagagggcccgctagttccaggggaactgaaagctgttcctgatcagcccgtatcatctgaggcctgcctgcccaccctgccaccctcccctcccttgctgctctgcccctgccagtgcccagcccagcggctctgggaaggggttcccagaatccctcctgagctgtgccatttactcaggggactcccaaacagccagctgccagtgcaggtggagggctgtaggggagggccagtgcccagacagggtcatggggctcagaccagcccactgtagagaatcactctgaggctccaacttccttccttccttcggggccagtctcggccgaagtctggtcacgctcagacagagctgaccagaccagaccgtttgccttttcaagtttcctagtcctgctacaagatgagcttcttccgtggtttccttttggaaactcctccttccaacaagcagtgggatcccggggcccagggcgggccggtgttggccgctggggctgttgtaagtcttgctggatgttcccctgttcctgagccttaacccctcgcacagccatcccccccccccgtcctgccatccccccccgccgtcctgccttccccaccccacccttaggtcccaggtagttgctctgaagagtttcagtagagtggccccagggtgatagctcagggaacaacaaaaaaggaattccgtgaaaacatttttttttctttgatgaattactcctgggtcacttccaccactggtaaagccagaacttctccaaaaagaaccttgcaaaaagtccagtgaatcagtcgaatcattctgtggatgccaaagaatattttgaccataatacagcacagcctggacctgacaacttgtcatttggacttttttttaaatggagttctttagcaacaaagtatagaaacatgttcattgcacacacccaaggagaagagctcaagcgcttggaagaggatgctttgctgctgctgaagtgtacctgggtgttagatttcagatcctgggctgagcccactgtgagctttcctaaactgtgagactcacagaggggaaagatactgacggtgaaaccagcatggaaaacgtctttaccatgtggttccctcctccccaaatacataaagcaaataagcaggatggggaacagcttgaccttcatccacccctaactccaaaactatcaaggtacgacagtggcattgtcatcgacactcaatttcatgtgaattttagcaaaacaggaaacaaagataatgactcagttcagaggatcggacaaatgtgtctagtccgggtggactcggagggagtggggtgggcttcaaggattctgggcgttgggatggcatgagctaccctgtagagtttagtctgcctgcccgccttggtagtagtgaccagtcagtgtcagcatcagtgtcccaaccccagtctctgtttactgcctttgaacagaacttcttccttccccatgctttgggtcacctcgggctgcaaccctgtctgtgccagattgcccggtctgaccctgcaggaagcaaagaggtgagcttaaagaacaaccaaactctgccaggggtcccagaaagcccagggtccagcagtctcagcacttggccccttgccccttcacaccatcctggggcaggggctgggcctccctggtggcaggggtgggtggagaattagggagagggtgcaacgagtctggccccttgcctcgggctggctggtgttcttccaagagcctctgctcacattgttggcctctggattctggcccttcttcattggctgttgctttggactggactgttgctgagcctgtgtcctgcagaacccagatgtctgttaggctggctggctgctgcgaggggaggggggtggcctttcatttggggtgccctttcactcccaggccaagccctggagcaatcttcttcaggcagctgtctccacctccaggatgtccagcaggctgcaaggagaaggatgccagccacccatcctcccccagttcccagcctttcccctgttggtcacagccgcttctgtctttttccggtctactgtccccagtgtagagggctttgctgtccctgagactgaggcaggttccttttccaggtcagaggtggaggtagatctttctctcaaccacatctgcctccacacacagctcctccgcagggaaggagaagctgctctgtaactcattctggctatcgtcccccttctcactgacctgaccgcccaccacctccttccccctcatcacatgacaaaggataatgtgcaagaaaagtatttttatgtatcataaatgtattttgaaacaaatgagaagaagaaaggtagaagggtttattttattaaatgagcctgacttagtgacagtgtgtgagcatttgcaatgtaagggcctcagcttccttggagaagccaccccaggtttccagacatagatgttgaattgtttgtggggggtgtgccaggccacgtctcgtgtgtccgtatgcaggcatgcctgtgtatactgtgtatgggcacactgtgggactagctgggacaattcctagagattcaactgcccaattctaaccaacattggcagcggctgaacttggcatttccttgctaactgccagatgtggccaacctttgtccatatgcaaaccactgaaaaatgatctggatttctatagcaaggcccttggggagggcactctcccatgcccttggcctcgctggccacattggccaatgagccagggctggagtctgagacctttggttgttctttaaggcacctcctgccactttctccctcagaggcacaaacactttgtgttccacgtcagtttgaggggacggtggggggatgatatgaatgtcacaggaggagacaccttctgtctttgtttcaaagaaagtgatgtgccatttgttaatatacaagagaaatattgaaaatatattgaaaagagcaattttaaattatttttggcttatgttgcaatatttattttcttgtattagaaaagattcctttgtagagaaaaaatgtatttttcattaacgcaaagacctatttctcctttttgtacattgtccatgtgcgcaacccttaacgagcaatagaatgtatggtcacctgggtgtggccagtgcccgctgtgccctgcatgattctgtgttgccgctgctgcatagttcccagccccatcctgtcctgctcactcatgggggcttccagaccccggccccaccagggcttgtgtcatagggagccctttgcactcctcgtgtgttggcaaacgcagttaataaagcaatgttttctgtg

SEQ ID NO: 290469 - DNA, 6368 bp, Homo sapiens
ggggcgacgaaaatgattattagtcgataccggttgttatttcagtcacgtggctcgtagcggcacctgtaggaacatgatggaagagaagaggcgaaaatactccatcagcagtgacaactctgacaccactgacagtcatgcgacatctacatccgcatcaagatgctccaaactgcccagcagcaccaagtcgggctggccccgacagaacgaaaagaagccctccgaggttttccggacagacttgatcacagccatgaagatcccggactcataccagctcagcccggatgactactacatcctggcagacccatggcgacaggaatgggagaaaggtgtgcaggtgcctgccggggcagaggccatcccagagcccgtggtgaggatcctcccaccactggaaggcccccctgcccaggcatccccgagcagcaccatgcttggtgagggctcccagcctgattggccagggggcagccgctatgacttggacgagattgatgcctactggctggagctcatcaactcggagcttaaggagatggagaggccggagctggacgagctgacattagagcgtgtgctggaggagctggagaccctgtgccaccagaatatggccagggccattgagacgcaggaggggctgggcatcgagtacgacgaggatgttgtctgcgacgtgtgtcgctctcctgagggcgaggatggcaacgagatggtcttctgtgacaagtgcaacgtctgtgtgcatcaggcatgctacgggatcctcaaggtgcccacgggcagctggctgtgccggacgtgtgccctgggtgtccagccaaagtgcctgctctgccccaagcgaggaggagccttgaagcccactagaagtgggaccaagtgggtgcatgtcagctgtgccctatggattcctgaggtcagcatcggctgcccagagaagatggagcccatcaccaagatctcgcatatcccagccagccgctgggctctgtcctgcagcctctgcaaggaatgcacaggcacctgcatccagtgttccatgccttcctgcgtcacagcgttccatgtcacatgcgcctttgaccacggcctggaaatgcggactatattagcagacaacgatgaggtcaagttcaagtcattctgccaggagcacagtgacgggggcccacgtaatgagcccacatctgagcccacggaacccagccaggctggcgaggacctggaaaaggtgaccctgcgcaagcagcggctgcagcagctagaggaggacttctacgagctggtggagccggctgaggtggctgagcggctggacctggctgaggcactggtcgacttcatctaccagtactggaagctgaagaggaaagccaatgccaaccagccgctgctgacccccaagaccgacgaggtggacaacctggcccagcaggagcaggacgtcctctaccgccgcctgaagctcttcacccatctgcggcaggacctagagagggttagaaatctgtgctacatggtgacaaggcgcgagagaacgaaacacgccatctgcaaactccaggagcagatattccacctgcagatgaaacttattgaacaggatctgtgtcgagcaggcctgtccacctcattccccatcgatggcaccttcttcaacagctggctggcacagtcggtgcagatcacagcagagaacatggccatgagcgagtggccactgaacaatgggcaccgcgaggaccctgctccagggctgctgtcagaggaactgctgcaggacgaggagacactgctcagcttcatgcgggacccctcgctgcgacctggtgaccctgctaggaaggcccgaggccgcacccgcctgcctgccaagaagaaaccaccaccaccaccaccgcaggacgggcctggttcacggacgactccagacaaagcccccaagaagacctggggccaggatgcaggcagtggcaaggggggtcaagggccacctaccaggaagccaccacgtcggacatcttctcacttgccgtccagccctgcagccggggactgtcccatcctagccacccctgaaagccccccgccactggcccctgagaccccggacgaggcagcctcagtagctgctgactcagatgtccaagtgcctggccctgcagcaagccctaagcctttgggccggctccggccaccccgcgagagcaaggtaacccggagattgccgggtgccaggcctgatgctgggatgggaccaccttcagctgtggctgagaggcccaaggtcagcctgcattttgacactgagactgatggctacttctctgatggggagatgagcgactcagatgtagaggccgaggacggtggggtgcagcggggtccccgggaggcaggggcagaggaggtggtccgcatgggcgtactggcctcctaactcacccccttccctgtcccaggccctgccctggtccccccacaaggcctcagcccagtcacaactgccatttccagtctctgctgagtgtcccagaccctcgaggctgccactccgtcgtggttttatttttaatatagagagagttttgaattctacactgttgtctttcctctgtgctggcctaggacattaggattccttccacggctccggccgctaggaccctgccaggtcccgcgcaccatccctgccctgcccacgtggtattgctgggctcctggctagatgcaagcaaggtggacaagagctcaggactccagcccactgccactgggtgacacagactgtcgtttgggcattatttcatggcagatgggccagtccagggcctaccccgccttgcccccagatcccactggggtccatttggggggtcctgctacactccaccgatccccaaggaagtataataaacgatacccagccagagtctactcactgtcacaagcacaacgagtttatatgagaaagcactgagggggtgcagagggcccgctagttccaggggaactgaaagctgttcctgatcagcccgtatcatctgaggcctgcctgcccaccctgccaccctcccctcccttgctgctctgcccctgccagtgcccagcccagcggctctgggaaggggttcccagaatccctcctgagctgtgccatttactcaggggactcccaaacagccagctgccagtgcaggtggagggctgtaggggagggccagtgcccagacagggtcatggggctcagaccagcccactgtagagaatcactctgaggctccaacttccttccttccttcggggccagtctcggccgaagtctggtcacgctcagacagagctgaccagaccagaccgtttgccttttcaagtttcctagtcctgctacaagatgagcttcttccgtggtttccttttggaaactcctccttccaacaagcagtgggatcccggggcccagggcgggccggtgttggccgctggggctgttgtaagtcttgctggatgttcccctgttcctgagccttaacccctcgcacagccatcccccccccccgtcctgccatccccccccgccgtcctgccttccccaccccacccttaggtcccaggtagttgctctgaagagtttcagtagagtggccccagggtgatagctcagggaacaacaaaaaaggaattccgtgaaaacatttttttttctttgatgaattactcctgggtcacttccaccactggtaaagccagaacttctccaaaaagaaccttgcaaaaagtccagtgaatcagtcgaatcattctgtggatgccaaagaatattttgaccataatacagcacagcctggacctgacaacttgtcatttggacttttttttaaatggagttctttagcaacaaagtatagaaacatgttcattgcacacacccaaggagaagagctcaagcgcttggaagaggatgctttgctgctgctgaagtgtacctgggtgttagatttcagatcctgggctgagcccactgtgagctttcctaaactgtgagactcacagaggggaaagatactgacggtgaaaccagcatggaaaacgtctttaccatgtggttccctcctccccaaatacataaagcaaataagcaggatggggaacagcttgaccttcatccacccctaactccaaaactatcaaggtacgacagtggcattgtcatcgacactcaatttcatgtgaattttagcaaaacaggaaacaaagataatgactcagttcagaggatcggacaaatgtgtctagtccgggtggactcggagggagtggggtgggcttcaaggattctgggcgttgggatggcatgagctaccctgtagagtttagtctgcctgcccgccttggtagtagtgaccagtcagtgtcagcatcagtgtcccaaccccagtctctgtttactgcctttgaacagaacttcttccttccccatgctttgggtcacctcgggctgcaaccctgtctgtgccagattgcccggtctgaccctgcaggaagcaaagaggtgagcttaaagaacaaccaaactctgccaggggtcccagaaagcccagggtccagcagtctcagcacttggccccttgccccttcacaccatcctggggcaggggctgggcctccctggtggcaggggtgggtggagaattagggagagggtgcaacgagtctggccccttgcctcgggctggctggtgttcttccaagagcctctgctcacattgttggcctctggattctggcccttcttcattggctgttgctttggactggactgttgctgagcctgtgtcctgcagaacccagatgtctgttaggctggctggctgctgcgaggggaggggggtggcctttcatttggggtgccctttcactcccaggccaagccctggagcaatcttcttcaggcagctgtctccacctccaggatgtccagcaggctgcaaggagaaggatgccagccacccatcctcccccagttcccagcctttcccctgttggtcacagccgcttctgtctttttccggtctactgtccccagtgtagagggctttgctgtccctgagactgaggcaggttccttttccaggtcagaggtggaggtagatctttctctcaaccacatctgcctccacacacagctcctccgcagggaaggagaagctgctctgtaactcattctggctatcgtcccccttctcactgacctgaccgcccaccacctccttccccctcatcacatgacaaaggataatgtgcaagaaaagtatttttatgtatcataaatgtattttgaaacaaatgagaagaagaaaggtagaagggtttattttattaaatgagcctgacttagtgacagtgtgtgagcatttgcaatgtaagggcctcagcttccttggagaagccaccccaggtttccagacatagatgttgaattgtttgtggggggtgtgccaggccacgtctcgtgtgtccgtatgcaggcatgcctgtgtatactgtgtatgggcacactgtgggactagctgggacaattcctagagattcaactgcccaattctaaccaacattggcagcggctgaacttggcatttccttgctaactgccagatgtggccaacctttgtccatatgcaaaccactgaaaaatgatctggatttctatagcaaggcccttggggagggcactctcccatgcccttggcctcgctggccacattggccaatgagccagggctggagtctgagacctttggttgttctttaaggcacctcctgccactttctccctcagaggcacaaacactttgtgttccacgtcagtttgaggggacggtggggggatgatatgaatgtcacaggaggagacaccttctgtctttgtttcaaagaaagtgatgtgccatttgttaatatacaagagaaatattgaaaatatattgaaaagagcaattttaaattatttttggcttatgttgcaatatttattttcttgtattagaaaagattcctttgtagagaaaaaatgtatttttcattaacgcaaagacctatttctcctttttgtacattgtccatgtgcgcaacccttaacgagcaatagaatgtatggtcacctgggtgtggccagtgcccgctgtgccctgcatgattctgtgttgccgctgctgcatagttcccagccccatcctgtcctgctcactcatgggggcttccagaccccggccccaccagggcttgtgtcatagggagccctttgcactcctcgtgtgttggcaaacgcagttaataaagcaatgttttctgtg

SEQ ID NO: 290470 - DNA, 6195 bp, Homo sapiens
  misc_feature (33)..(33): n is a, c, g, or t
  misc_feature (47)..(47): n is a, c, g, or t
agtagctgttctatgaggatcccagcatcactngactcgaagacganagaagcctccgagttttccggacagacttgatcacagccatgaagatcccggactcataccagctcagcccggatgactactacatcctggcagacccatggcgacaggaatgggagaaaggtgtgcaggtgcctgccggggcagaggccatcccagagcccgtggtgaggatcctcccaccactggaaggcccccctgcccaggcatccccgagcagcaccatgcttggtgagggctcccagcctgattggccagggggcagccgctatgacttggacgagattgatgcctactggctggagctcatcaactcggagcttaaggagatggagaggccggagctggacgagctgacattagagcgtgtgctggaggagctggagaccctgtgccaccagaatatggccagggccattgagacgcaggaggggctgggcatcgagtacgacgaggatgttgtctgcgacgtgtgtcgctctcctgagggcgaggatggcaacgagatggtcttctgtgacaagtgcaacgtctgtgtgcatcaggcatgctacgggatcctcaaggtgcccacgggcagctggctgtgccggacgtgtgccctgggtgtccagccaaagtgcctgctctgccccaagcgaggaggagccttgaagcccactagaagtgggaccaagtgggtgcatgtcagctgtgccctatggattcctgaggtcagcatcggctgcccagagaagatggagcccatcaccaagatctcgcatatcccagccagccgctgggctctgtcctgcagcctctgcaaggaatgcacaggcacctgcatccagtgttccatgccttcctgcgtcacagcgttccatgtcacatgcgcctttgaccacggcctggaaatgcggactatattagcagacaacgatgaggtcaagttcaagtcattctgccaggagcacagtgacgggggcccacgtaatgagcccacatctgagcccacggaacccagccaggctggcgaggacctggaaaaggtgaccctgcgcaagcagcggctgcagcagctagaggaggacttctacgagctggtggagccggctgaggtggctgagcggctggacctggctgaggcactggtcgacttcatctaccagtactggaagctgaagaggaaagccaatgccaaccagccgctgctgacccccaagaccgacgaggtggacaacctggcccagcaggagcaggacgtcctctaccgccgcctgaagctcttcacccatctgcggcaggacctagagagggttagaaatctgtgctacatggtgacaaggcgcgagagaacgaaacacgccatctgcaaactccaggagcagatattccacctgcagatgaaacttattgaacaggatctgtgtcgagcaggcctgtccacctcattccccatcgatggcaccttcttcaacagctggctggcacagtcggtgcagatcacagcagagaacatggccatgagcgagtggccactgaacaatgggcaccgcgaggaccctgctccagggctgctgtcagaggaactgctgcaggacgaggagacactgctcagcttcatgcgggacccctcgctgcgacctggtgaccctgctaggaaggcccgaggccgcacccgcctgcctgccaagaagaaaccaccaccaccaccaccgcaggacgggcctggttcacggacgactccagacaaagcccccaagaagacctggggccaggatgcaggcagtggcaaggggggtcaagggccacctaccaggaagccaccacgtcggacatcttctcacttgccgtccagccctgcagccggggactgtcccatcctagccacccctgaaagccccccgccactggcccctgagaccccggacgaggcagcctcagtagctgctgactcagatgtccaagtgcctggccctgcagcaagccctaagcctttgggccggctccggccaccccgcgagagcaaggtaacccggagattgccgggtgccaggcctgatgctgggatgggaccaccttcagctgtggctgagaggcccaaggtcagcctgcattttgacactgagactgatggctacttctctgatggggagatgagcgactcagatgtagaggccgaggacggtggggtgcagcggggtccccgggaggcaggggcagaggaggtggtccgcatgggcgtactggcctcctaactcacccccttccctgtcccaggccctgccctggtccccccacaaggcctcagcccagtcacaactgccatttccagtctctgctgagtgtcccagaccctcgaggctgccactccgtcgtggttttatttttaatatagagagagttttgaattctacactgttgtctttcctctgtgctggcctaggacattaggattccttccacggctccggccgctaggaccctgccaggtcccgcgcaccatccctgccctgcccacgtggtattgctgggctcctggctagatgcaagcaaggtggacaagagctcaggactccagcccactgccactgggtgacacagactgtcgtttgggcattatttcatggcagatgggccagtccagggcctaccccgccttgcccccagatcccactggggtccatttggggggtcctgctacactccaccgatccccaaggaagtataataaacgatacccagccagagtctactcactgtcacaagcacaacgagtttatatgagaaagcactgagggggtgcagagggcccgctagttccaggggaactgaaagctgttcctgatcagcccgtatcatctgaggcctgcctgcccaccctgccaccctcccctcccttgctgctctgcccctgccagtgcccagcccagcggctctgggaaggggttcccagaatccctcctgagctgtgccatttactcaggggactcccaaacagccagctgccagtgcaggtggagggctgtaggggagggccagtgcccagacagggtcatggggctcagaccagcccactgtagagaatcactctgaggctccaacttccttccttccttcggggccagtctcggccgaagtctggtcacgctcagacagagctgaccagaccagaccgtttgccttttcaagtttcctagtcctgctacaagatgagcttcttccgtggtttccttttggaaactcctccttccaacaagcagtgggatcccggggcccagggcgggccggtgttggccgctggggctgttgtaagtcttgctggatgttcccctgttcctgagccttaacccctcgcacagccatcccccccccccgtcctgccatccccccccgccgtcctgccttccccaccccacccttaggtcccaggtagttgctctgaagagtttcagtagagtggccccagggtgatagctcagggaacaacaaaaaaggaattccgtgaaaacatttttttttctttgatgaattactcctgggtcacttccaccactggtaaagccagaacttctccaaaaagaaccttgcaaaaagtccagtgaatcagtcgaatcattctgtggatgccaaagaatattttgaccataatacagcacagcctggacctgacaacttgtcatttggacttttttttaaatggagttctttagcaacaaagtatagaaacatgttcattgcacacacccaaggagaagagctcaagcgcttggaagaggatgctttgctgctgctgaagtgtacctgggtgttagatttcagatcctgggctgagcccactgtgagctttcctaaactgtgagactcacagaggggaaagatactgacggtgaaaccagcatggaaaacgtctttaccatgtggttccctcctccccaaatacataaagcaaataagcaggatggggaacagcttgaccttcatccacccctaactccaaaactatcaaggtacgacagtggcattgtcatcgacactcaatttcatgtgaattttagcaaaacaggaaacaaagataatgactcagttcagaggatcggacaaatgtgtctagtccgggtggactcggagggagtggggtgggcttcaaggattctgggcgttgggatggcatgagctaccctgtagagtttagtctgcctgcccgccttggtagtagtgaccagtcagtgtcagcatcagtgtcccaaccccagtctctgtttactgcctttgaacagaacttcttccttccccatgctttgggtcacctcgggctgcaaccctgtctgtgccagattgcccggtctgaccctgcaggaagcaaagaggtgagcttaaagaacaaccaaactctgccaggggtcccagaaagcccagggtccagcagtctcagcacttggccccttgccccttcacaccatcctggggcaggggctgggcctccctggtggcaggggtgggtggagaattagggagagggtgcaacgagtctggccccttgcctcgggctggctggtgttcttccaagagcctctgctcacattgttggcctctggattctggcccttcttcattggctgttgctttggactggactgttgctgagcctgtgtcctgcagaacccagatgtctgttaggctggctggctgctgcgaggggaggggggtggcctttcatttggggtgccctttcactcccaggccaagccctggagcaatcttcttcaggcagctgtctccacctccaggatgtccagcaggctgcaaggagaaggatgccagccacccatcctcccccagttcccagcctttcccctgttggtcacagccgcttctgtctttttccggtctactgtccccagtgtagagggctttgctgtccctgagactgaggcaggttccttttccaggtcagaggtggaggtagatctttctctcaaccacatctgcctccacacacagctcctccgcagggaaggagaagctgctctgtaactcattctggctatcgtcccccttctcactgacctgaccgcccaccacctccttccccctcatcacatgacaaaggataatgtgcaagaaaagtatttttatgtatcataaatgtattttgaaacaaatgagaagaagaaaggtagaagggtttattttattaaatgagcctgacttagtgacagtgtgtgagcatttgcaatgtaagggcctcagcttccttggagaagccaccccaggtttccagacatagatgttgaattgtttgtggggggtgtgccaggccacgtctcgtgtgtccgtatgcaggcatgcctgtgtatactgtgtatgggcacactgtgggactagctgggacaattcctagagattcaactgcccaattctaaccaacattggcagcggctgaacttggcatttccttgctaactgccagatgtggccaacctttgtccatatgcaaaccactgaaaaatgatctggatttctatagcaaggcccttggggagggcactctcccatgcccttggcctcgctggccacattggccaatgagccagggctggagtctgagacctttggttgttctttaaggcacctcctgccactttctccctcagaggcacaaacactttgtgttccacgtcagtttgaggggacggtggggggatgatatgaatgtcacaggaggagacaccttctgtctttgtttcaaagaaagtgatgtgccatttgttaatatacaagagaaatattgaaaatatattgaaaagagcaattttaaattatttttggcttatgttgcaatatttattttcttgtattagaaaagattcctttgtagagaaaaaatgtatttttcattaacgcaaagacctatttctcctttttgtacattgtccatgtgcgcaacccttaacgagcaatagaatgtatggtcacctgggtgtggccagtgcccgctgtgccctgcatgattctgtgttgccgctgctgcatagttcccagccccatcctgtcctgctcactcatgggggcttccagaccccggccccaccagggcttgtgtcatagggagccctttgcactcctcgtgtgttggcaaacgcagttaataaagcaatgttttctgtg

SEQ ID NO: 290471 - DNA, 6756 bp, Homo sapiens
gaacatacacagggggttggtgaatggtgccgaccgcggccatcgcagttggaggctattttttggggggggtgagtagcgtccatggagttactttgcgcccactcctagcggcaccggcttaggtcctgcgggccgaccgtccccggcggggggcgtggggcctgggacgccgcgggcccggcgcctccctcgccgcgacccggatggatgcgcgccccccgccctcccgcgccggccccaggagctcccggcttcgggagcatccttcccgcgccggtccctgcagcggcgcgtagccgagggcagcgcccgtcaggggggcaccgcggagcaagatggaagagaagaggcgaaaatactccatcagcagtgacaactctgacaccactgacagtcatgcgacatctacatccgcatcaagatgctccaaactgcccagcagcaccaagtcgggctggccccgacagaacgaaaagaagccctccgaggttttccggacagacttgatcacagccatgaagatcccggactcataccagctcagcccggatgactactacatcctggcagacccatggcgacaggaatgggagaaaggtgtgcaggtgcctgccggggcagaggccatcccagagcccgtggtgaggatcctcccaccactggaaggcccccctgcccaggcatccccgagcagcaccatgcttggtgagggctcccagcctgattggccagggggcagccgctatgacttggacgagattgatgcctactggctggagctcatcaactcggagcttaaggagatggagaggccggagctggacgagctgacattagagcgtgtgctggaggagctggagaccctgtgccaccagaatatggccagggccattgagacgcaggaggggctgggcatcgagtacgacgaggatgttgtctgcgacgtgtgtcgctctcctgagggcgaggatggcaacgagatggtcttctgtgacaagtgcaacgtctgtgtgcatcaggcatgctacgggatcctcaaggtgcccacgggcagctggctgtgccggacgtgtgccctgggtgtccagccaaagtgcctgctctgccccaagcgaggaggagccttgaagcccactagaagtgggaccaagtgggtgcatgtcagctgtgccctatggattcctgaggtcagcatcggctgcccagagaagatggagcccatcaccaagatctcgcatatcccagccagccgctgggctctgtcctgcagcctctgcaaggaatgcacaggcacctgcatccagtgttccatgccttcctgcgtcacagcgttccatgtcacatgcgcctttgaccacggcctggaaatgcggactatattagcagacaacgatgaggtcaagttcaagtcattctgccaggagcacagtgacgggggcccacgtaatgagcccacatctgagcccacggaacccagccaggctggcgaggacctggaaaaggtgaccctgcgcaagcagcggctgcagcagctagaggaggacttctacgagctggtggagccggctgaggtggctgagcggctggacctggctgaggcactggtcgacttcatctaccagtactggaagctgaagaggaaagccaatgccaaccagccgctgctgacccccaagaccgacgaggtggacaacctggcccagcaggagcaggacgtcctctaccgccgcctgaagctcttcacccatctgcggcaggacctagagagggttagaaatctgtgctacatggtgacaaggcgcgagagaacgaaacacgccatctgcaaactccaggagcagatattccacctgcagatgaaacttattgaacaggatctgtgtcgagagcggtctgggaggagagcaaagggcaagaagagtgactcgaagaggaagggctgcgagggctccaagggcagcactgagaagaaagagaaagtgaaggcggggcctgactcagtcctggggcagctggcaggcctgtccacctcattccccatcgatggcaccttcttcaacagctggctggcacagtcggtgcagatcacagcagagaacatggccatgagcgagtggccactgaacaatgggcaccgcgaggaccctgctccagggctgctgtcagaggaactgctgcaggacgaggagacactgctcagcttcatgcgggacccctcgctgcgacctggtgaccctgctaggaaggcccgaggccgcacccgcctgcctgccaagaagaaaccaccaccaccaccaccgcaggacgggcctggttcacggacgactccagacaaagcccccaagaagacctggggccaggatgcaggcagtggcaaggggggtcaagggccacctaccaggaagccaccacgtcggacatcttctcacttgccgtccagccctgcagccggggactgtcccatcctagccacccctgaaagccccccgccactggcccctgagaccccggacgaggcagcctcagtagctgctgactcagatgtccaagtgcctggccctgcagcaagccctaagcctttgggccggctccggccaccccgcgagagcaaggtaacccggagattgccgggtgccaggcctgatgctgggatgggaccaccttcagctgtggctgagaggcccaaggtcagcctgcattttgacactgagactgatggctacttctctgatggggagatgagcgactcagatgtagaggccgaggacggtggggtgcagcggggtccccgggaggcaggggcagaggaggtggtccgcatgggcgtactggcctcctaactcacccccttccctgtcccaggccctgccctggtccccccacaaggcctcagcccagtcacaactgccatttccagtctctgctgagtgtcccagaccctcgaggctgccactccgtcgtggttttatttttaatatagagagagttttgaattctacactgttgtctttcctctgtgctggcctaggacattaggattccttccacggctccggccgctaggaccctgccaggtcccgcgcaccatccctgccctgcccacgtggtattgctgggctcctggctagatgcaagcaaggtggacaagagctcaggactccagcccactgccactgggtgacacagactgtcgtttgggcattatttcatggcagatgggccagtccagggcctaccccgccttgcccccagatcccactggggtccatttggggggtcctgctacactccaccgatccccaaggaagtataataaacgatacccagccagagtctactcactgtcacaagcacaacgagtttatatgagaaagcactgagggggtgcagagggcccgctagttccaggggaactgaaagctgttcctgatcagcccgtatcatctgaggcctgcctgcccaccctgccaccctcccctcccttgctgctctgcccctgccagtgcccagcccagcggctctgggaaggggttcccagaatccctcctgagctgtgccatttactcaggggactcccaaacagccagctgccagtgcaggtggagggctgtaggggagggccagtgcccagacagggtcatggggctcagaccagcccactgtagagaatcactctgaggctccaacttccttccttccttcggggccagtctcggccgaagtctggtcacgctcagacagagctgaccagaccagaccgtttgccttttcaagtttcctagtcctgctacaagatgagcttcttccgtggtttccttttggaaactcctccttccaacaagcagtgggatcccggggcccagggcgggccggtgttggccgctggggctgttgtaagtcttgctggatgttcccctgttcctgagccttaacccctcgcacagccatcccccccccccgtcctgccatccccccccgccgtcctgccttccccaccccacccttaggtcccaggtagttgctctgaagagtttcagtagagtggccccagggtgatagctcagggaacaacaaaaaaggaattccgtgaaaacatttttttttctttgatgaattactcctgggtcacttccaccactggtaaagccagaacttctccaaaaagaaccttgcaaaaagtccagtgaatcagtcgaatcattctgtggatgccaaagaatattttgaccataatacagcacagcctggacctgacaacttgtcatttggacttttttttaaatggagttctttagcaacaaagtatagaaacatgttcattgcacacacccaaggagaagagctcaagcgcttggaagaggatgctttgctgctgctgaagtgtacctgggtgttagatttcagatcctgggctgagcccactgtgagctttcctaaactgtgagactcacagaggggaaagatactgacggtgaaaccagcatggaaaacgtctttaccatgtggttccctcctccccaaatacataaagcaaataagcaggatggggaacagcttgaccttcatccacccctaactccaaaactatcaaggtacgacagtggcattgtcatcgacactcaatttcatgtgaattttagcaaaacaggaaacaaagataatgactcagttcagaggatcggacaaatgtgtctagtccgggtggactcggagggagtggggtgggcttcaaggattctgggcgttgggatggcatgagctaccctgtagagtttagtctgcctgcccgccttggtagtagtgaccagtcagtgtcagcatcagtgtcccaaccccagtctctgtttactgcctttgaacagaacttcttccttccccatgctttgggtcacctcgggctgcaaccctgtctgtgccagattgcccggtctgaccctgcaggaagcaaagaggtgagcttaaagaacaaccaaactctgccaggggtcccagaaagcccagggtccagcagtctcagcacttggccccttgccccttcacaccatcctggggcaggggctgggcctccctggtggcaggggtgggtggagaattagggagagggtgcaacgagtctggccccttgcctcgggctggctggtgttcttccaagagcctctgctcacattgttggcctctggattctggcccttcttcattggctgttgctttggactggactgttgctgagcctgtgtcctgcagaacccagatgtctgttaggctggctggctgctgcgaggggaggggggtggcctttcatttggggtgccctttcactcccaggccaagccctggagcaatcttcttcaggcagctgtctccacctccaggatgtccagcaggctgcaaggagaaggatgccagccacccatcctcccccagttcccagcctttcccctgttggtcacagccgcttctgtctttttccggtctactgtccccagtgtagagggctttgctgtccctgagactgaggcaggttccttttccaggtcagaggtggaggtagatctttctctcaaccacatctgcctccacacacagctcctccgcagggaaggagaagctgctctgtaactcattctggctatcgtcccccttctcactgacctgaccgcccaccacctccttccccctcatcacatgacaaaggataatgtgcaagaaaagtatttttatgtatcataaatgtattttgaaacaaatgagaagaagaaaggtagaagggtttattttattaaatgagcctgacttagtgacagtgtgtgagcatttgcaatgtaagggcctcagcttccttggagaagccaccccaggtttccagacatagatgttgaattgtttgtggggggtgtgccaggccacgtctcgtgtgtccgtatgcaggcatgcctgtgtatactgtgtatgggcacactgtgggactagctgggacaattcctagagattcaactgcccaattctaaccaacattggcagcggctgaacttggcatttccttgctaactgccagatgtggccaacctttgtccatatgcaaaccactgaaaaatgatctggatttctatagcaaggcccttggggagggcactctcccatgcccttggcctcgctggccacattggccaatgagccagggctggagtctgagacctttggttgttctttaaggcacctcctgccactttctccctcagaggcacaaacactttgtgttccacgtcagtttgaggggacggtggggggatgatatgaatgtcacaggaggagacaccttctgtctttgtttcaaagaaagtgatgtgccatttgttaatatacaagagaaatattgaaaatatattgaaaagagcaattttaaattatttttggcttatgttgcaatatttattttcttgtattagaaaagattcctttgtagagaaaaaatgtatttttcattaacgcaaagacctatttctcctttttgtacattgtccatgtgcgcaacccttaacgagcaatagaatgtatggtcacctgggtgtggccagtgcccgctgtgccctgcatgattctgtgttgccgctgctgcatagttcccagccccatcctgtcctgctcactcatgggggcttccagaccccggccccaccagggcttgtgtcatagggagccctttgcactcctcgtgtgttggcaaacgcagttaataaagcaatgttttctgtg

SEQ ID NO: 290472 - DNA, 6371 bp, Homo sapiens
gaacatacacagggggttggtgaatggtgccgaccgcggccatcgcagttggaggctattttttggggggggtgagtagcgtccatggagttactttgcgcccactcctagcggcaccggcttaggtcctgcgggccgaccgtccccggcggggggcgtggggcctgggacgccgcgggcccggcgcctccctcgccgcgacccggatggatgcgcgccccccgccctcccgcgccggccccaggagctcccggcttcgggagcatccttcccgcgccggtccctgcagcggcgcgtagccgagggcagcgcccgtcaggggggcaccgcggagcaagatggaagagaagaggcgaaaatactccatcagcagtgacaactctgacaccactgacagtcatgcgacatctacatccgcatcaagatgctccaaactgcccagcagcaccaagtcgggctggccccgacagaacgaaaagaagccctccgaggttttccggacagacttgatcacagccatgaagatcccggactcataccagctcagcccggatgactactacatcctggcagacccatggcgacaggaatgggagaaaggtgtgcaggtgcctgccggggcagaggccatcccagagcccgtggtgaggatcctcccaccactggaaggcccccctgcccaggcatccccgagcagcaccatgcttggtgagggctcccagcctgattggccagggggcagccgctatgacttggacgagattgatgcctactggctggagctcatcaactcggagcttaaggagatggagaggccggagctggacgagctgacattagagcgtgtgctggaggagctggagaccctgtgccaccagaatatggccagggccattgagacgcaggaggggctgggcatcgatgttccatgccttcctgcgtcacagcgttccatgtcacatgcgcctttgaccacggcctggaaatgcggactatattagcagacaacgatgaggtcaagttcaagtcattctgccaggagcacagtgacgggggcccacgtaatgagcccacatctgagcccacggaacccagccaggctggcgaggacctggaaaaggtgaccctgcgcaagcagcggctgcagcagctagaggaggacttctacgagctggtggagccggctgaggtggctgagcggctggacctggctgaggcactggtcgacttcatctaccagtactggaagctgaagaggaaagccaatgccaaccagccgctgctgacccccaagaccgacgaggtggacaacctggcccagcaggagcaggacgtcctctaccgccgcctgaagctcttcacccatctgcggcaggacctagagagggttagaaatctgtgctacatggtgacaaggcgcgagagaacgaaacacgccatctgcaaactccaggagcagatattccacctgcagatgaaacttattgaacaggatctgtgtcgagagcggtctgggaggagagcaaagggcaagaagagtgactcgaagaggaagggctgcgagggctccaagggcagcactgagaagaaagagaaagtgaaggcggggcctgactcagtcctggggcagctggcaggcctgtccacctcattccccatcgatggcaccttcttcaacagctggctggcacagtcggtgcagatcacagcagagaacatggccatgagcgagtggccactgaacaatgggcaccgcgaggaccctgctccagggctgctgtcagaggaactgctgcaggacgaggagacactgctcagcttcatgcgggacccctcgctgcgacctggtgaccctgctaggaaggcccgaggccgcacccgcctgcctgccaagaagaaaccaccaccaccaccaccgcaggacgggcctggttcacggacgactccagacaaagcccccaagaagacctggggccaggatgcaggcagtggcaaggggggtcaagggccacctaccaggaagccaccacgtcggacatcttctcacttgccgtccagccctgcagccggggactgtcccatcctagccacccctgaaagccccccgccactggcccctgagaccccggacgaggcagcctcagtagctgctgactcagatgtccaagtgcctggccctgcagcaagccctaagcctttgggccggctccggccaccccgcgagagcaaggtaacccggagattgccgggtgccaggcctgatgctgggatgggaccaccttcagctgtggctgagaggcccaaggtcagcctgcattttgacactgagactgatggctacttctctgatggggagatgagcgactcagatgtagaggccgaggacggtggggtgcagcggggtccccgggaggcaggggcagaggaggtggtccgcatgggcgtactggcctcctaactcacccccttccctgtcccaggccctgccctggtccccccacaaggcctcagcccagtcacaactgccatttccagtctctgctgagtgtcccagaccctcgaggctgccactccgtcgtggttttatttttaatatagagagagttttgaattctacactgttgtctttcctctgtgctggcctaggacattaggattccttccacggctccggccgctaggaccctgccaggtcccgcgcaccatccctgccctgcccacgtggtattgctgggctcctggctagatgcaagcaaggtggacaagagctcaggactccagcccactgccactgggtgacacagactgtcgtttgggcattatttcatggcagatgggccagtccagggcctaccccgccttgcccccagatcccactggggtccatttggggggtcctgctacactccaccgatccccaaggaagtataataaacgatacccagccagagtctactcactgtcacaagcacaacgagtttatatgagaaagcactgagggggtgcagagggcccgctagttccaggggaactgaaagctgttcctgatcagcccgtatcatctgaggcctgcctgcccaccctgccaccctcccctcccttgctgctctgcccctgccagtgcccagcccagcggctctgggaaggggttcccagaatccctcctgagctgtgccatttactcaggggactcccaaacagccagctgccagtgcaggtggagggctgtaggggagggccagtgcccagacagggtcatggggctcagaccagcccactgtagagaatcactctgaggctccaacttccttccttccttcggggccagtctcggccgaagtctggtcacgctcagacagagctgaccagaccagaccgtttgccttttcaagtttcctagtcctgctacaagatgagcttcttccgtggtttccttttggaaactcctccttccaacaagcagtgggatcccggggcccagggcgggccggtgttggccgctggggctgttgtaagtcttgctggatgttcccctgttcctgagccttaacccctcgcacagccatcccccccccccgtcctgccatccccccccgccgtcctgccttccccaccccacccttaggtcccaggtagttgctctgaagagtttcagtagagtggccccagggtgatagctcagggaacaacaaaaaaggaattccgtgaaaacatttttttttctttgatgaattactcctgggtcacttccaccactggtaaagccagaacttctccaaaaagaaccttgcaaaaagtccagtgaatcagtcgaatcattctgtggatgccaaagaatattttgaccataatacagcacagcctggacctgacaacttgtcatttggacttttttttaaatggagttctttagcaacaaagtatagaaacatgttcattgcacacacccaaggagaagagctcaagcgcttggaagaggatgctttgctgctgctgaagtgtacctgggtgttagatttcagatcctgggctgagcccactgtgagctttcctaaactgtgagactcacagaggggaaagatactgacggtgaaaccagcatggaaaacgtctttaccatgtggttccctcctccccaaatacataaagcaaataagcaggatggggaacagcttgaccttcatccacccctaactccaaaactatcaaggtacgacagtggcattgtcatcgacactcaatttcatgtgaattttagcaaaacaggaaacaaagataatgactcagttcagaggatcggacaaatgtgtctagtccgggtggactcggagggagtggggtgggcttcaaggattctgggcgttgggatggcatgagctaccctgtagagtttagtctgcctgcccgccttggtagtagtgaccagtcagtgtcagcatcagtgtcccaaccccagtctctgtttactgcctttgaacagaacttcttccttccccatgctttgggtcacctcgggctgcaaccctgtctgtgccagattgcccggtctgaccctgcaggaagcaaagaggtgagcttaaagaacaaccaaactctgccaggggtcccagaaagcccagggtccagcagtctcagcacttggccccttgccccttcacaccatcctggggcaggggctgggcctccctggtggcaggggtgggtggagaattagggagagggtgcaacgagtctggccccttgcctcgggctggctggtgttcttccaagagcctctgctcacattgttggcctctggattctggcccttcttcattggctgttgctttggactggactgttgctgagcctgtgtcctgcagaacccagatgtctgttaggctggctggctgctgcgaggggaggggggtggcctttcatttggggtgccctttcactcccaggccaagccctggagcaatcttcttcaggcagctgtctccacctccaggatgtccagcaggctgcaaggagaaggatgccagccacccatcctcccccagttcccagcctttcccctgttggtcacagccgcttctgtctttttccggtctactgtccccagtgtagagggctttgctgtccctgagactgaggcaggttccttttccaggtcagaggtggaggtagatctttctctcaaccacatctgcctccacacacagctcctccgcagggaaggagaagctgctctgtaactcattctggctatcgtcccccttctcactgacctgaccgcccaccacctccttccccctcatcacatgacaaaggataatgtgcaagaaaagtatttttatgtatcataaatgtattttgaaacaaatgagaagaagaaaggtagaagggtttattttattaaatgagcctgacttagtgacagtgtgtgagcatttgcaatgtaagggcctcagcttccttggagaagccaccccaggtttccagacatagatgttgaattgtttgtggggggtgtgccaggccacgtctcgtgtgtccgtatgcaggcatgcctgtgtatactgtgtatgggcacactgtgggactagctgggacaattcctagagattcaactgcccaattctaaccaacattggcagcggctgaacttggcatttccttgctaactgccagatgtggccaacctttgtccatatgcaaaccactgaaaaatgatctggatttctatagcaaggcccttggggagggcactctcccatgcccttggcctcgctggccacattggccaatgagccagggctggagtctgagacctttggttgttctttaaggcacctcctgccactttctccctcagaggcacaaacactttgtgttccacgtcagtttgaggggacggtggggggatgatatgaatgtcacaggaggagacaccttctgtctttgtttcaaagaaagtgatgtgccatttgttaatatacaagagaaatattgaaaatatattgaaaagagcaattttaaattatttttggcttatgttgcaatatttattttcttgtattagaaaagattcctttgtagagaaaaaatgtatttttcattaacgcaaagacctatttctcctttttgtacattgtccatgtgcgcaacccttaacgagcaatagaatgtatggtcacctgggtgtggccagtgcccgctgtgccctgcatgattctgtgttgccgctgctgcatagttcccagccccatcctgtcctgctcactcatgggggcttccagaccccggccccaccagggcttgtgtcatagggagccctttgcactcctcgtgtgttggcaaacgcagttaataaagcaatgttttctgtg

SEQ ID NO: 290473 - DNA, 5161 bp, Homo sapiens
tctgctcgtccataagcgcgtctggtccagtactggaagctgaagaggaaagccaatgccaaccagccgctgctgacccccaagaccgacgaggtggacaacctggcccagcaggagcaggacgtcctctaccgccgcctgaagctcttcacccatctgcggcaggacctagagagggttagaaatctgtgctacatggtgacaaggcgcgagagaacgaaacacgccatctgcaaactccaggagcagatattccacctgcagatgaaacttattgaacaggatctgtgtcgagagcggtctgggaggagagcaaagggcaagaagagtgactcgaagaggaagggctgcgagggctccaagggcagcactgagaagaaagagaaagtgaaggcggggcctgactcagtcctggggcagctggcaggcctgtccacctcattccccatcgatggcaccttcttcaacagctggctggcacagtcggtgcagatcacagcagagaacatggccatgagcgagtggccactgaacaatgggcaccgcgaggaccctgctccagggctgctgtcagaggaactgctgcaggacgaggagacactgctcagcttcatgcgggacccctcgctgcgacctggtgaccctgctaggaaggcccgaggccgcacccgcctgcctgccaagaagaaaccaccaccaccaccaccgcaggacgggcctggttcacggacgactccagacaaagcccccaagaagacctggggccaggatgcaggcagtggcaaggggggtcaagggccacctaccaggaagccaccacgtcggacatcttctcacttgccgtccagccctgcagccggggactgtcccatcctagccacccctgaaagccccccgccactggcccctgagaccccggacgaggcagcctcagtagctgctgactcagatgtccaagtgcctggccctgcagcaagccctaagcctttgggccggctccggccaccccgcgagagcaaggtaacccggagattgccgggtgccaggcctgatgctgggatgggaccaccttcagctgtggctgagaggcccaaggtcagcctgcattttgacactgagactgatggctacttctctgatggggagatgagcgactcagatgtagaggccgaggacggtggggtgcagcggggtccccgggaggcaggggcagaggaggtggtccgcatgggcgtactggcctcctaactcacccccttccctgtcccaggccctgccctggtccccccacaaggcctcagcccagtcacaactgccatttccagtctctgctgagtgtcccagaccctcgaggctgccactccgtcgtggttttatttttaatatagagagagttttgaattctacactgttgtctttcctctgtgctggcctaggacattaggattccttccacggctccggccgctaggaccctgccaggtcccgcgcaccatccctgccctgcccacgtggtattgctgggctcctggctagatgcaagcaaggtggacaagagctcaggactccagcccactgccactgggtgacacagactgtcgtttgggcattatttcatggcagatgggccagtccagggcctaccccgccttgcccccagatcccactggggtccatttggggggtcctgctacactccaccgatccccaaggaagtataataaacgatacccagccagagtctactcactgtcacaagcacaacgagtttatatgagaaagcactgagggggtgcagagggcccgctagttccaggggaactgaaagctgttcctgatcagcccgtatcatctgaggcctgcctgcccaccctgccaccctcccctcccttgctgctctgcccctgccagtgcccagcccagcggctctgggaaggggttcccagaatccctcctgagctgtgccatttactcaggggactcccaaacagccagctgccagtgcaggtggagggctgtaggggagggccagtgcccagacagggtcatggggctcagaccagcccactgtagagaatcactctgaggctccaacttccttccttccttcggggccagtctcggccgaagtctggtcacgctcagacagagctgaccagaccagaccgtttgccttttcaagtttcctagtcctgctacaagatgagcttcttccgtggtttccttttggaaactcctccttccaacaagcagtgggatcccggggcccagggcgggccggtgttggccgctggggctgttgtaagtcttgctggatgttcccctgttcctgagccttaacccctcgcacagccatcccccccccccgtcctgccatccccccccgccgtcctgccttccccaccccacccttaggtcccaggtagttgctctgaagagtttcagtagagtggccccagggtgatagctcagggaacaacaaaaaaggaattccgtgaaaacatttttttttctttgatgaattactcctgggtcacttccaccactggtaaagccagaacttctccaaaaagaaccttgcaaaaagtccagtgaatcagtcgaatcattctgtggatgccaaagaatattttgaccataatacagcacagcctggacctgacaacttgtcatttggacttttttttaaatggagttctttagcaacaaagtatagaaacatgttcattgcacacacccaaggagaagagctcaagcgcttggaagaggatgctttgctgctgctgaagtgtacctgggtgttagatttcagatcctgggctgagcccactgtgagctttcctaaactgtgagactcacagaggggaaagatactgacggtgaaaccagcatggaaaacgtctttaccatgtggttccctcctccccaaatacataaagcaaataagcaggatggggaacagcttgaccttcatccacccctaactccaaaactatcaaggtacgacagtggcattgtcatcgacactcaatttcatgtgaattttagcaaaacaggaaacaaagataatgactcagttcagaggatcggacaaatgtgtctagtccgggtggactcggagggagtggggtgggcttcaaggattctgggcgttgggatggcatgagctaccctgtagagtttagtctgcctgcccgccttggtagtagtgaccagtcagtgtcagcatcagtgtcccaaccccagtctctgtttactgcctttgaacagaacttcttccttccccatgctttgggtcacctcgggctgcaaccctgtctgtgccagattgcccggtctgaccctgcaggaagcaaagaggtgagcttaaagaacaaccaaactctgccaggggtcccagaaagcccagggtccagcagtctcagcacttggccccttgccccttcacaccatcctggggcaggggctgggcctccctggtggcaggggtgggtggagaattagggagagggtgcaacgagtctggccccttgcctcgggctggctggtgttcttccaagagcctctgctcacattgttggcctctggattctggcccttcttcattggctgttgctttggactggactgttgctgagcctgtgtcctgcagaacccagatgtctgttaggctggctggctgctgcgaggggaggggggtggcctttcatttggggtgccctttcactcccaggccaagccctggagcaatcttcttcaggcagctgtctccacctccaggatgtccagcaggctgcaaggagaaggatgccagccacccatcctcccccagttcccagcctttcccctgttggtcacagccgcttctgtctttttccggtctactgtccccagtgtagagggctttgctgtccctgagactgaggcaggttccttttccaggtcagaggtggaggtagatctttctctcaaccacatctgcctccacacacagctcctccgcagggaaggagaagctgctctgtaactcattctggctatcgtcccccttctcactgacctgaccgcccaccacctccttccccctcatcacatgacaaaggataatgtgcaagaaaagtatttttatgtatcataaatgtattttgaaacaaatgagaagaagaaaggtagaagggtttattttattaaatgagcctgacttagtgacagtgtgtgagcatttgcaatgtaagggcctcagcttccttggagaagccaccccaggtttccagacatagatgttgaattgtttgtggggggtgtgccaggccacgtctcgtgtgtccgtatgcaggcatgcctgtgtatactgtgtatgggcacactgtgggactagctgggacaattcctagagattcaactgcccaattctaaccaacattggcagcggctgaacttggcatttccttgctaactgccagatgtggccaacctttgtccatatgcaaaccactgaaaaatgatctggatttctatagcaaggcccttggggagggcactctcccatgcccttggcctcgctggccacattggccaatgagccagggctggagtctgagacctttggttgttctttaaggcacctcctgccactttctccctcagaggcacaaacactttgtgttccacgtcagtttgaggggacggtggggggatgatatgaatgtcacaggaggagacaccttctgtctttgtttcaaagaaagtgatgtgccatttgttaatatacaagagaaatattgaaaatatattgaaaagagcaattttaaattatttttggcttatgttgcaatatttattttcttgtattagaaaagattcctttgtagagaaaaaatgtatttttcattaacgcaaagacctatttctcctttttgtacattgtccatgtgcgcaacccttaacgagcaatagaatgtatggtcacctgggtgtggccagtgcccgctgtgccctgcatgattctgtgttgccgctgctgcatagttcccagccccatcctgtcctgctcactcatgggggcttccagaccccggccccaccagggcttgtgtcatagggagccctttgcactcctcgtgtgttggcaaacgcagttaataaagcaatgttttctgtg

SEQ ID NO: 290474 - DNA, 6297 bp, Homo sapiens
gaacatacacagggggttggtgaatggtgccgaccgcggccatcgcagttggaggctattttttggggggggtgagtagcgtccatggagttactttgcgcccactcctagcggcaccggcttaggtcctgcgggccgaccgtccccggcggggggcgtggggcctgggacgccgcgggcccggcgcctccctcgccgcgacccggatggatgcgcgccccccgccctcccgcgccggccccaggagctcccggcttcgggagcatccttcccgcgccggtccctgcagcggcgcgtagccgagggcagcgcccgtcaggggggcaccgcggagcaagatggaagagaagaggcgaaaatactccatcagcagtgacaactctgacaccactgacagtcatgcgacatctacatccgcatcaagatgctccaaactgcccagcagcaccaagtcgggctggccccgacagaacgaaaagaagccctccgaggttttccggacagacttgatcacagccatgaagatcccggactcataccagctcagcccggatgactactacatcctggcagacccatggcgacaggaatgggagaaaggtgtgcaggtgcctgccggggcagaggccatcccagagcccgtggtgaggatcctcccaccactggaaggcccccctgcccaggcatccccgagcagcaccatgcttggtgagggctcccagcctgattggccagggggcagccgctatgacttggacgagattgatgcctactggctggagctcatcaactcggagcttaaggagatggagaggccggagctggacgagctgacattagagcgtgtgctggaggagctggagaccctgtgccaccagaatatggccagggccattgagacgcaggaggggctgggcatcgagtacgacgaggatgttgtctgcgacgtgtgtcgctctcctgagggcgaggatggcaacgagatggtcttctgtgacaagtgcaacgtctgtgtgcatcaggcatgctacgggatcctcaaggtgcccacgggcagctggctgtgccggacgtgtgccctgggtgtccagccaaagtgcctgctctgccccaagcgaggaggagccttgaagcccactagaagtgggaccaagtgggtgcatgtcagctgtgccctatggattcctgaggtcagcatcggctgcccagagaagatggagcccatcaccaagatctcgcatatcccagccagccgctgggctctgtcctgcagcctctgcaaggaatgcacaggcacctgcatccagtgttccatgccttcctgcgtcacagcgttccatgtcacatgcgcctttgaccacggcctggaaatgcggactatattagcagacaacgatgaggtcaagttcaagtcattctgccaggagcacagtgacgggggcccacgtaatgagcccacatctgagcccacggaacccagccaggctggcgaggacctggaaaaggtgaccctgcgcaagcagcggctgcagcagctagaggaggacttctacgagctggtggagccggctgaggtggctgagcggctggacctggctgaggcactggtcgacttcatctaccagtactggaagctgaagaggaaagccaatgccaaccagccgctgctgacccccaagaccgacgaggtggacaacctggcccagcaggagcaggacgtcctctaccgccgcctgaagctcttcacccatctgcggcaggacctagagagggttagaaatctgtgctacatggtgacaaggcgcgagagaacgaaacacgccatctgcaaactccaggagcagatattccacctgcagatgaaacttattgaacaggatctgtgtcgagagcggtctgggaggagagcaaagggcaagaagagtgactcgaagaggaagggctgcgagggctccaagggcagcactgagaagaaagagaaagtgaaggcggggcctgactcagtcctggggcagctggcaggcctgtccacctcattccccatcgatggcaccttcttcaacagctggctggcacagtcggtgcagatcacagcagagaacatggccatgagcgagtggccactgaacaatgggcaccgcgaggaccctgctccagggctgctgtcagaggaactgctgcaggacgaggagacactgctcagcttcatgcgggacccctcgctgcgacctggtgaccctgctaggaaggcccgaggccgcacccgcctgcctgccaagaagaaaccaccaccaccaccaccgcaggacgggcctggttcacggacgactccagacaaagcccccaagaagacctggggccaggatgcaggcagtggcaaggggggtcaagggccacctaccaggaagccaccacgtcggacatcttctcacttgccgtccagccctgcagccggggactgtcccatcctagccacccctgaaagccccccgccactggcccctgagaccccggacgaggcagcctcagtagctgctgactcagatgtccaagtgcctggccctgcagcaagccctaagcctttgggccggctccggccaccccgcgagagcaaggtaacccggagattgccgggtgccaggcctgatgctgggatgggaccaccttcagctgtggctgagaggcccaaggtcagcctgcattttgacactgagactgatggctacttctctgatggggagatgagcgactcagatgtagaggccgaggacggtggggtgcagcggggtccccgggaggcaggggcagaggaggtggtccgcatgggcgtactggcctcctaactcacccccttccctgtcccaggccctgccctggtccccccacaaggcctcagcccagtcacaactgccatttccagtctctgctgagtgtcccagaccctcgaggctgccactccgtcgtggttttatttttaatatagagagagttttgaattctacactgttgtctttcctctgtgctggcctaggacattaggattccttccacggctccggccgctaggaccctgccaggtcccgcgcaccatccctgccctgcccacgtggtattgctgggctcctggctagatgcaagcaaggtggacaagagctcaggactccagcccactgccactgggtgacacagactgtcgtttgggcattatttcatggcagatgggccagtccagggcctaccccgccttgcccccagatcccactggggtccatttggggggtcctgctacactccaccgatccccaaggaagtataataaacgatacccagccagagtctactcactgtcacaagcacaacgagtttatatgagaaagcactgagggggtgcagagggcccgctagttccaggggaactgaaagctgttcctgatcagcccgtatcatctgaggcctgcctgcccaccctgccaccctcccctcccttgctgctctgcccctgccagtgcccagcccagcggctctgggaaggggttcccagaatccctcctgagctgtgccatttactcaggggactcccaaacagccagctgccagtgcaggtggagggctgtaggggagggccagtgcccagacagggtcatggggctcagaccagcccactgtagagaatcactctgaggctccaacttccttccttccttcggggccagtctcggccgaagtctggtcacgctcagacagagctgaccagaccagaccgtttgccttttcaagtttcctagtcctgctacaagatgagcttcttccgtggtttccttttggaaactcctccttccaacaagcagtgggatcccggggcccagggcgggccggtgttggccgctggggctgttgtaagtcttgctggatgttcccctgttcctgagccttaacccctcgcacagccatcccccccccccgtcctgccatccccccccgccgtcctgccttccccaccccacccttaggtcccaggtagttgctctgaagagtttcagtagagtggccccagggtgatagctcagggaacaacaaaaaaggaattccgtgaaaacatttttttttctttgatgaattactcctgggtcacttccaccactggtaaagccagaacttctccaaaaagaaccttgcaaaaagtccagtgaatcagtcgaatcattctgtggatgccaaagaatattttgaccataatacagcacagcctggacctgacaacttgtcatttggacttttttttaaatggagttctttagcaacaaagtatagaaacatgttcattgcacacacccaaggagaagagctcaagcgcttggaagaggatgctttgctgctgctgaagtgtacctgggtgttagatttcagatcctgggctgagcccactgtgagctttcctaaactgtgagactcacagaggggaaagatactgacggtgaaaccagcatggaaaacgtctttaccatgtggttccctcctccccaaatacataaagcaaataagcaggatggggaacagcttgaccttcatccacccctaactccaaaactatcaaggtacgacagtggcattgtcatcgacactcaatttcatgtgaattttagcaaaacaggaaacaaagataatgactcagttcagaggatcggacaaatgtgtctagtccgggtggactcggagggagtggggtgggcttcaaggattctgggcgttgggatggcatgagctaccctgtagagtttagtctgcctgcccgccttggtagtagtgaccagtcagtgtcagcatcagtgtcccaaccccagtctctgtttactgcctttgaacagaacttcttccttccccatgctttgggtcacctcgggctgcaaccctgtctgtgccagattgcccggtctgaccctgcaggaagcaaagaggtgagcttaaagaacaaccaaactctgccaggggtcccagaaagcccagggtccagcagtctcagcacttggccccttgccccttcacaccatcctggggcaggggctgggcctccctggtggcaggggtgggtggagaattagggagagggtgcaacgagtctggccccttgcctcgggctggctggtgttcttccaagagcctctgctcacattgttggcctctggattctggcccttcttcattggctgttgctttggactggactgttgctgagcctgtgtcctgcagaacccagatgtctgttaggctggctggctgctgcgaggggaggggggtggcctttcatttggggtgccctttcactcccaggccaagccctggagcaatcttcttcaggcagctgtctccacctccaggatgtccagcaggctgcaaggagaaggatgccagccacccatcctcccccagttcccagcctttcccctgttggtcacagccgcttctgtctttttccggtctactgtccccagtgtagagggctttgctgtccctgagactgaggcaggttccttttccaggtcagaggtggaggtagatctttctctcaaccacatctgcctccacacacagctcctccgcagggaaggagaagctgctctgtaactcattctggctatcgtcccccttctcactgacctgaccgcccaccacctccttccccctcatcacatgacaaaggataatgtgcaagaaaagtatttttatgtatcataaatgtattttgaaacaaatgagaagaagaaaggtagaagggtttattttattaaatgagcctgacttagtgacagtgtgtgagcatttgcaatgtaagggcctcagcttccttggagaagccaccccaggtttccagacatagatgttgaattgtttgtggggggtgtgccaggccacgtctcgtgtgtccgtatgcaggcatgcctgtgtatactgtgtatgggcacactgtgggactagctgggacaattcctagagattcaactgcccaattctaaccaacattggcagcggctgaacttggcatttccttgctaactgccagatgtggccaacctttgtccatatgcaaaccactgaaaaatgatctggatttctatagcaagtgcccgctgtgccctgcatgattctgtgttgccgctgctgcatagttcccagccccatcctgtcctgctcactcatgggggcttccagaccccggccccaccagggcttgtgtcatagggagccctttgcactcctcgtgtgttggcaaacgcagttaataaagcaatgttttctgtg

SEQ ID NO: 290475 - DNA, 5125 bp, Homo sapiens
gccaccttgaattttctttcccatggcaggctttctggtaaaatccaaaaaacctgctagacaaactaaaagagctataacactccaccttgaaattcttaataatatttgaacaaggagcctatattttcattttacactctagcccacaaattatgaagcccatcttgagggcagcacgtccttctggagagaagcgtataagtagtccctactctttggtggtgttggcaggagggatggacaaaacaagatagctcacctgggtctggcacagggggacagagagaagacgatgcctggtggtgtgctgggagcgtcagtgggcttcctgaaagggtgggacacacgtctgctggcgtctcacttgcctcctctctcccctcagcaggcctgtccacctcattccccatcgatggcaccttcttcaacagctggctggcacagtcggtgcagatcacagcagagaacatggccatgagcgagtggccactgaacaatgggcaccgcgaggaccctgctccagggctgctgtcagaggaactgctgcaggacgaggagacactgctcagcttcatgcgggacccctcgctgcgacctggtgaccctgctaggaaggcccgaggccgcacccgcctgcctgccaagaagaaaccaccaccaccaccaccgcaggacgggcctggttcacggacgactccagacaaagcccccaagaagacctggggccaggatgcaggcagtggcaaggggggtcaagggccacctaccaggaagccaccacgtcggacatcttctcacttgccgtccagccctgcagccggggactgtcccatcctagccacccctgaaagccccccgccactggcccctgagaccccggacgaggcagcctcagtagctgctgactcagatgtccaagtgcctggccctgcagcaagccctaagcctttgggccggctccggccaccccgcgagagcaaggtaacccggagattgccgggtgccaggcctgatgctgggatgggaccaccttcagctgtggctgagaggcccaaggtcagcctgcattttgacactgagactgatggctacttctctgatggggagatgagcgactcagatgtagaggccgaggacggtggggtgcagcggggtccccgggaggcaggggcagaggaggtggtccgcatgggcgtactggcctcctaactcacccccttccctgtcccaggccctgccctggtccccccacaaggcctcagcccagtcacaactgccatttccagtctctgctgagtgtcccagaccctcgaggctgccactccgtcgtggttttatttttaatatagagagagttttgaattctacactgttgtctttcctctgtgctggcctaggacattaggattccttccacggctccggccgctaggaccctgccaggtcccgcgcaccatccctgccctgcccacgtggtattgctgggctcctggctagatgcaagcaaggtggacaagagctcaggactccagcccactgccactgggtgacacagactgtcgtttgggcattatttcatggcagatgggccagtccagggcctaccccgccttgcccccagatcccactggggtccatttggggggtcctgctacactccaccgatccccaaggaagtataataaacgatacccagccagagtctactcactgtcacaagcacaacgagtttatatgagaaagcactgagggggtgcagagggcccgctagttccaggggaactgaaagctgttcctgatcagcccgtatcatctgaggcctgcctgcccaccctgccaccctcccctcccttgctgctctgcccctgccagtgcccagcccagcggctctgggaaggggttcccagaatccctcctgagctgtgccatttactcaggggactcccaaacagccagctgccagtgcaggtggagggctgtaggggagggccagtgcccagacagggtcatggggctcagaccagcccactgtagagaatcactctgaggctccaacttccttccttccttcggggccagtctcggccgaagtctggtcacgctcagacagagctgaccagaccagaccgtttgccttttcaagtttcctagtcctgctacaagatgagcttcttccgtggtttccttttggaaactcctccttccaacaagcagtgggatcccggggcccagggcgggccggtgttggccgctggggctgttgtaagtcttgctggatgttcccctgttcctgagccttaacccctcgcacagccatcccccccccccgtcctgccatccccccccgccgtcctgccttccccaccccacccttaggtcccaggtagttgctctgaagagtttcagtagagtggccccagggtgatagctcagggaacaacaaaaaaggaattccgtgaaaacatttttttttctttgatgaattactcctgggtcacttccaccactggtaaagccagaacttctccaaaaagaaccttgcaaaaagtccagtgaatcagtcgaatcattctgtggatgccaaagaatattttgaccataatacagcacagcctggacctgacaacttgtcatttggacttttttttaaatggagttctttagcaacaaagtatagaaacatgttcattgcacacacccaaggagaagagctcaagcgcttggaagaggatgctttgctgctgctgaagtgtacctgggtgttagatttcagatcctgggctgagcccactgtgagctttcctaaactgtgagactcacagaggggaaagatactgacggtgaaaccagcatggaaaacgtctttaccatgtggttccctcctccccaaatacataaagcaaataagcaggatggggaacagcttgaccttcatccacccctaactccaaaactatcaaggtacgacagtggcattgtcatcgacactcaatttcatgtgaattttagcaaaacaggaaacaaagataatgactcagttcagaggatcggacaaatgtgtctagtccgggtggactcggagggagtggggtgggcttcaaggattctgggcgttgggatggcatgagctaccctgtagagtttagtctgcctgcccgccttggtagtagtgaccagtcagtgtcagcatcagtgtcccaaccccagtctctgtttactgcctttgaacagaacttcttccttccccatgctttgggtcacctcgggctgcaaccctgtctgtgccagattgcccggtctgaccctgcaggaagcaaagaggtgagcttaaagaacaaccaaactctgccaggggtcccagaaagcccagggtccagcagtctcagcacttggccccttgccccttcacaccatcctggggcaggggctgggcctccctggtggcaggggtgggtggagaattagggagagggtgcaacgagtctggccccttgcctcgggctggctggtgttcttccaagagcctctgctcacattgttggcctctggattctggcccttcttcattggctgttgctttggactggactgttgctgagcctgtgtcctgcagaacccagatgtctgttaggctggctggctgctgcgaggggaggggggtggcctttcatttggggtgccctttcactcccaggccaagccctggagcaatcttcttcaggcagctgtctccacctccaggatgtccagcaggctgcaaggagaaggatgccagccacccatcctcccccagttcccagcctttcccctgttggtcacagccgcttctgtctttttccggtctactgtccccagtgtagagggctttgctgtccctgagactgaggcaggttccttttccaggtcagaggtggaggtagatctttctctcaaccacatctgcctccacacacagctcctccgcagggaaggagaagctgctctgtaactcattctggctatcgtcccccttctcactgacctgaccgcccaccacctccttccccctcatcacatgacaaaggataatgtgcaagaaaagtatttttatgtatcataaatgtattttgaaacaaatgagaagaagaaaggtagaagggtttattttattaaatgagcctgacttagtgacagtgtgtgagcatttgcaatgtaagggcctcagcttccttggagaagccaccccaggtttccagacatagatgttgaattgtttgtggggggtgtgccaggccacgtctcgtgtgtccgtatgcaggcatgcctgtgtatactgtgtatgggcacactgtgggactagctgggacaattcctagagattcaactgcccaattctaaccaacattggcagcggctgaacttggcatttccttgctaactgccagatgtggccaacctttgtccatatgcaaaccactgaaaaatgatctggatttctatagcaaggcccttggggagggcactctcccatgcccttggcctcgctggccacattggccaatgagccagggctggagtctgagacctttggttgttctttaaggcacctcctgccactttctccctcagaggcacaaacactttgtgttccacgtcagtttgaggggacggtggggggatgatatgaatgtcacaggaggagacaccttctgtctttgtttcaaagaaagtgatgtgccatttgttaatatacaagagaaatattgaaaatatattgaaaagagcaattttaaattatttttggcttatgttgcaatatttattttcttgtattagaaaagattcctttgtagagaaaaaatgtatttttcattaacgcaaagacctatttctcctttttgtacattgtccatgtgcgcaacccttaacgagcaatagaatgtatggtcacctgggtgtggccagtgcccgctgtgccctgcatgattctgtgttgccgctgctgcatagttcccagccccatcctgtcctgctcactcatgggggcttccagaccccggccccaccagggcttgtgtcatagggagccctttgcactcctcgtgtgttggcaaacgcagttaataaagcaatgttttctgtg

SEQ ID NO: 290476 - DNA, 3142 bp, Homo sapiens
gaacatacacagggggttggtgaatggtgccgaccgcggccatcgcagttggaggctattttttggggggggtgagtagcgtccatggagttactttgcgcccactcctagcggcaccggcttaggtcctgcgggccgaccgtccccggcggggggcgtggggcctgggacgccgcgggcccggcgcctccctcgccgcgacccggatggatgcgcgccccccgccctcccgcgccggccccaggagctcccggcttcgggagcatccttcccgcgccggtccctgcagcggcgcgtagccgagggcagcgcccgtcaggggggcaccgcggagcaagatggaagagaagaggcgaaaatactccatcagcagtgacaactctgacaccactgacagtcatgcgacatctacatccgcatcaagatgctccaaactgcccagcagcaccaagtcgggctggccccgacagaacgaaaagaagccctccgaggttttccggacagacttgatcacagccatgaagatcccggactcataccagctcagcccggatgactactacatcctggcagacccatggcgacaggaatgggagaaaggtgtgcaggtgcctgccggggcagaggccatcccagagcccgtggtgaggatcctcccaccactggaaggcccccctgcccaggcatccccgagcagcaccatgcttggtgagggctcccagcctgattggccagggggcagccgctatgacttggacgagattgatgcctactggctggagctcatcaactcggagcttaaggagatggagaggccggagctggacgagctgacattagagcgtgtgctggaggagctggagaccctgtgccaccagaatatggccagggccattgagacgcaggaggggctgggcatcgagtacgacgaggatgttgtctgcgacgtgtgtcgctctcctgagggcgaggatggcaacgagatggtcttctgtgacaagtgcaacgtctgtgtgcatcaggcatgctacgggatcctcaaggtgcccacgggcagctggctgtgccggacgtgtgccctgggtgtccagccaaagtgcctgctctgccccaagcgaggaggagccttgaagcccactagaagtgggaccaagtgggtgcatgtcagctgtgccctatggattcctgaggtcagcatcggctgcccagagaagatggagcccatcaccaagatctcgcatatcccagccagccgctgggctctgtcctgcagcctctgcaaggaatgcacaggcacctgcatccagtgttccatgccttcctgcgtcacagcgttccatgtcacatgcgcctttgaccacggcctggaaatgcggactatattagcagacaacgatgaggtcaagttcaagtcattctgccaggagcacagtgacgggggcccacgtaatgagcccacatctgagcccacggaacccagccaggctggcgaggacctggaaaaggtgaccctgcgcaagcagcggctgcagcagctagaggaggacttctacgagctggtggagccggctgaggtggctgagcggctggacctggctgaggcactggtcgacttcatctaccagtactggaagctgaagaggaaagccaatgccaaccagccgctgctgacccccaagaccgacgaggtggacaacctggcccagcaggagcaggacgtcctctaccgccgcctgaagctcttcacccatctgcggcaggacctagagagggttagaaatctgtgctacatggtgacaaggcgcgagagaacgaaacacgccatctgcaaactccaggagcagatattccacctgcagatgaaacttattgaacaggatctgtgtcgagagcggtctgggaggagagcaaagggcaagaagagtgactcgaagaggaagggctgcgagggctccaagggcagcactgagaagaaagagaaagtgaaggcggggcctgactcagtcctggggcagctgggtgagtgagggccatgctggcctgcagacacggcaggcttgaccatcaccacgcttgcagctctgtctgccctgcggaaggccagctgcacagagtaggagactgaggctcaagagcggtaaccaggcccttgcttgcccagcaggcctgtccacctcattccccatcgatggcaccttcttcaacagctggctggcacagtcggtgcagatcacagcagagaacatggccatgagcgagtggccactgaacaatgggcaccgcgaggaccctgctccagggctgctgtcagaggaactgctgcaggacgaggagacactgctcagcttcatgcgggacccctcgctgcgacctggtgaccctgctaggaaggcccgaggccgcacccgcctgcctgccaagaagaaaccaccaccaccaccaccgcaggacgggcctggttcacggacgactccagacaaagcccccaagaagacctggggccaggatgcaggcagtggcaaggggggtcaagggccacctaccaggaagccaccacgtcggacatcttctcacttgccgtccagccctgcagccggggactgtcccatcctagccacccctgaaagccccccgccactggcccctgagaccccggacgaggcagcctcagtagctgctgactcagatgtccaagtgcctggccctgcagcaagccctaagcctttgggccggctccggccaccccgcgagagcaaggtaacccggagattgccgggtgccaggcctgatgctgggatgggaccaccttcagctgtggctgagaggcccaaggtcagcctgcattttgacactgagactgatggctacttctctgatggggagatgagcgactcagatgtagaggccgaggacggtggggtgcagcggggtccccgggaggcaggggcagaggaggtggtccgcatgggcgtactggcctcctaactcacccccttccctgtcccaggccctgccctggtccccccacaaggcctcagcccagtcacaactgccatttccagtctctgctgagtgtcccagaccctcgaggctgccactccgtcgtggttttatttttaatatagagagagttttgaattct

SEQ ID NO: 290477 - DNA, 1683 bp, Homo sapiens
cgctccctaccggctctgatagtgagggagagggtgcaacgagtctggccccttgcctcgggctggctggtgttcttccaagagcctctgctcacattgttggcctctggattctggcccttcttcattggctgttgctttggactggactgttgctgagcctgtgtcctgcagaacccagatgtctgttaggctggctggctgctgcgaggggaggggggtggcctttcatttggggtgccctttcactcccaggccaagccctggagcaatcttcttcaggcagctgtctccacctccaggatgtccagcaggctgcaaggagaaggatgccagccacccatcctcccccagttcccagcctttcccctgttggtcacagccgcttctgtctttttccggtctactgtccccagtgtagagggctttgctgtccctgagactgaggcaggttccttttccaggtcagaggtggaggtagatctttctctcaaccacatctgcctccacacacagctcctccgcagggaaggagaagctgctctgtaactcattctggctatcgtcccccttctcactgacctgaccgcccaccacctccttccccctcatcacatgacaaaggataatgtgcaagaaaagtatttttatgtatcataaatgtattttgaaacaaatgagaagaagaaaggtagaagggtttattttattaaatgagcctgacttagtgacagtgtgtgagcatttgcaatgtaagggcctcagcttccttggagaagccaccccaggtttccagacatagatgttgaattgtttgtggggggtgtgccaggccacgtctcgtgtgtccgtatgcaggcatgcctgtgtatactgtgtatgggcacactgtgggactagctgggacaattcctagagattcaactgcccaattctaaccaacattggcagcggctgaacttggcatttccttgctaactgccagatgtggccaacctttgtccatatgcaaaccactgaaaaatgatctggatttctatagcaaggcccttggggagggcactctcccatgcccttggcctcgctggccacattggccaatgagccagggctggagtctgagacctttggttgttctttaaggcacctcctgccactttctccctcagaggcacaaacactttgtgttccacgtcagtttgaggggacggtggggggatgatatgaatgtcacaggaggagacaccttctgtctttgtttcaaagaaagtgatgtgccatttgttaatatacaagagaaatattgaaaatatattgaaaagagcaattttaaattatttttggcttatgttgcaatatttattttcttgtattagaaaagattcctttgtagagaaaaaatgtatttttcattaacgcaaagacctatttctcctttttgtacattgtccatgtgcgcaacccttaacgagcaatagaatgtatggtcacctgggtgtggccagtgcccgctgtgccctgcatgattctgtgttgccgctgctgcatagttcccagccccatcctgtcctgctcactcatgggggcttccagaccccggccccaccagggcttgtgtcatagggagccctttgcactcctcgtgtgttggcaaacgcagttaataaagcaatgttttctgtg

SEQ ID NO: 290478 - DNA, 2117 bp, Homo sapiens
gaacatacacagggggttggtgaatggtgccgaccgcggccatcgcagttggaggctattttttggggggggtgagtagcgtccatggagttactttgcgcccactcctagcggcaccggcttaggtcctgcgggccgaccgtccccggcggggggcgtggggcctgggacgccgcgggcccggcgcctccctcgccgcgacccggatggatgcgcgccccccgccctcccgcgccggccccaggagctcccggcttcgggagcatccttcccgcgccggtccctgcagcggcgcgtagccgagggcagcgcccgtcaggggggcaccgcggagcaagatggaagagaagaggcgaaaatactccatcagcagtgacaactctgacaccactgacagtcatgcgacatctacatccgcatcaagatgctccaaactgcccagcagcaccaagtcgggctggccccgacagaacgaaaagaagccctccgaggttttccggacagacttgatcacagccatgaagatcccggactcataccagctcagcccggatgactactacatcctggcagacccatggcgacaggaatgggagaaaggtgtgcaggtgcctgccggggcagaggccatcccagagcccgtggtgaggatcctcccaccactggaaggcccccctgcccaggcatccccgagcagcaccatgcttggtgagggctcccagcctgattggccagggggcagccgctatgacttggacgagattgatgcctactggctggagctcatcaactcggagcttaaggagatggagaggccggagctggacgagctgacattagagcgtgtgctggaggagctggagaccctgtgccaccagaatatggccagggccattgagacgcaggaggggctgggcatcgagtacgacgaggatgttgtctgcgacgtgtgtcgctctcctgagggcgaggatggcaacgagatggtcttctgtgacaagtgcaacgtctgtgtgcatcaggcatgctacgggatcctcaaggtgcccacgggcagctggctgtgccggacgtgtgccctgggtgtccagccaaagtgcctgctctgccccaagcgaggaggagccttgaagcccactagaagtgggaccaagtgggtgcatgtcagctgtgccctatggattcctgaggtcagcatcggctgcccagagaagatggagcccatcaccaagatctcgcatatcccagccagccgctgggctctgtcctgcagcctttcccctgttggtcacagccgcttctgtctttttccggtctactgtccccagtgtagagggctttgctgtccctgacttagtgacagtgtgtgagcatttgcaatgtaagggcctcagcttccttggagaagccacgtctcgtgtgtccgtatgcaggcatgcctgtgtatactgtgtatgggcacactgtgggactagctgggacaattcctagagattcaactgcccaattctaaccaacattggcagcggctgaacttggcatttccttgctaactgccagatgtggccaacctttgtccatatgcaaaccatttctccctcagaggcacaaacactttgtgttccacgtcagtttgaggggacggtggggggatgatatgaatgtcacaggaggagacaccttctgtctttgtttcaaagaaagtgatgtgccatttgttaatatacaagagaaatattgaaaatatattgaaaagagcaattttaaattatttttggcttatgttgcaatatttattttcttgtattagaaaagattcctttgtagagaaaaaatgtatttttcattaacgcaaagacctatttctcctttttgtacattgtccatgtgcgcaacccttaacgagcaatagaatgtatggtcacctgggtgtggccagtgcccgctgtgccctgcatgattctgtgttgccgctgctgcatagttcccagccccatcctgtcctgctcactcatgggggcttccagaccccggccccaccagggcttgtgtcatagggagccctttgcactcctcgtgtgttggcaaacgcagttaataaagcaatgttttctgtg

SEQ ID NO: 290479 - DNA, 500 bp, Homo sapiens
tcgaggctcggtaccccgagtttaacggtggggggatgatatgaatgtcacaggaggagacaccttctgtctttgtttcaaagaaagtgatgtgccatttgttaatatacaagagaaatattgaaaatatattgaaaagagcaattttaaattatttttggcttatgttgcaatatttattttcttgtattagaaaagattcctttgtagagaaaaaatgtatttttcattaacgcaaagacctatttctcctttttgtacattgtccatgtgcgcaacccttaacgagcaatagaatgtatggtcacctgggtgtggccagtgcccgctgtgccctgcatgattctgtgttgccgctgctgcatagttcccagccccatcctgtcctgctcactcatgggggcttccagaccccggccccaccagggcttgtgtcatagggagccctttgcactcctcgtgtgttggcaaacgcagttaataaagcaatgttttctgtg

SEQ ID NO: 290480 - DNA, 497 bp, Homo sapiens
aagctcggcacccattatttgccggtggggggatgatatgaatgtcacaggaggagacaccttctgtctttgtttcaaagaaagtgatgtgccatttgttaatatacaagagaaatattgaaaatatattgaaaagagcaattttaaattatttttggcttatgttgcaatatttattttcttgtattagaaaagattcctttgtagagaaaaaatgtatttttcattaacgcaaagacctatttctcctttttgtacattgtccatgtgcgcaacccttaacgagcaatagaatgtatggtcacctgggtgtggccagtgcccgctgtgccctgcatgattctgtgttgccgctgctgcatagttcccagccccatcctgtcctgctcactcatgggggcttccagaccccggccccaccagggcttgtgtcatagggagccctttgcactcctcgtgtgttggcaaacgcagttaataaagcaatgttttctgtg

SEQ ID NO: 290481 - DNA, 373 bp, Homo sapiens
tgtcctctgaggttttcctctttttattttgatttttgcctttctctgccagtctttctttctctcataggtccactcccaactatccctcaaactctgtcctttaataggtcagagcagtgtgaattcagttaatcacatttatggaacgtctactatgtgcaaaacatgtgcagagttcagagctatgttatttattgtgctgattgcttttatttcgtcttatttctaagtgcgcaggcagaatgtccacttgagttgcatgtatctgcctcttcctctggcctgtggggcagactgccctgaggcagtctgaagtcactctttcccctcttgcccctcacaggttttccggacagacttgatcacagcc

SEQ ID NO: 290482 - DNA, 812 bp, Homo sapiens
tcacattaacgcacacatcagttccaggccccattccattctctgaacatcttctgacacactgacagtgctgagcagagcaaggttgggttcgctcctctggcagaacctcggctctcaggaggtccttgttccagggaacagctgcttctctggggctgggctctactccctgcagcccctcgcactacccagctggaaccagggacaacgcctgagtccaaccctcgtgtctattttccagaaaacgggcaatgctgtgagagccattggaagactgtcctctatggcaatgatctcagggctcagtggcaggaaatcctcaacagggtcaccaaccagcccgctcaatgcagaaaaactagaatctgaagaagatgtgtcccaagctttccttgaggctgttgctgaggaaaagcctcatgtaaaaccctatttctctaagaccattcgcgatttagaagttgtggagggaagtgctgctagatttgactgcaagattgaaggatacccagaccccgaggttgtctggttcaaagatgaccagtcaatcagggagtcccgccacttccagatagactacgatgaggacgggaactgctctttaattattagtgatgtttgcggggatgacgatgccaagtacacctgcaaggctgtcaacagtcttggagaagccacctgcacagcagagctcattgtggaaacgatggaggaaggtgaaggggaaggggaagaggaagaagagtgaaacaaagccagagaaaagcagtttctaagtcatattaaaaggactatttctctaaaactca

SEQ ID NO: 290483 - DNA, 336 bp, Homo sapiens
tatgtcgaacccacgcgttccggattgaaggatacccagaccccgaggttgtctggttcaaagatgaccagtcaatcagggagtcccgccacttccagatagactacgatgaggacgggaactgctctttaattattagtgatgtttgcggggatgacgatgccaagtacacctgcaaggctgtcaacagtcttggagaagccacctgcacagcagagctcattgtggaaacgatggaggaaggtgaaggggaaggggaagaggaagaagagtgaaacaaagccagagaaaagcagtttctaagtcatattaaaaggactatttctctaaaactca

SEQ ID NO: 290484 - DNA, 303 bp, Homo sapiens
tcactcggcccggtatgctgatctcaacgtagtcatcatcaatcagggagtcccgccacttccagatagactacgatgaggacgggaactgctctttaattattagtgatgtttgcggggatgacgatgccaagtacacctgcaaggctgtcaacagtcttggagaagccacctgcacagcagagctcattgtggaaacgatggaggaaggtgaaggggaaggggaagaggaagaagagtgaaacaaagccagagaaaagcagtttctaagtcatattaaaaggactatttctctaaaactca

SEQ ID NO: 290485 - DNA, 302 bp, Homo sapiens
tctagaggatccctcacagcttcgggctaacccaaagtcaatcagggagtcccgccacttccagatagactacgatgaggacgggaactgctctttaattattagtgatgtttgcggggatgacgatgccaagtacacctgcaaggctgtcaacagtcttggagaagccacctgcacagcagagctcattgtggaaacgatggaggaaggtgaaggggaaggggaagaggaagaagagtgaaacaaagccagagaaaagcagtttctaagtcatattaaaaggactatttctctaaaactca

SEQ ID NO: 290486 - DNA, 2569 bp, Homo sapiens
tcacattaacgcacacatcagttccaggccccattccattctctgaacatcttctgacacactgacagtgctgagcagagcaaggttgggttcgctcctctggcagaacctcggctctcaggaggtccttgttccagggaacagctgcttctctggggctgggctctactccctgcagcccctcgcactacccagctggaaccagggacaacgcctgagtccaaccctcgtgtctattttccagaaaacgggcaatgctgtgagagccattggaagactgtcctctatggcaatgatctcagggctcagtggcaggaaatcctcaacagggtcaccaaccagcccgctcaatgcagaaaaactagaatctgaagaagatgtgtcccaagctttccttgaggctgttgctgaggaaaagcctcatgtaaaaccctatttctctaagaccattcgcgatttagaagttgtggagggaagtgctgctagatttgactgcaagattgaaggatacccagaccccgaggttgtctggttcaaagatgaccagtcaatcagggagtcccgccacttccagatagactacgatgaggacgggaactgctctttaattattagtgatgtttgcggggatgacgatgccaagtacacctgcaaggctgtcaacagtcttggagaagccacctgcacagcagagctcattgtggaaacgatggaggaaggtgaaggggaaggggaagaggaagaagagtgaaacaaagccagagaaaagcagtttctaagtcatattaaaaggactatttctctaaaactcaaaaaaaaaaaaaaaaactcaagatagtaaaagcacctagtgtgatagattatcggttaggtcatttgtgggttgattcttcagaaacagcagttgatacctagcagcgttattgatgggcattaatctatgttagttggcaccttaagatactagtgcagctagatttcatttagggaaatcaccagtaacttgactgaccaattgattttagagagaaagtaaccaaaccaaatatttatctgggcaaagtcataaattctccacttgaatgcgctcatgaaaaataaggccaaaacaagagttctgggccacagctcagcccagagggttcctggggatgggaggcctctctctccccaccccctgactctagagaactgggttttctcccagtactccagcaattcatttctgaaagcagttgagccactttattccaaagtacactgcagatgttcaaactctccatttctctttccccttccacctgccagttttgctgactctcaacttgtcatgagtgtaagcattaaggacattatgcttcttcgattctgaagacaggtccctgctcatggatgactctggcttccttaggaaaatatttttcttccaaaatcagtaggaaatctaaacttatcccctctttgcagatgtctagcagcttcagacatttggttaagaacccatgggaaaaaaaaaaatccttgctaatgtggtttcctttgtaaaccaggattcttatttgtgctgttatagaatatcagctctgaacgtgtggtaaagatttttgtgtttgaatataggagaaatcagtttgctgaaaagttagtcttaattatctattggccacgatgaaacagatttcaactgataaagagctggagaactccatgtactttggaatctcctccaagatagccagagtttaatacatcttcattctcaacactctccaaagaacttgacctaccttatgggttccatatttttcttcttaaatgtgcatcaatcatgccttgcccccaacctttaaatatattcttagacctggtaaatgcactcagacttgcgtctttaggaatttttaactttctttcactacattggcacttaaattttttctttataaagctttttgaaggtcataaacaaagaccataattgatgatagacctaatacatttcctctgtgtgtgtgtgtaacattccaaatactttttttttcttttccactgtttgtaaggtgcaacaatttaatatttttaagggactttttaagagttccttaagaaccaatttaaaattacttcagtgcaatcctacacagtatcaacattagaattttgatattagtcttatgttatcttccattctatttttatctgctttttgctgctagtttcaaactgccagtatttttccttttgcttttaaaatagttacaatatttttcatgatagccacagtattgccacagtttattataataaagggtttttatttgatttagcgcattcaaagcttttttctatcacttttgtgttcagaatataacctttgtgtgcgtgtatgttgtgtgtgtgcatgtgtggcgtatatgtgtgttacaggttaatgccttcttggaattgtgttaatgttctcttggtttattatgccatcagaatggtaaatgagaacactacaactgtagtcagctcacaatttttaaataaaggataccacagtgcatgctgtttgttcaaatctttg

SEQ ID NO: 290487 - DNA, 2516 bp, Homo sapiens
tcacattaacgcacacatcagttccaggccccattccattctctgaacatcttctgacacactgacagtgctgagcagagcaaggttgggttcgctcctctggcagaacctcggctctcaggaggtccttgttccagggaacagctgcttctctggggctgggctctactccctgcagcccctcgcactacccagctggaaccagggacaacgcctgagtccaaccctcgtgtctattttccagaaaacgggcaatgctgtgagagccattggaagactgtcctctatggcaatgatctcagggctcagtggcaggaaatcctcaacagggtcaccaaccagcccgctcaatgcagaaaaactagaatctgaagaagatgtgtcccaagctttccttgaggctgttgctgaggaaaagcctcatgtaaaaccctatttctctaagaccattcgcgatttagaagttgtggagggaagtgctgctagatttgactgcaagattgaaggatacccagaccccgaggttgtctggttcaaagatgaccagtcaatcagggagtcccgccacttccagatagactacgatgaggacgggaactgctctttaattattagtgatgtttgcggggatgacgatgccaagtacacctgcaaggctgtcaacagtcttggagaagccacctgcacagcagagctcattgtggaaacgatggaggaaggtgaaggggaaggggaagaggaagaagagtgaaacaaagccagagaaaagcagtttctaagtcatattaaaaggactatttctctaaaactcaaaaaaaaaaaaaaaaactcaagatagtaaaagcacctagtgtgatagattatcggttaggtcatttgtgggttgattcttcagaaacagcagttgatacctagcagcgttattgatgggcattaatctatgttagttggcaccttaagatactagtgcagctagatttcatttagggaaatcaccagtaacttgactgaccaattgattttagagagaaagtaaccaaaccaaatatttatctgggcaaagtcataaattctccacttgaatgcgctcatgaaaaataaggccgcctctctctccccaccccctgactctagagaactgggttttctcccagtactccagcaattcatttctgaaagcagttgagccactttattccaaagtacactgcagatgttcaaactctccatttctctttccccttccacctgccagttttgctgactctcaacttgtcatgagtgtaagcattaaggacattatgcttcttcgattctgaagacaggtccctgctcatggatgactctggcttccttaggaaaatatttttcttccaaaatcagtaggaaatctaaacttatcccctctttgcagatgtctagcagcttcagacatttggttaagaacccatgggaaaaaaaaaaatccttgctaatgtggtttcctttgtaaaccaggattcttatttgtgctgttatagaatatcagctctgaacgtgtggtaaagatttttgtgtttgaatataggagaaatcagtttgctgaaaagttagtcttaattatctattggccacgatgaaacagatttcaactgataaagagctggagaactccatgtactttggaatctcctccaagatagccagagtttaatacatcttcattctcaacactctccaaagaacttgacctaccttatgggttccatatttttcttcttaaatgtgcatcaatcatgccttgcccccaacctttaaatatattcttagacctggtaaatgcactcagacttgcgtctttaggaatttttaactttctttcactacattggcacttaaattttttctttataaagctttttgaaggtcataaacaaagaccataattgatgatagacctaatacatttcctctgtgtgtgtgtgtaacattccaaatactttttttttcttttccactgtttgtaaggtgcaacaatttaatatttttaagggactttttaagagttccttaagaaccaatttaaaattacttcagtgcaatcctacacagtatcaacattagaattttgatattagtcttatgttatcttccattctatttttatctgctttttgctgctagtttcaaactgccagtatttttccttttgcttttaaaatagttacaatatttttcatgatagccacagtattgccacagtttattataataaagggtttttatttgatttagcgcattcaaagcttttttctatcacttttgtgttcagaatataacctttgtgtgcgtgtatgttgtgtgtgtgcatgtgtggcgtatatgtgtgttacaggttaatgccttcttggaattgtgttaatgttctcttggtttattatgccatcagaatggtaaatgagaacactacaactgtagtcagctcacaatttttaaataaaggataccacagtgcatgctgtttgttcaaatctttg

SEQ ID NO: 290488 - DNA, 2514 bp, Homo sapiens
tcacattaacgcacacatcagttccaggccccattccattctctgaacatcttctgacacactgacagtgctgagcagagcaaggttgggttcgctcctctggcagaacctcggctctcaggaggtccttgttccagggaacagctgcttctctggggctgggctctactccctgcagcccctcgcactacccagctggaaccagggacaacgcctgagtccaaccctcgtgtctattttccagaaaacgggcaatgctgtgagagccattggaagactgtcctctatggcaatgatctcagggctcagtggcaggaaatcctcaacagggtcaccaaccagcccgctcaatgcagaaaaactagaatctgaagaagatgtgtcccaagctttccttgaggctgttgctgaggaaaagcctcatgtaaaaccctatttctctaagaccattcgcgatttagaagttgtggagggaagtgctgctagatttgactgcaagattgaaggatacccagaccccgaggttgtctggttcaaagatgaccagtcaatcagggagtcccgccacttccagatagactacgatgaggacgggaactgctctttaattattagtgatgtttgcggggatgacgatgccaagtacacctgcaaggctgtcaacagtcttggagaagccacctgcacagcagagctcattgtggaaacgatggaggaaggtgaaggggaaggggaagaggaagaagagtgaaacaaagccagagaaaagcagtttctaagtcatattaaaaggactatttctctaaaactcaaaaaaaaaaaaaaaaactcaagatagtaaaagcacctagtgtgatagattatcggttaggtcatttgtgggttgattcttcagaaacagcagttgatacctagcagcgttattgatgggcattaatctatgttagttggcaccttaagatactagtgcagctagatttcatttagggaaatcaccagtaacttgactgaccaattgattttagagagaaagtaaccaaaccaaatatttatctgggcaaagtcataaattctccacttgaatgcgctcatgaaaaataaggccaaaacaagagttctgggccacagctcagcccagagggttcctggggatgggaggcctctctctccccaccccctgactctagagaactgggttttctcccagtactccagcaattcatttctgaaagcagttgagccactttattccaaagtacactgcagatgttcaaactctccatttctctttccccttccacctgccagttttgctgactctcaacttgtcatgagtgtaagcattaaggacattatgcttcttcgattctgaagacaggtccctgctcatggatgactctggcttccttaggaaaatatttttcttccaaaatcagtaggaaatctaaacttatcccctctttgcagatgtctagcagcttcagacatttggttaagaacccatgggaaaaaatatagaatatcagctctgaacgtgtggtaaagatttttgtgtttgaatataggagaaatcagtttgctgaaaagttagtcttaattatctattggccacgatgaaacagatttcaactgataaagagctggagaactccatgtactttggaatctcctccaagatagccagagtttaatacatcttcattctcaacactctccaaagaacttgacctaccttatgggttccatatttttcttcttaaatgtgcatcaatcatgccttgcccccaacctttaaatatattcttagacctggtaaatgcactcagacttgcgtctttaggaatttttaactttctttcactacattggcacttaaattttttctttataaagctttttgaaggtcataaacaaagaccataattgatgatagacctaatacatttcctctgtgtgtgtgtgtaacattccaaatactttttttttcttttccactgtttgtaaggtgcaacaatttaatatttttaagggactttttaagagttccttaagaaccaatttaaaattacttcagtgcaatcctacacagtatcaacattagaattttgatattagtcttatgttatcttccattctatttttatctgctttttgctgctagtttcaaactgccagtatttttccttttgcttttaaaatagttacaatatttttcatgatagccacagtattgccacagtttattataataaagggtttttatttgatttagcgcattcaaagcttttttctatcacttttgtgttcagaatataacctttgtgtgcgtgtatgttgtgtgtgtgcatgtgtggcgtatatgtgtgttacaggttaatgccttcttggaattgtgttaatgttctcttggtttattatgccatcagaatggtaaatgagaacactacaactgtagtcagctcacaatttttaaataaaggataccacagtgcatgctgtttgttcaaatctttg

SEQ ID NO: 290489 - DNA, 2515 bp, Homo sapiens
tcacattaacgcacacatcagttccaggccccattccattctctgaacatcttctgacacactgacagtgctgagcagagcaaggttgggttcgctcctctggcagaacctcggctctcaggaggtccttgttccagggaacagctgcttctctggggctgggctctactccctgcagcccctcgcactacccagctggaaccagggacaacgcctgagtccaaccctcgtgtctattttccagaaaacgggcaatgctgtgagagccattggaagactgtcctctatggcaatgatctcagggctcagtggcaggaaatcctcaacagggtcaccaaccagcccgctcaatgcagaaaaactagaatctgaagaagatgtgtcccaagctttccttgaggctgttgctgaggaaaagcctcatgtaaaaccctatttctctaagaccattcgcgatttagaagttgtggagggaagtgctgctagatttgactgcaagattgaaggatacccagaccccgaggttgtctggttcaaagatgaccagtcaatcagggagtcccgccacttccagatagactacgatgaggacgggaactgctctttaattattagtgatgtttgcggggatgacgatgccaagtacacctgcaaggctgtcaacagtcttggagaagccacctgcacagcagagctcattgtggaaacgatggaggaaggtgaaggggaaggggaagaggaagaagagtgaaacaaagccagagaaaagcagtttctaagtcatattaaaaggactatttctctaaaactcaaaaaaaaaaaaaaaaactcaagatagtaaaagcacctagtgtgatagattatcggttaggtcatttgtgggttgattcttcagaaacagcagttgatacctagcagcgttattgatgggcattaatctatgttagttggcaccttaagatactagtgcagctagatttcatttagggaaatcaccagtaacttgactgaccaattgattttagagagaaagtaaccaaaccaaatatttatctgggcaaagtcataaattctccacttgaatgcgctcatgaaaaataaggccaaaacaagagttctgggccacagctcagcccagagggttcctggggatgggaggcctctctctccccaccccctgactctagagaactgggttttctcccagtactccagcaattcatttctgaaagcagttgagccactttattccaaagtacactgcagatgttcaaactctccatttctctttccccttccacctgccagttttgctgactctcaacttgtcatgagtgtaagcattaaggacattatgcttcttcgattctgaagacaggtccctgctcatggatgactctggcttccttaggaaaatatttttcttccaaaatcagtaggaaatctaaacttatcccctctttgcagatgtctagcagcttcagacatttggttaagaacccatgggaaaaaaaaaaatccttgctaatgtggtttcctttgtaaaccaggattcttatttgtgctgttatagaatatcagctctgaacgtgtggtaaagatttttgtgtttgaatataggagaaatcagtttgctgaaaagttagtcttaattatctattggccacgatgaaacagatttcaactgataaagagctggagaactccatgtactttggaatctcctccaagatagccagagtttaatacatcttcattctcaacactctccaaagaacttgacctaccttatgggttccatatttttcttcttaaatgtgcatcaatcatgccttgcccccaacctttaaatatattcttagacctggtaaatgcactcagacttgcgtctttaggaatttttaactttctttcactacattggcacttaaattttttctttataaagctttttgaaggtcataaacaaagaccataattgatgatagacctaatacatttcctctgtgtgtgtgtgtaacattccaaatactttttttttcttttccactgtttgtaaggtgcaacaatttaatatttttaagggactttttaagagttccttaagaaccaattttcttatgttatcttccattctatttttatctgctttttgctgctagtttcaaactgccagtatttttccttttgcttttaaaatagttacaatatttttcatgatagccacagtattgccacagtttattataataaagggtttttatttgatttagcgcattcaaagcttttttctatcacttttgtgttcagaatataacctttgtgtgcgtgtatgttgtgtgtgtgcatgtgtggcgtatatgtgtgttacaggttaatgccttcttggaattgtgttaatgttctcttggtttattatgccatcagaatggtaaatgagaacactacaactgtagtcagctcacaatttttaaataaaggataccacagtgcatgctgtttgttcaaatctttg

SEQ ID NO: 290490 - DNA, 2409 bp, Homo sapiens
tcacattaacgcacacatcagttccaggccccattccattctctgaacatcttctgacacactgacagtgctgagcagagcaagaaaacgggcaatgctgtgagagccattggaagactgtcctctatggcaatgatctcagggctcagtggcaggaaatcctcaacagggtcaccaaccagcccgctcaatgcagaaaaactagaatctgaagaagatgtgtcccaagctttccttgaggctgttgctgaggaaaagcctcatgtaaaaccctatttctctaagaccattcgcgatttagaagttgtggagggaagtgctgctagatttgactgcaagattgaaggatacccagaccccgaggttgtctggttcaaagatgaccagtcaatcagggagtcccgccacttccagatagactacgatgaggacgggaactgctctttaattattagtgatgtttgcggggatgacgatgccaagtacacctgcaaggctgtcaacagtcttggagaagccacctgcacagcagagctcattgtggaaacgatggaggaaggtgaaggggaaggggaagaggaagaagagtgaaacaaagccagagaaaagcagtttctaagtcatattaaaaggactatttctctaaaactcaaaaaaaaaaaaaaaaactcaagatagtaaaagcacctagtgtgatagattatcggttaggtcatttgtgggttgattcttcagaaacagcagttgatacctagcagcgttattgatgggcattaatctatgttagttggcaccttaagatactagtgcagctagatttcatttagggaaatcaccagtaacttgactgaccaattgattttagagagaaagtaaccaaaccaaatatttatctgggcaaagtcataaattctccacttgaatgcgctcatgaaaaataaggccaaaacaagagttctgggccacagctcagcccagagggttcctggggatgggaggcctctctctccccaccccctgactctagagaactgggttttctcccagtactccagcaattcatttctgaaagcagttgagccactttattccaaagtacactgcagatgttcaaactctccatttctctttccccttccacctgccagttttgctgactctcaacttgtcatgagtgtaagcattaaggacattatgcttcttcgattctgaagacaggtccctgctcatggatgactctggcttccttaggaaaatatttttcttccaaaatcagtaggaaatctaaacttatcccctctttgcagatgtctagcagcttcagacatttggttaagaacccatgggaaaaaaaaaaatccttgctaatgtggtttcctttgtaaaccaggattcttatttgtgctgttatagaatatcagctctgaacgtgtggtaaagatttttgtgtttgaatataggagaaatcagtttgctgaaaagttagtcttaattatctattggccacgatgaaacagatttcaactgataaagagctggagaactccatgtactttggaatctcctccaagatagccagagtttaatacatcttcattctcaacactctccaaagaacttgacctaccttatgggttccatatttttcttcttaaatgtgcatcaatcatgccttgcccccaacctttaaatatattcttagacctggtaaatgcactcagacttgcgtctttaggaatttttaactttctttcactacattggcacttaaattttttctttataaagctttttgaaggtcataaacaaagaccataattgatgatagacctaatacatttcctctgtgtgtgtgtgtaacattccaaatactttttttttcttttccactgtttgtaaggtgcaacaatttaatatttttaagggactttttaagagttccttaagaaccaatttaaaattacttcagtgcaatcctacacagtatcaacattagaattttgatattagtcttatgttatcttccattctatttttatctgctttttgctgctagtttcaaactgccagtatttttccttttgcttttaaaatagttacaatatttttcatgatagccacagtattgccacagtttattataataaagggtttttatttgatttagcgcattcaaagcttttttctatcacttttgtgttcagaatataacctttgtgtgcgtgtatgttgtgtgtgtgcatgtgtggcgtatatgtgtgttacaggttaatgccttcttggaattgtgttaatgttctcttggtttattatgccatcagaatggtaaatgagaacactacaactgtagtcagctcacaatttttaaataaaggataccacagtgcatgctgtttgttcaaatctttg

SEQ ID NO: 290491 - DNA, 1557 bp, Homo sapiens
tcacattaacgcacacatcagttccaggccccattccattctctgaacatcttctgacacactgacagtgctgagcagagcaaggttgggttcgctcctctggcagaacctcggctctcaggaggtccttgttccagggaacagctgcttctctggggctgggctctactccctgcagcccctcgcactacccagctggaaccagggacaacgcctgagtccaaccctcgtgtctattttccagaaaacgggcaatgctgtgagagccattggaagactgtcctctatggcaatgatctcagggctcagtggcaggaaatcctcaacagggtcaccaaccagcccgctcaatgcagaaaaactagaatctgaagaagatgtgtcccaagctttccttgaggctgttgctgaggaaaagcctcatgtaaaaccctatttctctaagaccattcgcgatttagaagttgtggagggaagtgctgctagatttgactgcaagattgaaggatacccagaccccgaggttgtctggttcaaagatgaccagtcaatcagggagtcccgccacttccagatagactacgatgaggacgggaactgctctttaattattagtgatgtttgcggggatgacgatgccaagtacacctgcaaggctgtcaacagtcttggagaagccacctgcacagcagagctcattgtggaaacgatggaggaaggtgaaggggaaggggaagaggaagaagagtgaaacaaagccagagaaaagcagtttctaagtcatattaaaaggactatttctctaaaactcaaaaaaaaaaaaaaaaactcaagatagtaaaagcacctagtgtgatagattatcggttaggtcatttgtgggttgattcttcagaaacagcagttgatacctagcagcgttattgatgggcattaatctatgttagttggcaccttaagatactagtgcagctagatttcatttagggaaatcaccagtaacttgactgaccaattgattttagagagaaagtaaccaaaccaaatatttatctgggcaaagtcataaattctccacttgaatgcgctcatgaaaaataaggccaaaacaagagttctgggccacagctcagcccagagggttcctggggatgggaggcctctctctccccaccccctgactctagagaactgggttttctcccagtactccagcaattcatttctgaaagcagttgagccactttattccaaagtacactgcagatgttcaaactctccatttctctttccccttccacctgccagttttgctgactctcaacttgtcatgagtgtaagcattaaggacattatgcttcttcgattctgaagacaggtccctgctcatggatgactctggcttccttaggaaaatatttttcttccaaaatcagtaggaaatctaaacttatcccctctttgcagatgtctagcagcttcagacatttggttaagaacccatgggaaaaaaaaaaagtcgacgcggccgcgaatttagtagtagtaggcggccga

SEQ ID NO: 290492 - DNA, 2203 bp, Homo sapiens
gcggccgcctactactactactgctcgaattcaagcttctaacgatgtacggggacatgtaaaaccctatttctctaagaccattcgcgatttagaagttgtggagggaagtgctgctagatttgactgcaagattgaaggatacccagaccccgaggttgtctggttcaaagatgaccagtcaatcagggagtcccgccacttccagatagactacgatgaggacgggaactgctctttaattattagtgatgtttgcggggatgacgatgccaagtacacctgcaaggctgtcaacagtcttggagaagccacctgcacagcagagctcattgtggaaacgatggaggaaggtgaaggggaaggggaagaggaagaagagtgaaacaaagccagagaaaagcagtttctaagtcatattaaaaggactatttctctaaaactcaaaaaaaaaaaaaaaaactcaagatagtaaaagcacctagtgtgatagattatcggttaggtcatttgtgggttgattcttcagaaacagcagttgatacctagcagcgttattgatgggcattaatctatgttagttggcaccttaagatactagtgcagctagatttcatttagggaaatcaccagtaacttgactgaccaattgattttagagagaaagtaaccaaaccaaatatttatctgggcaaagtcataaattctccacttgaatgcgctcatgaaaaataaggccaaaacaagagttctgggccacagctcagcccagagggttcctggggatgggaggcctctctctccccaccccctgactctagagaactgggttttctcccagtactccagcaattcatttctgaaagcagttgagccactttattccaaagtacactgcagatgttcaaactctccatttctctttccccttccacctgccagttttgctgactctcaacttgtcatgagtgtaagcattaaggacattatgcttcttcgattctgaagacaggtccctgctcatggatgactctggcttccttaggaaaatatttttcttccaaaatcagtaggaaatctaaacttatcccctctttgcagatgtctagcagcttcagacatttggttaagaacccatgggaaaaaaaaaaatccttgctaatgtggtttcctttgtaaaccaggattcttatttgtgctgttatagaatatcagctctgaacgtgtggtaaagatttttgtgtttgaatataggagaaatcagtttgctgaaaagttagtcttaattatctattggccacgatgaaacagatttcaactgataaagagctggagaactccatgtactttggaatctcctccaagatagccagagtttaatacatcttcattctcaacactctccaaagaacttgacctaccttatgggttccatatttttcttcttaaatgtgcatcaatcatgccttgcccccaacctttaaatatattcttagacctggtaaatgcactcagacttgcgtctttaggaatttttaactttctttcactacattggcacttaaattttttctttataaagctttttgaaggtcataaacaaagaccataattgatgatagacctaatacatttcctctgtgtgtgtgtgtaacattccaaatactttttttttcttttccactgtttgtaaggtgcaacaatttaatatttttaagggactttttaagagttccttaagaaccaatttaaaattacttcagtgcaatcctacacagtatcaacattagaattttgatattagtcttatgttatcttccattctatttttatctgctttttgctgctagtttcaaactgccagtatttttccttttgcttttaaaatagttacaatatttttcatgatagccacagtattgccacagtttattataataaagggtttttatttgatttagcgcattcaaagcttttttctatcacttttgtgttcagaatataacctttgtgtgcgtgtatgttgtgtgtgtgcatgtgtggcgtatatgtgtgttacaggttaatgccttcttggaattgtgttaatgttctcttggtttattatgccatcagaatggtaaatgagaacactacaactgtagtcagctcacaatttttaaataaaggataccacagtgcatgctgtttgttcaaatctttg

SEQ ID NO: 290493 - DNA, 2516 bp, Homo sapiens
tcacattaacgcacacatcagttccaggccccattccattctctgaacatcttctgacacactgacagtgctgagcagagcaaggttgggttcgctcctctggcagaacctcggctctcaggaggtccttgttccagggaacagctgcttctctggggctgggctctactccctgcagcccctcgcactacccagctggaaccagggacaacgcctgagtccaaccctcgtgtctattttccagaaaacgggcaatgctgtgagagccattggaagactgtcctctatggcaatgatctcagggctcagtggcaggaaatcctcaacagggtcaccaaccagcccgctcaatgcagaaaaactagaatctgaagaagatgtgtcccaagctttccttgaggctgttgctgaggaaaagcctcattgctgctagatttgactgcaagattgaaggatacccagaccccgaggttgtctggttcaaagatgaccagtcaatcagggagtcccgccacttccagatagactacgatgaggacgggaactgctctttaattattagtgatgtttgcggggatgacgatgccaagtacacctgcaaggctgtcaacagtcttggagaagccacctgcacagcagagctcattgtggaaacgatggaggaaggtgaaggggaaggggaagaggaagaagagtgaaacaaagccagagaaaagcagtttctaagtcatattaaaaggactatttctctaaaactcaaaaaaaaaaaaaaaaactcaagatagtaaaagcacctagtgtgatagattatcggttaggtcatttgtgggttgattcttcagaaacagcagttgatacctagcagcgttattgatgggcattaatctatgttagttggcaccttaagatactagtgcagctagatttcatttagggaaatcaccagtaacttgactgaccaattgattttagagagaaagtaaccaaaccaaatatttatctgggcaaagtcataaattctccacttgaatgcgctcatgaaaaataaggccaaaacaagagttctgggccacagctcagcccagagggttcctggggatgggaggcctctctctccccaccccctgactctagagaactgggttttctcccagtactccagcaattcatttctgaaagcagttgagccactttattccaaagtacactgcagatgttcaaactctccatttctctttccccttccacctgccagttttgctgactctcaacttgtcatgagtgtaagcattaaggacattatgcttcttcgattctgaagacaggtccctgctcatggatgactctggcttccttaggaaaatatttttcttccaaaatcagtaggaaatctaaacttatcccctctttgcagatgtctagcagcttcagacatttggttaagaacccatgggaaaaaaaaaaatccttgctaatgtggtttcctttgtaaaccaggattcttatttgtgctgttatagaatatcagctctgaacgtgtggtaaagatttttgtgtttgaatataggagaaatcagtttgctgaaaagttagtcttaattatctattggccacgatgaaacagatttcaactgataaagagctggagaactccatgtactttggaatctcctccaagatagccagagtttaatacatcttcattctcaacactctccaaagaacttgacctaccttatgggttccatatttttcttcttaaatgtgcatcaatcatgccttgcccccaacctttaaatatattcttagacctggtaaatgcactcagacttgcgtctttaggaatttttaactttctttcactacattggcacttaaattttttctttataaagctttttgaaggtcataaacaaagaccataattgatgatagacctaatacatttcctctgtgtgtgtgtgtaacattccaaatactttttttttcttttccactgtttgtaaggtgcaacaatttaatatttttaagggactttttaagagttccttaagaaccaatttaaaattacttcagtgcaatcctacacagtatcaacattagaattttgatattagtcttatgttatcttccattctatttttatctgctttttgctgctagtttcaaactgccagtatttttccttttgcttttaaaatagttacaatatttttcatgatagccacagtattgccacagtttattataataaagggtttttatttgatttagcgcattcaaagcttttttctatcacttttgtgttcagaatataacctttgtgtgcgtgtatgttgtgtgtgtgcatgtgtggcgtatatgtgtgttacaggttaatgccttcttggaattgtgttaatgttctcttggtttattatgccatcagaatggtaaatgagaacactacaactgtagtcagctcacaatttttaaataaaggataccacagtgcatgctgtttgttcaaatctttg

SEQ ID NO: 290494 - DNA, 2093 bp, Homo sapiens
tatgtcgaacccacgcgttccggattgaaggatacccagaccccgaggttgtctggttcaaagatgaccagtcaatcagggagtcccgccacttccagatagactacgatgaggacgggaactgctctttaattattagtgatgtttgcggggatgacgatgccaagtacacctgcaaggctgtcaacagtcttggagaagccacctgcacagcagagctcattgtggaaacgatggaggaaggtgaaggggaaggggaagaggaagaagagtgaaacaaagccagagaaaagcagtttctaagtcatattaaaaggactatttctctaaaactcaaaaaaaaaaaaaaaaactcaagatagtaaaagcacctagtgtgatagattatcggttaggtcatttgtgggttgattcttcagaaacagcagttgatacctagcagcgttattgatgggcattaatctatgttagttggcaccttaagatactagtgcagctagatttcatttagggaaatcaccagtaacttgactgaccaattgattttagagagaaagtaaccaaaccaaatatttatctgggcaaagtcataaattctccacttgaatgcgctcatgaaaaataaggccaaaacaagagttctgggccacagctcagcccagagggttcctggggatgggaggcctctctctccccaccccctgactctagagaactgggttttctcccagtactccagcaattcatttctgaaagcagttgagccactttattccaaagtacactgcagatgttcaaactctccatttctctttccccttccacctgccagttttgctgactctcaacttgtcatgagtgtaagcattaaggacattatgcttcttcgattctgaagacaggtccctgctcatggatgactctggcttccttaggaaaatatttttcttccaaaatcagtaggaaatctaaacttatcccctctttgcagatgtctagcagcttcagacatttggttaagaacccatgggaaaaaaaaaaatccttgctaatgtggtttcctttgtaaaccaggattcttatttgtgctgttatagaatatcagctctgaacgtgtggtaaagatttttgtgtttgaatataggagaaatcagtttgctgaaaagttagtcttaattatctattggccacgatgaaacagatttcaactgataaagagctggagaactccatgtactttggaatctcctccaagatagccagagtttaatacatcttcattctcaacactctccaaagaacttgacctaccttatgggttccatatttttcttcttaaatgtgcatcaatcatgccttgcccccaacctttaaatatattcttagacctggtaaatgcactcagacttgcgtctttaggaatttttaactttctttcactacattggcacttaaattttttctttataaagctttttgaaggtcataaacaaagaccataattgatgatagacctaatacatttcctctgtgtgtgtgtgtaacattccaaatactttttttttcttttccactgtttgtaaggtgcaacaatttaatatttttaagggactttttaagagttccttaagaaccaatttaaaattacttcagtgcaatcctacacagtatcaacattagaattttgatattagtcttatgttatcttccattctatttttatctgctttttgctgctagtttcaaactgccagtatttttccttttgcttttaaaatagttacaatatttttcatgatagccacagtattgccacagtttattataataaagggtttttatttgatttagcgcattcaaagcttttttctatcacttttgtgttcagaatataacctttgtgtgcgtgtatgttgtgtgtgtgcatgtgtggcgtatatgtgtgttacaggttaatgccttcttggaattgtgttaatgttctcttggtttattatgccatcagaatggtaaatgagaacactacaactgtagtcagctcacaatttttaaataaaggataccacagtgcatgctgtttgttcaaatctttg

SEQ ID NO: 290495 - DNA, 1925 bp, Homo sapiens
tagaggatcccccacacttcgatcttggagaagccacctgcacagcagagctcattgtggaaacgatggaggaaggtgaaggggaaggggaagaggaagaagagtgaaacaaagccagagaaaagcagtttctaagtcatattaaaaggactatttctctaaaactcaaaaaaaaaaaaaaaaactcaagatagtaaaagcacctagtgtgatagattatcggttaggtcatttgtgggttgattcttcagaaacagcagttgatacctagcagcgttattgatgggcattaatctatgttagttggcaccttaagatactagtgcagctagatttcatttagggaaatcaccagtaacttgactgaccaattgattttagagagaaagtaaccaaaccaaatatttatctgggcaaagtcataaattctccacttgaatgcgctcatgaaaaataaggccaaaacaagagttctgggccacagctcagcccagagggttcctggggatgggaggcctctctctccccaccccctgactctagagaactgggttttctcccagtactccagcaattcatttctgaaagcagttgagccactttattccaaagtacactgcagatgttcaaactctccatttctctttccccttccacctgccagttttgctgactctcaacttgtcatgagtgtaagcattaaggacattatgcttcttcgattctgaagacaggtccctgctcatggatgactctggcttccttaggaaaatatttttcttccaaaatcagtaggaaatctaaacttatcccctctttgcagatgtctagcagcttcagacatttggttaagaacccatgggaaaaaaaaaaatccttgctaatgtggtttcctttgtaaaccaggattcttatttgtgctgttatagaatatcagctctgaacgtgtggtaaagatttttgtgtttgaatataggagaaatcagtttgctgaaaagttagtcttaattatctattggccacgatgaaacagatttcaactgataaagagctggagaactccatgtactttggaatctcctccaagatagccagagtttaatacatcttcattctcaacactctccaaagaacttgacctaccttatgggttccatatttttcttcttaaatgtgcatcaatcatgccttgcccccaacctttaaatatattcttagacctggtaaatgcactcagacttgcgtctttaggaatttttaactttctttcactacattggcacttaaattttttctttataaagctttttgaaggtcataaacaaagaccataattgatgatagacctaatacatttcctctgtgtgtgtgtgtaacattccaaatactttttttttcttttccactgtttgtaaggtgcaacaatttaatatttttaagggactttttaagagttccttaagaaccaatttaaaattacttcagtgcaatcctacacagtatcaacattagaattttgatattagtcttatgttatcttccattctatttttatctgctttttgctgctagtttcaaactgccagtatttttccttttgcttttaaaatagttacaatatttttcatgatagccacagtattgccacagtttattataataaagggtttttatttgatttagcgcattcaaagcttttttctatcacttttgtgttcagaatataacctttgtgtgcgtgtatgttgtgtgtgtgcatgtgtggcgtatatgtgtgttacaggttaatgccttcttggaattgtgttaatgttctcttggtttattatgccatcagaatggtaaatgagaacactacaactgtagtcagctcacaatttttaaataaaggataccacagtgcatgctgtttgttcaaatctttg

SEQ ID NO: 290496 - DNA, 1472 bp, Homo sapiens
cagaactctgtttggccttatttttcatgagcgcattcaagtgggttcctggggatgggaggcctctctctccccaccccctgactctagagaactgggttttctcccagtactccagcaattcatttctgaaagcagttgagccactttattccaaagtacactgcagatgttcaaactctccatttctctttccccttccacctgccagttttgctgactctcaacttgtcatgagtgtaagcattaaggacattatgcttcttcgattctgaagacaggtccctgctcatggatgactctggcttccttaggaaaatatttttcttccaaaatcagtaggaaatctaaacttatcccctctttgcagatgtctagcagcttcagacatttggttaagaacccatgggaaaaaaaaaaatccttgctaatgtggtttcctttgtaaaccaggattcttatttgtgctgttatagaatatcagctctgaacgtgtggtaaagatttttgtgtttgaatataggagaaatcagtttgctgaaaagttagtcttaattatctattggccacgatgaaacagatttcaactgataaagagctggagaactccatgtactttggaatctcctccaagatagccagagtttaatacatcttcattctcaacactctccaaagaacttgacctaccttatgggttccatatttttcttcttaaatgtgcatcaatcatgccttgcccccaacctttaaatatattcttagacctggtaaatgcactcagacttgcgtctttaggaatttttaactttctttcactacattggcacttaaattttttctttataaagctttttgaaggtcataaacaaagaccataattgatgatagacctaatacatttcctctgtgtgtgtgtgtaacattccaaatactttttttttcttttccactgtttgtaaggtgcaacaatttaatatttttaagggactttttaagagttccttaagaaccaatttaaaattacttcagtgcaatcctacacagtatcaacattagaattttgatattagtcttatgttatcttccattctatttttatctgctttttgctgctagtttcaaactgccagtatttttccttttgcttttaaaatagttacaatatttttcatgatagccacagtattgccacagtttattataataaagggtttttatttgatttagcgcattcaaagcttttttctatcacttttgtgttcagaatataacctttgtgtgcgtgtatgttgtgtgtgtgcatgtgtggcgtatatgtgtgttacaggttaatgccttcttggaattgtgttaatgttctcttggtttattatgccatcagaatggtaaatgagaacactacaactgtagtcagctcacaatttttaaataaaggataccacagtgcatgctgtttgttcaaatctttg

SEQ ID NO: 290497 - DNA, 927 bp, Homo sapiens
tcacattaacgcacacatcagttccaggccccattccattctctgaacatcttctgacacactgacagtgctgagcagagcaaggttgggttcgctcctctggcagaacctcggctctcaggaggtccttgttccagggaacagctgcttctctggggctgggctctactccctgcagcccctcgcactacccagctggaaccagggacaacgcctgagtccaaccctcgtgtctattttccagaaaacgggcaatgctgtgagagccattggaagactgtcctctatggcaatgatctcagggctcagtggcaggaaatcctcaacagggtcaccaaccagcccgctcaatgcagaaaaactagaatctgaagaagatgtgtcccaagctttccttgaggctgttgctgaggaaaagcctcatgtaaaaccctatttctctaagaccattcgcgatttagaagttgtggagggaagtgctgctagatttgactgcaagattgaaggatacccagaccccgaggttgtctggttcaaagatgaccagtcaatcagggagtcccgccacttccagatagactacgatgaggacgggaactgctctttaattattagtgatgtttgcggggatgacgatgccaagtacacctgcaaggctgtcaacagtcttggagaagccacctgcacagcagagctcattgtggaaacgatggaggaaggtgaaggggaaggggaagaggaagaagagtgaaacaaagccagagaaaagcagtttccgtcctcatcgtagtctatctggaagtggcgggactccctgattgactggtcatctttgaaccggacaacctcggggtctgggtatccttcaatcttgcagtcaaatctagcagcagttccctccacaacttctaaatcgcgagtcgacgc

SEQ ID NO: 290498 - DNA, 799 bp, Homo sapiens
  misc_feature (719)..(719): n is a, c, g, or t
  misc_feature (721)..(721): n is a, c, g, or t
  misc_feature (733)..(733): n is a, c, g, or t
  misc_feature (736)..(736): n is a, c, g, or t
  misc_feature (766)..(767): n is a, c, g, or t
  misc_feature (770)..(770): n is a, c, g, or t
  misc_feature (772)..(773): n is a, c, g, or t
tcacattaacgcacacatcagttccaggccccattccattctctgaacatcttctgacacactgacagtgctgagcagagcaaggttgggttcgctcctctggcagaacctcggctctcaggaggtccttgttccagggaacagctgcttctctggggctgggctctactccctgcagcccctcgcactacccagctggaaccagggacaacgcctgagtccaaccctcgtgtctattttccagaaaacgggcaatgctgtgagagccattggaagactgtcctctatggcaatgatctcagggctcagtggcaggaaatcctcaacagggtcaccaaccagcccgctcaatgcagaaaaactagaatctgaagaagatgtgtcccaagctttccttgaggctgttgctgaggaaaagcctcatgtaaaaccctatttctctaagaccattcgcgatttagaagttgtggagggaagtgctgctagatttgactgcaagattgaaggatacccagaccccgaggttgtctggttcaaagatgaccagtcaatcagggagtcccgccacttccagatagactacgatgaggacgggaactgctctttaattattagtgatgtttgcggggatgacgatgccaagtacacctgcaaggctgtcaacagtcttggagaagccacctgcacagcagagctcattgtggaaacgatggtgttcnanagaatcagcaanagnattttccagccttggaaaacaagagcaagnnggnannggaggctctcaataaataatggtgtt

SEQ ID NO: 290499 - DNA, 635 bp, Homo sapiens
gttgggttcgctcctctggcagaacctcggctctcaggaggtccttgttccagggaacagctgcttctctggggctgggctctactccctgcagcccctcgcactacccagctggaaccagggacaacgcctgagtccaaccctcgtgtctattttccagaaaacgggcaatgctgtgagagccattggaagactgtcctctatggcaatgatctcagggctcagtggcaggaaatcctcaacagggtcaccaaccagcccgctcaatgcagaaaaactagaatctgaaggtaggaggagtttctccagccagctggtgagaaagaaagggctggggaacaaaggggcattttgaggtttggttggttttgtcttttttttttttttttaatattccctgcaaggataaattcagaagtaatttgggttgccctgacaattactaagtctaataattattcttaatcgtttaactttaagcttaaccattttcggagggaaagttgttatttgtctaatagaactagatgacctcagctatgctttttcatatatttgtgttaaaattaacaaagattgtattaaaatcttctttgttcttatggcaaaagtgatattctatattaataggcaaa

SEQ ID NO: 290500 - DNA, 2590 bp, Homo sapiens
tgcctcggcctcccaaagtactgggattataggcatgagccaccatgcccggcctttgctcttaactactgatgttgtcttcctgatcttttctacaagaagcttttaaactttttggactttaacctacaataagaaatccattttacatgttcacatgtatctataacaacatttatatttctaaaacaaacttttcatgaaacaagatatacctacatatgtcaggcactctgatattttctattctagtccaccttttccatttcattctatttatgggaaatatatgttggttgggagtcactgagttaatttaatgacccactaataggctgtgagtggcattggaaaaatacctgcttgtaagatatgcgaacacacgtttcaaggttgtttgtgcatgtggaaatattttggggtgctatctgttttaccatcagtttgtacaaggacactaagacagtgtagcctgctgacttgagaatgttctgtaaggactggaaacactagaatcttgaagaaacgcctggctagaggtgagggtaagctgttaattacactgattacagtttgtgcctctcagactgagaactcttttcttcttgctgggggcattgctatctctaggatgtttgccctgaagtcctgatagtctctttggggttttaataaatggctgaaaaaattgttgtggggtttcaacaggcgttcataggcacccttgcttggcaatataacatggcttttgatgtttgggtgttggaagggatctttgaagtgctgagagggactcagtctttttccaaaatctctgcttgtgtctgtccagcctctggctccactgcttggctgagatcctggcccatagtagaatctgtgtagaggaaacgagagctcactatttgtgaggcagcctgttccactattggactgctttaaatgtagtgatcagtgattatgctataatccaatcatgtattaattgggcaccaactatgcactaggcatggtatcaagtaccaggagtacaaaaataagtaaaccttgatttctgctatcaattactctcttctcctacttctgtactactgcttttctattgtgagtttgtttagttcattaattggtttattcattcattcaacaatcatatactgattagctactctgaccaggtccagtactaactctgaagaagttatgcccatcccatcttcaccccaagccttctccttttgagactcctcatccagtttctttagttcttcatatatcactgtttttcagatctctggctatccttgccattgacctcagaaatcctgtatttgaccttaaccttcttatacccagtccatacccaaagtgatggaaatggaatagatttctttttaaagttttaaacgaatattttgactgaaaaattttggcagtcttgtatgcaaatgacactgcagagcattgttttctcccccccacgtaggagattttattcaactaaggcacaggcatattaaaagactttcagtataaggaaaaggggtagtttattccctccaaatttgactacagctcgaaattgtctttattaatgcaaagttcttttgtcaccttgactttgggacactgttaccaaacctcgtgggaaatatcaagttccagaagattgaatacatgcaggaaacaaatgttttttgggccctagagtgaacatttggtccatatgaaaatgaccaggaagacaattaggtgaaggttttttaatgatttgtgctacgtcagtctcttcccataagacatattcaaagttttaacttttccttaagaggcttccatggggagcaagcatttgataattcatcctttaagaaaaacaccaccgtacactgcttgaagagttcctcttctattacttaaaacgtttttattgtgcaacatttaaggcatacaaaaacatataaagaataccatgatgaaaatctatgactgtattaccaagcttaagaaataaaacagttgagtgatctctcatttatgactaaattaacttattaaaaccattaaaacttttggattattcctgttaagatattttcttttttttattattatgctttaagttctagggtacatgtgcacaatgtgcaggtttgttacatatgtatacatgcaccatgttggtgtgctgcacccattaactcgtcatttacattaggtatatatcctaatgctatccctcccccctccacccaccccatgacaggtcccggtgtgtgatgttccccactctgtgtccaagtgttctcattgttcaattcccacctatgagtgagaacatgcggtgtttggttttttgtccttgcaatagtttgctgagaaagatggtgtccagcttcatccatgtccctgcaaaggacatgaactcatccttttttatggctgcatagtattccatggtgtatatgtgccacattttcttaatccagtctatcattattggacatttgggttggttccaagtctttgctattgtgaatagtgcctcaataaacatatatgtgcatgtgtctttatagcagcatgattt

SEQ ID NO: 290501 - DNA, 201 bp, Homo sapiens
cgtctctgggtggaggggagggcggcggatgggcctgggctggagcccggagcggcccaggtgcagggtcggcgcggcggcggcagcggcggcggcggcggcggcggcggcggcaggggcggcggcggtgctgacggcggctgcggaggcgggcgacacttgcacgtgtaagtgtgctcacgatctgtgcgtgcacagctg

SEQ ID NO: 290502 - DNA, 511 bp, Homo sapiens
ttcgacctttgggaattacagctgaacgtgagatttgtgttcggacagaggaaagccatatcatttggcttgtttacacctttggctagtgtgaataatgctgctatgaacaaagacatgcagatacctgctggggcccctgctctcagttcttttcagaatacaccagaagtagaattgctgcatcgtgtgatccctgggtgtcctgctgccccctcacatggagaaatcccagcactgggagaaaggacagggtctgtattatcagatacatgcagccactcctccagcgtcccctctcccatagggcaagtccggatgctccaggctctccccagtgttgctgttagatttctctgcagagctgggatctccattccccatactttgctgctttttgtttgtttgtttcctgtttctcaaggcatataaagctgcaggaatacagatgggattggatctgcggcacctaaaacaaatgctggataaacatttccagaatgtatgaagc

SEQ ID NO: 290503 - DNA, 1068 bp, Homo sapiens
tctgtctgcagattccagcagtggctcttctcctcaccctttttgggctatggtggtaagagatacccaatgataacagctctgggaaaatgctaacccatttttttctggagttctctcaagccctcatgtcaattatcccacgatacgcagatgctacatagcaacgtttgggtcagcgacgaattgcgtatagaacggtggtctgctgagatgacaatagtgtatttatgctgtaccttttctatgtttagatgtgtgtagatgcacaaatacttgccgtggtgttaagattgcctgcagtattcacaccataacatgcactgcaggcttgtagcctaggagcagtcgactctagcgtccatcctgggtgtgtattgggctgtaccatctgggttggtgtaagtgcacgctacaatgttcctatggtcataaaatcacctaacgacacatttctaacgacacgtccctgtcgttaagcaatgcatgactgtactaacctctcctgcagttgctcagatggggcgagcctcctgtttgtgctagggccctggctgctaggctggaagcctcatacgtctcagtgcatcttcccctcccaggtcatggtgatgcccaaatacgtttggctggagcaccctgaagtctctgctaccatccaagctggtttggagacgtgaaccagaccaatgaagggcaggctttagatggtcattttctcattaggctcctctcctcccccacgctagatccctgggtgtcctgctgccccctcacatggagaaatcccagcactgggagaaaggacagggtctgtattatcagatacatgcagccactcctccagcgtcccctctcccatagggcaagtccggatgctccaggctctccccagtgttgctgttagatttctctgcagagctgggatctccattccccatactttgctgctttttgtttgtttgtttcctgtttctcaaggcatataaagctgcaggaatacagatgggattggatctgcggcacctaaaacaaatgctggataaacatttccagaatgtatgaagc

SEQ ID NO: 290504 - DNA, 2864 bp, Homo sapiens
  misc_feature (533)..(533): n is a, c, g, or t
  misc_feature (576)..(576): n is a, c, g, or t
  misc_feature (2835)..(2835): n is a, c, g, or t
gtccacaggcaaagtgagttgaggcaggaagattgtgagatggcctcacccaggctcccaggtccttaatcaaccacctgagctagtttcccaaaagcagcccacagagggtgctccagcaaatggcccctcctcagtgctcagaccccatgtggtctcccacggccctggcctccaggatggctgccaaacaaagggaggaggagtaaggctgaagtcctcagccttctggggtgggtcctccagtctggaggcagaattccaccccctggtctgacctctcccaaggtggggagaggtggtcccaggccaagggaaggaatttttcctgaggcccagcagcctcctgaagacaccatcatggtagcagagggggcttaggtgcggggagaaggggggtctgaaaagaggcagcccatccaggctcagagatggaaccccctgctccgctgggccacggtgcctctcagcctcaggatcctatcaccgttgttggggtgagagggctggtgtgctcttttcaccaagcgggntttctggcctggcctcgggggtgtgggacacagcatcgcttcntctccactagcctgagggccaccattgtcccatctgtgtccccagccccacttcaaagcctcacacatacactgtgcacagcaattatctatgaaggagtaaaggaatttttgccattggggttgtgctggggggtgacttcagagcatcagagctgactccttactcgggaagcaatgggcccatgtagatggggaagggacgtcatcttgggagacgggatgtccgacttggtgctggtggctcaccagcttcttgggacaaacagcagctcctgcgcccctggtagagccagcaggcttgggtggttaggtttggtctcctctgagaggctctgggtggccccacaacatctgggctattttgttactggtacaagcttccggtctcccacaggccaagggaagttcttaaagcaatgaaaaaaaaaaaaaaaaaggaacagagacagagtcttgccaggttgcccaggttggaatgcagtgatatgatcatagcccaccgcatgacttctgggctcaagcagccctcctgcctctgcctcctgagtggctgagactacaggcatgcatcagctcttcttaaagcaattcatcttcccccatgtctagcctcatctgtgtccccagccccactggggcagaaagctgtggaatgttactcacactgtcattggatcaacccctggctttcctgtggggatcccctccctgggaggggttcccatgacaatttgggctccagaaagggatgtgggaggagagtgcggtggagggaggtggtctgtggtctcccttcatggaccagaaagcttgacccccaaggggaccctggcttctacttcctcagagctaagcagtgccaaggggcagcctgagacatgggcaaaggggaagcctaaatggaaaaagagagagagagagagagaaagagagaaggggcagggaggacaaagacacatggcaagtgtccaagctggaacattcccaccagtggccttattgcattaaggattttcccaaaaagcagaaatacactgatagtcaatggaacatagcagagctgtcacgagcccaggaaacacaagtcccacctctacacagccagagactgtgtgactgtcccaaattttaaatcaagatagacaataagaacctaccactttcacatccaagaaaactgtgtccctacacatttcagtcacaccgtgctgtggcttgaggccagccagatgcaaaaatcaggaaggttctgaggggtagggccttctgtctttctgaaaggggcccctgagcggagggggcagtgctgggggagctaaagcgcagtgggctgtcacttcacgactatgacttctgtttcccaagtgcacttcctgaccctgagatttgtgccatggcacacaggaatcagggcacttccgtttacatatacgctcattatcaggactggcgtcgtgggtgtggggcctgggcagtcacagggccctgttcttagaaggtgccccggcttgctttaatgctgtgttgttgtccttttgaaagccttactattttaacaaggggccctgcatttttatattgcacagggccctgcaattatgcagccattcctgcttttgatctcacttaccccacagccataatggaagagcgcctggaaggagtccttatcctgattcccagatggtgaaactgagtgccaggaggggcagtgctgaagccgagaccagacaggatccctcgggtggaatccagggctgctgtttctcttgggggctcctcctcagtgaatggatgggtggtaatctcctttcctacctgtcctagcggtagcctctgttccttctcttgttttatctcattttatttttttaaaaaataccaaaaccattctctcacctgccagagaggagctcataggagttgggcttcctcagagagtgttcctccctcgtcccctgtcctgtccaggcacctgcgagcaggatggtgtgtccccggctaaatccacaggcgctccactctgtcccagagagcccacagccaaaaacttcgtcctgtcctggaaaagcttcactgccttccaacagagccttcctgcatgccgaggttgaagaggtgtccgctgagtgctctgtcttctgggaattttggctgtttcctgcaacctatcatcagatgccacacttatgagaccctcatccttctgctcactctcttccattgtttcactcattaaaaatatatattttaagcntaaaaaaaaaatcggcctcttgggcctca

SEQ ID NO: 290505 - DNA, 2694 bp, Homo sapiens
  misc_feature (533)..(533): n is a, c, g, or t
  misc_feature (576)..(576): n is a, c, g, or t
  misc_feature (2665)..(2665): n is a, c, g, or t
gtccacaggcaaagtgagttgaggcaggaagattgtgagatggcctcacccaggctcccaggtccttaatcaaccacctgagctagtttcccaaaagcagcccacagagggtgctccagcaaatggcccctcctcagtgctcagaccccatgtggtctcccacggccctggcctccaggatggctgccaaacaaagggaggaggagtaaggctgaagtcctcagccttctggggtgggtcctccagtctggaggcagaattccaccccctggtctgacctctcccaaggtggggagaggtggtcccaggccaagggaaggaatttttcctgaggcccagcagcctcctgaagacaccatcatggtagcagagggggcttaggtgcggggagaaggggggtctgaaaagaggcagcccatccaggctcagagatggaaccccctgctccgctgggccacggtgcctctcagcctcaggatcctatcaccgttgttggggtgagagggctggtgtgctcttttcaccaagcgggntttctggcctggcctcgggggtgtgggacacagcatcgcttcntctccactagcctgagggccaccattgtcccatctgtgtccccagccccacttcaaagcctcacacatacactgtgcacagcaattatctatgaaggagtaaaggaatttttgccattggggttgtgctggggggtgacttcagagcatcagagctgactccttactcgggaagcaatgggcccatgtagatggggaagggacgtcatcttgggagacgggatgtccgacttggtgctggtggctcaccagcttcttgggacaaacagcagctcctgcgcccctggtagagccagcaggcttgggtggttaggtttggtctcctctgagaggctctgggtggccccacaacatctgggctattttgttactggtacaagcttccggtctcccacaggccaagggaagttcttaaagcaatgaaaaaaaaaaaaaaaaaggaacagagacagagtcttgccaggttgcccaggttggaatgcagtgatatgatcatagcccaccgcatgacttctgggctcaagcagccctcctgcctctgcctcctgagtggctgagactacaggcatgcatcagctcttcttaaagcaattcatcttcccccatgtctagcctcatctgtgtccccagccccactggggcagaaagctgtggaatgttactcacactgtcattggatcaacccctggctttcctgtggggatcccctccctgggaggggttcccatgacaatttgggctccagaaagggatgtgggaggagagtgcggtggagggaggtggtctgtggtctcccttcatggaccagaaagcttgacccccaaggggaccctggcttctacttcctcagagctaagcagtgccaaggggcagcctgagacatgggcaaaggggaagcctaaatggaaaaagagagagagagagagagaaagagagaaggggcagggaggacaaagacacatggcaagtgtccaagctggaacattcccaccagtggccttattgcattaaggattttcccaaaaagcagaaatacactgatagtcaatggaacatagcagagctgtcacgagcccaggaaacacaagtcccacctctacacagccagagactgtgtgactgtcccaaattttaaatcaagatagacaataagaacctaccactttcacatccaagaaaactgtgtccctacacatttcagtcacaccgtgctgtggcttgaggccagccagatgcaaaaatcaggaaggttctgaggggtagggccttctgtctttctgaaaggggcccctgagcggagggggcagtgctgggggagctaaagcgcagtgggctgtcacttcacgactatgacttctgtttcccaagtgcacttcctgaccctgagatttgtgccatggcacacaggaatcagggcacttccgtttacatatacgctcattatcaggactggcgtcgtgggtgtggggcctgggcagtcacagggccctgttcttagaaggtgccccggcttgctttaatgctgtgttgttgtccttttgaaagccttactattttaacaaggggccctgcatttttatattgcacagggccctgcaattatgcagccattcctgcttttgatctcacttaccccacagccataatggaagagcgcctggaaggagtccttatcctgattcccagatggtgaaactgagtgccaggaggggcagtgctgaagccgagaccagacaggatccctcgggtggaatccagggctgctgtttctcttgggggctcctcctcagtgaatggatgggtggcacctgcgagcaggatggtgtgtccccggctaaatccacaggcgctccactctgtcccagagagcccacagccaaaaacttcgtcctgtcctggaaaagcttcactgccttccaacagagccttcctgcatgccgaggttgaagaggtgtccgctgagtgctctgtcttctgggaattttggctgtttcctgcaacctatcatcagatgccacacttatgagaccctcatccttctgctcactctcttccattgtttcactcattaaaaatatatattttaagcntaaaaaaaaaatcggcctcttgggcctca

SEQ ID NO: 290506 - DNA, 1391 bp, Homo sapiens
  misc_feature (536)..(536): n is a, c, g, or t
  misc_feature (620)..(620): n is a, c, g, or t
ccatggcctttgtggggagagaaacactaaacagccagttctttaattactactgtggtaagtggaaatgcagaataggttcttgggccgagggctaggggttttgttacaatgtgattttcttatttatatatttaatttacctggtctttacgtctttagcgaaaaaaacaagaacaacttactcctggagtagtctatgtgcgccacctacctaacctacttgacgaaacccagatcttttcatatttctcccagtttggcactgtgacacggttcaggctgtccagaagtaaaagggtaagatttttgcagttggatttaatgttttgtttttcaaatgtgtattatccttgacattaaagagcacgttcacgcatacattattgcttatcagatttcattccaaaaaggagagtggaggaggtttagaatctgaaacagctacaggagcaaaatcagtattattgtaaaagtttgttttttacatttctccaaatccttacattaaattgacagtcctggtaaatgagctntagtatgaggcccaggtttatacattttcttgtgttagcctttggtacaagcatccttataatagcaaaggtttatatagtgantagttaaaggtgaggactctggagttggactgctgaggtttggggtcaggctctacaccttactagttagagtgatatgaccttaccatgtttcagtgttgtgatctgttaaatataagtaaaacttcctgggagtatttagtcaaaggttaaatataaagtctttagaggattgcttggtacacaataaacactatataagtataattactatttgtgtcatacctgccttctaatgagaaaacgctttacatagcttgtttcaatagtggaggagtgacccactttcttttctttccccgcacataaactttaattggttgtagccatagacacctatttgatttagcatgtgggggatagggtgcacatccatcatctgttagttgtcgtaaagatagattgtaggtagaattgaggtcccttttgtacccttcccagtgctcttcaacttctttaattagggaattaaattcacaaattcagttttcttttttttgagactgaggcttgcactccagcctgggggacagagcaagactctgtctcaaacaaaaaaaaaaaaaaggaaaagataagaaaaacaagtgtttatatgaagtattttctcagaaaaagagtaacccaaatacttttcaagtccatgtggcttgattaatctttaataaataagaatattggtgatttagtaaaaatggatattctacctagctttgttaatcaaataaactcatattatctctgttacaaaatttgccagcaagaaaattt

SEQ ID NO: 290507 - DNA, 678 bp, Homo sapiens
ctgcttttcctgtaccctgtttgtgacttaggagatgggggtggcctgcctttgcacattcttcctgcttccaccctcctgaattcaggattctgtgaatcagtgagctccaggttttggccttcccttcaacctctgcagctctgtcaattcctctactgggtttttcctagttttgccctttacttgagataattcactgtatttatgagttttgattttttaaaatgaaatgctcttgtcatttagggaggatttactgataatatatatgaggatctaatgctaagtttagaaagaaaagatatgagtgtcaatttctaacttctttattaaagattttacagaaaacggaaagtatttcaaaaactaatcgtcagacgtctacaaaaggccaggttttacgtaagaagaagaaaaaagtttcaggtactcttgacactcctgagaagactgtggatagccagggccccacaccagtttgtacaccaacatttttggagaggcgaaaatctcaagtggctgaactgaatgatgatgataaagatgatgaaatagttttcaaacagcccatatcctgtgtaaaagaagaaatacaagagactcaaacacctacacattcacggtagaattgaccccagtagtagcactagaccccaatagagcacaagacccccg

SEQ ID NO: 290508 - DNA, 1639 bp, Homo sapiens
gggggagctgggagcccgacgtttccgggagcgccgcgtggttagcgtcggcggcttttggcatggcgactttttctggcccggctgggccaatcctgtcgcttaatccgcaggaagatgtcgagtttcaaaaggaggtggcgcaggttcgcaagcgcataacccagcgaaaaaaacaagaacaacttactcctggagtagtctatgtgcgccacctacctaacctacttgacgaaacccagatcttttcatatttctcccagtttggcactgtgacacggttcaggctgtccagaagtaaaaggactggaaatagcaaaggctatgcatttgtggagtttgagtctgaggatgttgccaaaatagttgctgaaacaatgaacaactacctgtttggtgaaagactcttggagtgtcattttatgccacctgaaaaagtacataaagaactctttaaagactggaatattccatttaagcagccatcatatccatcagtgaaacggtataatcggaatcggacactaacacaaaagctacggatggaggagcgatttaaaaagaaagaaagattactcaggaagaaattagctaaaaaaggaattgactatgattttccttctttgattttacagaaaacggaaagtatttcaaaaactaatcgtcagacgtctacaaaaggccaggttttacgtaagaagaagaaaaaagtttcaggtactcttgacactcctgagaagactgtggatagccagggccccacaccagtttgtacaccaacatttttggagaggcgaaaatctcaagtggctgaactgaatgatgatgataaagatgatgaaatagttttcaaacagcccatatcctgtgtaaaagaagaaatacaagagactcaaacacctacacattcacggaaaaaaagacgaagaagcagcaatcagtgattttcaatgtattatatttcttttgaaaaatataatatttttatgagagtggactttgtatttcactaggtacaatggaatacaacctttgacaagattttcagaggaaaaatacactgtttggtcaagttaaggaaagcagtgtgtaattttggattgcctgcccttggctgaaatacaggggtgcataccatcttgcagtggcttggctgacattgcctctttgtcctggcctctagttttcttttgatatttcatagctctccttagtttactctgcctggatagaaagttgaccactaactgcaggtttaagtactaaactgcagccttttctgtcgccagcaattaaagaccaccaatcttgtttgtccatctacatggtttgtcggggacatttaactcatggaggtgctttagatttcaacatcagatggttgaagctggaagtttaattatatgtagagtgagaaggcagttccagttttagcacagatttgtttatgtgttcagattttaatagagattcaaaaatgactcatttttaccaataatgttaaattagttttggttgtgctagcatgaattaataaccaccattttataccagtatcatcagtgaagaattgtatttcaagattcaaacaataaccagcaattaaacttttttctacaatgtatttgtttgcgagtag

SEQ ID NO: 290509 - DNA, 1734 bp, Homo sapiens
gggggagctgggagcccgacgtttccgggagcgccgcgtggttagcgtcggcggcttttggcatggcgactttttctggcccggctgggccaatcctgtcgcttaatccgcaggaagatgtcgagtttcaaaaggaggtggcgcaggttcgcaagcgcataacccagcgaaaaaaacaagaacaacttactcctggagtagtctatgtgcgccacctacctaacctacttgacgaaacccagatcttttcatatttctcccagtttggcactgtgacacggttcaggctgtccagaagtaaaaggactggaaatagcaaaggctatgcatttgtggagtttgagtctgaggatgttgccaaaatagttgctgaaacaatgaacaactacctgtttggtgaaagactcttggagtgtcattttatgccacctgaaaaagtacataaagaactctttaaagactggaatattccatttaagcagccatcatatccatcagtgaaacggtataatcggaatcggacactaacacaaaagctacggatggaggagcgatttaaaaagaaagaaagattactcaggaagaaattagctaaaaaaggaattgactatgattttccttctttgattttacagaaaacggaaagtatttcaaaaactaatcgtcagacgtctacaaaaggccaggttttacgtaagaagaagaaaaaagtttcaggtactcttgacactcctgagaagactgtggatagccagggccccacaccagtttgtacaccaacatttttggagaggcgaaaatctcaagtggctgaactgaatgatgatgataaagatgatgaaatagttttcaaacagcccatatcctgtgtaaaagaagaaatacaagagactcaaacacctacacattcacggaaaaaaagacgaagaagcagcaatcagtgattttcaatgtattatatttcttttgaaaaatataatatttttatgagagtggactttgtatttcactaggtacaatggaatacaacctttgacaagattttcagaggaaaaatacactgtttggtcaagttaaggaaagcagtgtgtaattttggattgcctgcccttggctgaaatacaggggtgcataccatcttgcagtggcttggctgacattgcctctttgtcctggcctctagttttcttttgatatttcatagctctccttagtttactctgcctggatagaaagttgaccactaactgcaggtttaagtactaaactgcagccttttctgtcgccagcaattaaagaccaccaatcttgtttgtccatctacatggtttgtcggggacatttaactcatggaggtgctttagatttcaacatcagatggttgaagctggaagtttaattatatgtagagtgagaaggcagttccagttttagcacagatttgtttatgtgttcagattttaatagagattcaaaaatgactcatttttaccaataatgttaaattagttttggttgtgctagcatgaattaataaccaccattttataccagtatcatcagtgaagaattgtatttcaagattcaaacaataaccagcaattaaacttttttctacaatgtatttgtttgcgagtaggacttgggagtcattgggaaaaaaaaataataaattttccccttcattaacgaattcagactcattaaaaacattgccatcagaaaaaaaaaaaa

SEQ ID NO: 290510 - DNA, 991 bp, Homo sapiens
gggggagctgggagcccgacgtttccgggagcgccgcgtggttagcgtcggcggcttttggcatggcgactttttctggcccggctgggccaatcctgtcgcttaatccgcaggaagatgtcgagtttcaaaaggaggtggcgcaggttcgcaagcgcataacccagcgaaaaaaacaagaacaacttactcctggagtagtctatgtgcgccacctacctaacctacttgacgaaacccagatcttttcatatttctcccagtttggcactgtgacacggttcaggctgtccagaagtaaaaggactggaaatagcaaaggctatgcatttgtggagtttgagtctgaggatgttgccaaaatagttgctgaaacaatgaacaactacctgtttggtgaaagactcttggagtgtcattttatgccacctgaaaaagtacataaagaactctttaaagactggaatattccatttaagcagccatcatatccatcagtgaaacggtataatcggaatcggacactaacacaaaagctacggatggaggagcgatttaaaaagaaagaaagattactcaggaagaaattagctaaaaaaggaattgactatgattttccttctttgattttacagaaaacggaaagtatttcaaaaactaatcgtcagacgtctacaaaaggccaggttttacgtaagaagaagaaaaaagtttcaggtactcttgacactcctgagaagactgtggatagccagggccccacaccagtttgtacaccaacatttttggagaggcgaaaatctcaagtggctgaactgaatgatgatgataaagatgatgaaatagttttcaaacagcccatatcctgtgtaaaagaagaaatacaagagactcaaacacctacacattcacggaaaaaaagacgaagaagcagcaatcagtgattttcaatgtattatatttcttttgaaaaatataatatttttatgag

SEQ ID NO: 290511 - DNA, 2014 bp, Homo sapiens
gggggagctgggagcccgacgtttccgggagcgccgcgtggttagcgtcggcggcttttggcatggcgactttttctggcccggctgggccaatcctgtcgcttaatccgcaggaagatgtcgagtttcaaaaggaggtggcgcaggttcgcaagcgcataacccagcgaaaaaaacaagaacaacttactcctggagtagtctatgtgcgccacctacctaacctacttgacgaaacccagatcttttcatatttctcccagtttggcactgtgacacggttcaggctgtccagaagtaaaaggactggaaatagcaaaggctatgcatttgtggagtttgagtctgaggatgttgccaaaatagttgctgaaacaatgaacaactacctgtttggtgaaagactcttggagtgtcattttatgccacctgaaaaagtacataaagaactctttaaagactggaatattccatttaagcagccatcatatccatcagtgaaacggtataatcggaatcggacactaacacaaaagctacggatggaggagcgatttaaaaagaaagaaagattactcaggaagaaattagctaaaaaaggaattgactatgattttccttctttgattttacagaaaacggaaagtatttcaaaaactaatcgtcagacgtctacaaaaggccaggttttacgtaagaagaagaaaaaagtttcaggtactcttgacactcctgagaagactgtggatagccaggtaaaatggttttcaatactccagacaccagatattatagaaataatttgaaggaggagaagcagtttctgctactctcattttaagatttcaaattaaatattgtgacatttggtagatctttattgttgatttagcaattttctgcctaaaaccttataatggaacatgctatatttgttaattgtgaatttctgtaccaagtttgataagcatctaagttctttattctttgcaatagtatcaccaaaagatggtaacagagctaaaataatggggcacaacttgtaaaaatagaggagagatgatatttttgggtaaagtcataatcatgttttacatttatgtattataatctttacttgttgaatccagggccccacaccagtttgtacaccaacatttttggagaggcgaaaatctcaagtggctgaactgaatgatgatgataaagatgatgaaatagttttcaaacagcccatatcctgtgtaaaagaagaaatacaagagactcaaacacctacacattcacggaaaaaaagacgaagaagcagcaatcagtgattttcaatgtattatatttcttttgaaaaatataatatttttatgagagtggactttgtatttcactaggtacaatggaatacaacctttgacaagattttcagaggaaaaatacactgtttggtcaagttaaggaaagcagtgtgtaattttggattgcctgcccttggctgaaatacaggggtgcataccatcttgcagtggcttggctgacattgcctctttgtcctggcctctagttttcttttgatatttcatagctctccttagtttactctgcctggatagaaagttgaccactaactgcaggtttaagtactaaactgcagccttttctgtcgccagcaattaaagaccaccaatcttgtttgtccatctacatggtttgtcggggacatttaactcatggaggtgctttagatttcaacatcagatggttgaagctggaagtttaattatatgtagagtgagaaggcagttccagttttagcacagatttgtttatgtgttcagattttaatagagattcaaaaatgactcatttttaccaataatgttaaattagttttggttgtgctagcatgaattaataaccaccattttataccagtatcatcagtgaagaattgtatttcaagattcaaacaataaccagcaattaaacttttttctacaatgtatttgtttgcgagtag

SEQ ID NO: 290512 - DNA, 1634 bp, Homo sapiens
ccatggcctttgtggggagagaaacactaaacagccagttctttaattactactgtggtaagtggaaatgcagaataggttcttgggccgagggctaggggttttgttacaatgtgattttcttatttatatatttaatttacctggtctttacgtctttagcgaaaaaaacaagaacaacttactcctggagtagtctatgtgcgccacctacctaacctacttgacgaaacccagatcttttcatatttctcccagtttggcactgtgacacggttcaggctgtccagaagtaaaaggactggaaatagcaaaggctatgcatttgtggagtttgagtctgaggatgttgccaaaatagttgctgaaacaatgaacaactacctgtttggtgaaagactcttggagtgtcattttatgccacctgaaaaagtacataaagaactctttaaagactggaatattccatttaagcagccatcatatccatcagtgaaacggtataatcggaatcggacactaacacaaaagctacggatggaggagcgatttaaaaagaaagaaagattactcaggaagaaattagctaaaaaaggaattgactatgattttccttctttgattttacagaaaacggaaagtatttcaaaaactaatcgtcagacgtctacaaaaggccaggttttacgtaagaagaagaaaaaagtttcaggtactcttgacactcctgagaagactgtggatagccagggccccacaccagtttgtacaccaacatttttggagaggcgaaaatctcaagtggctgaactgaatgatgatgataaagatgatgaaatagttttcaaacagcccatatcctgtgtaaaagaagaaatacaagagactcaaacacctacacattcacggaaaaaaagacgaagaagcagcaatcagtgattttcaatgtattatatttcttttgaaaaatataatatttttatgagagtggactttgtatttcactaggtacaatggaatacaacctttgacaagattttcagaggaaaaatacactgtttggtcaagttaaggaaagcagtgtgtaattttggattgcctgcccttggctgaaatacaggggtgcataccatcttgcagtggcttggctgacattgcctctttgtcctggcctctagttttcttttgatatttcatagctctccttagtttactctgcctggatagaaagttgaccactaactgcaggtttaagtactaaactgcagccttttctgtcgccagcaattaaagaccaccaatcttgtttgtccatctacatggtttgtcggggacatttaactcatggaggtgctttagatttcaacatcagatggttgaagctggaagtttaattatatgtagagtgagaaggcagttccagttttagcacagatttgtttatgtgttcagattttaatagagattcaaaaatgactcatttttaccaataatgttaaattagttttggttgtgctagcatgaattaataaccaccattttataccagtatcatcagtgaagaattgtatttcaagattcaaacaataaccagcaattaaacttttttctacaatgtatttgtttgcgagtag

SEQ ID NO: 290513 - DNA, 1759 bp, Homo sapiens
gggggagctgggagcccgacgtttccgggagcgccgcgtggttagcgtcggcggcttttggcatggcgactttttctggcccggctgggccaatcctgtcgcttaatccgcaggaagatgtcgagtttcaaaaggaggtggcgcaggttcgcaagcgcataacccagcgaaaaaaacaagaacaacttactcctggagtagtctatgtgcgccacctacctaacctacttgacgaaacccagatcttttcatatttctcccagtttggcactgtgacacggttcaggctgtccagaagtaaaaggactggaaatagcaaaggctatgcatttgtggagtttgagtctgaggatgttgccaaaatagttgctgaaacaatgaacaactacctgtttggtgaaagactcttggagtgtcattttatgccacctgaaaaagtacataaagaactctttaaagactggaatattccatttaagcagccatcatatccatcagtgaaacggtataatcggaatcggacactaacacaaaagctacggatggaggagcgatttaaaaagaaagaaagattactcaggaagaaattagctaaaaaaggaattgactatgattttccttctttgattttacagaaaacggaaagtatttcaaaaactaatcgtcagacgtctacaaaaggccaggtaaaattttttttatcattttacatgcaagatattagagaaggataagtaggaaaacatattcaagactactgtagctgatcaatattcaaattgatgtgttttaaaatttattttaaggttttacgtaagaagaagaaaaaagtttcaggtactcttgacactcctgagaagactgtggatagccagggccccacaccagtttgtacaccaacatttttggagaggcgaaaatctcaagtggctgaactgaatgatgatgataaagatgatgaaatagttttcaaacagcccatatcctgtgtaaaagaagaaatacaagagactcaaacacctacacattcacggaaaaaaagacgaagaagcagcaatcagtgattttcaatgtattatatttcttttgaaaaatataatatttttatgagagtggactttgtatttcactaggtacaatggaatacaacctttgacaagattttcagaggaaaaatacactgtttggtcaagttaaggaaagcagtgtgtaattttggattgcctgcccttggctgaaatacaggggtgcataccatcttgcagtggcttggctgacattgcctctttgtcctggcctctagttttcttttgatatttcatagctctccttagtttactctgcctggatagaaagttgaccactaactgcaggtttaagtactaaactgcagccttttctgtcgccagcaattaaagaccaccaatcttgtttgtccatctacatggtttgtcggggacatttaactcatggaggtgctttagatttcaacatcagatggttgaagctggaagtttaattatatgtagagtgagaaggcagttccagttttagcacagatttgtttatgtgttcagattttaatagagattcaaaaatgactcatttttaccaataatgttaaattagttttggttgtgctagcatgaattaataaccaccattttataccagtatcatcagtgaagaattgtatttcaagattcaaacaataaccagcaattaaacttttttctacaatgtatttgtttgcgagtag

SEQ ID NO: 290514 - DNA, 1662 bp, Homo sapiens
gggggagctgggagcccgacgtttccgggagcgccgcgtggttagcgtcggcggcttttggcatggcgactttttctggcccggctgggccaatcctgtcgcttaatccgcaggaagatgtcgagtttcaaaaggaggtggcgcaggttcgcaagcgcataacccagcgaaaaaaacaagaacaacttactcctggagtagtctatgtgcgccacctacctaacctacttgacgaaacccagatcttttcatatttctcccagtttggcactgtgacacggttcaggctgtccagaagtaaaaggactggaaatagcaaaggctatgcatttgtggagtttgagtctgaggatgttgccaaaatagttgctgaaacaatgaacaactacctgtttggtgaaagactcttggagtgtcattttatgccacctgaaaaagtacataaagaactctttaaagactggaatattccatttaagcagccatcatatccatcagtgaaacggtataatcggaatcggacactaacacaaaagctacggatggaggagcgatttaaaaagaaagaaagattactcaggaagaaattagctaaaaaaggaattgactatgattttccttctttgattttacagaaaacggaaagtatttcaaaaactaatcgtaaaacctggccttttgtagacgtctgacgattacaaaaggccaggttttacgtaagaagaagaaaaaagtttcaggtactcttgacactcctgagaagactgtggatagccagggccccacaccagtttgtacaccaacatttttggagaggcgaaaatctcaagtggctgaactgaatgatgatgataaagatgatgaaatagttttcaaacagcccatatcctgtgtaaaagaagaaatacaagagactcaaacacctacacattcacggaaaaaaagacgaagaagcagcaatcagtgattttcaatgtattatatttcttttgaaaaatataatatttttatgagagtggactttgtatttcactaggtacaatggaatacaacctttgacaagattttcagaggaaaaatacactgtttggtcaagttaaggaaagcagtgtgtaattttggattgcctgcccttggctgaaatacaggggtgcataccatcttgcagtggcttggctgacattgcctctttgtcctggcctctagttttcttttgatatttcatagctctccttagtttactctgcctggatagaaagttgaccactaactgcaggtttaagtactaaactgcagccttttctgtcgccagcaattaaagaccaccaatcttgtttgtccatctacatggtttgtcggggacatttaactcatggaggtgctttagatttcaacatcagatggttgaagctggaagtttaattatatgtagagtgagaaggcagttccagttttagcacagatttgtttatgtgttcagattttaatagagattcaaaaatgactcatttttaccaataatgttaaattagttttggttgtgctagcatgaattaataaccaccattttataccagtatcatcagtgaagaattgtatttcaagattcaaacaataaccagcaattaaacttttttctacaatgtatttgtttgcgagtag

SEQ ID NO: 290515 - DNA, 1179 bp, Homo sapiens
  misc_feature (13)..(13): n is a, c, g, or t
cccttatggctgntgcacattgccatcatatccatcagtgaaacggtataatcggaatcggacactaacacaaaagctacggatggaggagcgatttaaaaagaaagaaagattactcaggaagaaattagctaaaaaaggaattgactatgattttccttctttgattttacagaaaacggaaagtatttcaaaaactaatcgtcagacgtctacaaaaggccaggttttacgtaagaagaagaaaaaagtttcaggtactcttgacactcctgagaagactgtggatagccagggccccacaccagtttgtacaccaacatttttggagaggcgaaaatctcaagtggctgaactgaatgatgatgataaagatgatgaaatagttttcaaacagcccatatcctgtgtaaaagaagaaatacaagagactcaaacacctacacattcacggaaaaaaagacgaagaagcagcaatcagtgattttcaatgtattatatttcttttgaaaaatataatatttttatgagagtggactttgtatttcactaggtacaatggaatacaacctttgacaagattttcagaggaaaaatacactgtttggtcaagttaaggaaagcagtgtgtaattttggattgcctgcccttggctgaaatacaggggtgcataccatcttgcagtggcttggctgacattgcctctttgtcctggcctctagttttcttttgatatttcatagctctccttagtttactctgcctggatagaaagttgaccactaactgcaggtttaagtactaaactgcagccttttctgtcgccagcaattaaagaccaccaatcttgtttgtccatctacatggtttgtcggggacatttaactcatggaggtgctttagatttcaacatcagatggttgaagctggaagtttaattatatgtagagtgagaaggcagttccagttttagcacagatttgtttatgtgttcagattttaatagagattcaaaaatgactcatttttaccaataatgttaaattagttttggttgtgctagcatgaattaataaccaccattttataccagtatcatcagtgaagaattgtatttcaagattcaaacaataaccagcaattaaacttttttctacaatgtatttgtttgcgagtag

SEQ ID NO: 290516 - DNA, 1351 bp, Homo sapiens
ctgcttttcctgtaccctgtttgtgacttaggagatgggggtggcctgcctttgcacattcttcctgcttccaccctcctgaattcaggattctgtgaatcagtgagctccaggttttggccttcccttcaacctctgcagctctgtcaattcctctactgggtttttcctagttttgccctttacttgagataattcactgtatttatgagttttgattttttaaaatgaaatgctcttgtcatttagggaggatttactgataatatatatgaggatctaatgctaagtttagaaagaaaagatatgagtgtcaatttctaacttctttattaaagattttacagaaaacggaaagtatttcaaaaactaatcgtcagacgtctacaaaaggccaggttttacgtaagaagaagaaaaaagtttcaggtactcttgacactcctgagaagactgtggatagccagggccccacaccagtttgtacaccaacatttttggagaggcgaaaatctcaagtggctgaactgaatgatgatgataaagatgatgaaatagttttcaaacagcccatatcctgtgtaaaagaagaaatacaagagactcaaacacctacacattcacggaaaaaaagacgaagaagcagcaatcagtgattttcaatgtattatatttcttttgaaaaatataatatttttatgagagtggactttgtatttcactaggtacaatggaatacaacctttgacaagattttcagaggaaaaatacactgtttggtcaagttaaggaaagcagtgtgtaattttggattgcctgcccttggctgaaatacaggggtgcataccatcttgcagtggcttggctgacattgcctctttgtcctggcctctagttttcttttgatatttcatagctctccttagtttactctgcctggatagaaagttgaccactaactgcaggtttaagtactaaactgcagccttttctgtcgccagcaattaaagaccaccaatcttgtttgtccatctacatggtttgtcggggacatttaactcatggaggtgctttagatttcaacatcagatggttgaagctggaagtttaattatatgtagagtgagaaggcagttccagttttagcacagatttgtttatgtgttcagattttaatagagattcaaaaatgactcatttttaccaataatgttaaattagttttggttgtgctagcatgaattaataaccaccattttataccagtatcatcagtgaagaattgtatttcaagattcaaacaataaccagcaattaaacttttttctacaatgtatttgtttgcgagtag

SEQ ID NO: 290517 - DNA, 1846 bp, Homo sapiens
ctgcttttcctgtaccctgtttgtgacttaggagatgggggtggcctgcctttgcacattcttcctgcttccaccctcctgaattcaggattctgtgaatcagtgagctccaggttttggccttcccttcaacctctgcagctctgtcaattcctctactgggtttttcctagttttgccctttacttgagataattcactgtatttatgagttttgattttttaaaatgaaatgctcttgtcatttagggaggatttactgataatatatatgaggatctaatgctaagtttagaaagaaaagatatgagtgtcaatttctaacttctttattaaagattttacagaaaacggaaagtatttcaaaaactaatcgtcagacgtctacaaaaggccaggtaaaattttttttatcattttacatgcaagatattagagaaggataagtaggaaaacatattcaagactactgtagctgatcaatattcaaattgatgtgttttaaaatttattttaaggttttacgtaagaagaagaaaaaagtttcaggtactcttgacactcctgagaagactgtggatagccaggtaaaatggttttcaatactccagacaccagatattatagaaataatttgaaggaggagaagcagtttctgctactctcattttaagatttcaaattaaatattgtgacatttggtagatctttattgttgatttagcaattttctgcctaaaaccttataatggaacatgctatatttgttaattgtgaatttctgtaccaagtttgataagcatctaagttctttattctttgcaatagtatcaccaaaagatggtaacagagctaaaataatggggcacaacttgtaaaaatagaggagagatgatatttttgggtaaagtcataatcatgttttacatttatgtattataatctttacttgttgaatccagggccccacaccagtttgtacaccaacatttttggagaggcgaaaatctcaagtggctgaactgaatgatgatgataaagatgatgaaatagttttcaaacagcccatatcctgtgtaaaagaagaaatacaagagactcaaacacctacacattcacggaaaaaaagacgaagaagcagcaatcagtgattttcaatgtattatatttcttttgaaaaatataatatttttatgagagtggactttgtatttcactaggtacaatggaatacaacctttgacaagattttcagaggaaaaatacactgtttggtcaagttaaggaaagcagtgtgtaattttggattgcctgcccttggctgaaatacaggggtgcataccatcttgcagtggcttggctgacattgcctctttgtcctggcctctagttttcttttgatatttcatagctctccttagtttactctgcctggatagaaagttgaccactaactgcaggtttaagtactaaactgcagccttttctgtcgccagcaattaaagaccaccaatcttgtttgtccatctacatggtttgtcggggacatttaactcatggaggtgctttagatttcaacatcagatggttgaagctggaagtttaattatatgtagagtgagaaggcagttccagttttagcacagatttgtttatgtgttcagattttaatagagattcaaaaatgactcatttttaccaataatgttaaattagttttggttgtgctagcatgaattaataaccaccattttataccagtatcatcagtgaagaattgtatttcaagattcaaacaataaccagcaattaaacttttttctacaatgtatttgtttgcgagtag

SEQ ID NO: 290518 - DNA, 1680 bp, Homo sapiens
gggggagctgggagcccgacgtttccgggagcgccgcgtggttagcgtcggcggcttttggcatggcgactttttctggcccggctgggccaatcctgtcgcttaatccgcaggaagatgtcgagtttcaaaaggaggtggcgcaggttcgcaagcgcataacccagcgaaaaaaacaagaacaacttactcctggagtagtctatgtgcgccacctacctaacctacttgacgaaacccagatcttttcatatttctcccagtttggcactgtgacacggttcaggctgtccagaagtaaaaggactggaaatagcaaaggctatgcatttgtggagtttgagtctgaggatgttgccaaaatagttgctgaaacaatgaacaactacctgtttggtgaaagactcttggagtgtcattttatgccacctgaaaaagtacataaagaactctttaaagactggaatattccatttaagcagccatcatatccatcagtgaaacggtataatcggaatcggacactaacacaaaagctacggatggaggagcgatttaaaaagaaagaaagattactcaggaagaaattagctaaaaaaggaattgactatgattttccttctttgattttacagaaaacggaaagtatttcaaaaactaatcgtcagacgtctacaaaaggccaggttttacgtaagaagaagaaaaaagtttcaggtactcttgacactcctgagaagactgtggatagccagggccccacaccagtttgtacaccaacatttttggagaggcgaaaatctcaagtggctgaactgaatgatgatgataaagatgatgaaatagttttcaaacagcccatatcctgtgtaaaagaagaaatacaagagactcaaacacctacacattcacggaaaaaaagacgaagaagcagcaatcagtgattttcaatgtattatatttcttttgaaaaatataatatttttatgagagtggactttgtatttcactaggtacaatggaatacaacctttgacaagattttcagaggaaaaatacactgtttggtcaagttaaggaaagcagtgtgtaattttggattgcctgcccttggctgaaatacaggggtgcataccatcttgcagtggcttggctgacattgcctctttgtcctggcctctagttttcttttgatatttcatagctctccttagtttactctgcctggatagaaagttgaccactaactgcaggtttaagtactaaactgcagccttttctgtcgccagcaattaaagaccaccaatcttgtttgtccatctacatggtttgtcggggacatttaactcatggaggtgctttagatttcaacatcagatggttgaagctggaagtttaattatatgtagagtgagaaggcagttccagttttagcacagatttgtttatgtgttcagattttaatagagattcaaaaatgactcatttttaccaataatgttaaattagttttggttgtgctagcatgaattaataaccaccattttataccagtatcatcagtgaagaattgtatttcaagattcaaacaataaccagcaattaaacttttttctacaatgtatttgtttgcgagtagagcttgagatctccgtcgactggggatacctctaggagtca

SEQ ID NO: 290519 - DNA, 2134 bp, Homo sapiens
gggggagctgggagcccgacgtttccgggagcgccgcgtggttagcgtcggcggcttttggcatggcgactttttctggcccggctgggccaatcctgtcgcttaatccgcaggaagatgtcgagtttcaaaaggaggtggcgcaggttcgcaagcgcataacccagcgaaaaaaacaagaacaacttactcctggagtagtctatgtgcgccacctacctaacctacttgacgaaacccagatcttttcatatttctcccagtttggcactgtgacacggttcaggctgtccagaagtaaaaggactggaaatagcaaaggctatgcatttgtggagtttgagtctgaggatgttgccaaaatagttgctgaaacaatgaacaactacctgtttggtgaaagactcttggagtgtcattttatgccacctgaaaaagtacataaagaactctttaaagactggaatattccatttaagcagccatcatatccatcagtgaaacggtataatcggaatcggacactaacacaaaagctacggatggaggagcgatttaaaaagaaagaaagattactcaggaagaaattagctaaaaaaggaattgactatgattttccttctttgattttacagaaaacggaaagtatttcaaaaactaatcgtcagacgtctacaaaaggccaggtaaaattttttttatcattttacatgcaagatattagagaaggataagtaggaaaacatattcaagactactgtagctgatcaatattcaaattgatgtgttttaaaatttattttaaggttttacgtaagaagaagaaaaaagtttcaggtactcttgacactcctgagaagactgtggatagccaggtaaaatggttttcaatactccagacaccagatattatagaaataatttgaaggaggagaagcagtttctgctactctcattttaagatttcaaattaaatattgtgacatttggtagatctttattgttgatttagcaattttctgcctaaaaccttataatggaacatgctatatttgttaattgtgaatttctgtaccaagtttgataagcatctaagttctttattctttgcaatagtatcaccaaaagatggtaacagagctaaaataatggggcacaacttgtaaaaatagaggagagatgatatttttgggtaaagtcataatcatgttttacatttatgtattataatctttacttgttgaatccagggccccacaccagtttgtacaccaacatttttggagaggcgaaaatctcaagtggctgaactgaatgatgatgataaagatgatgaaatagttttcaaacagcccatatcctgtgtaaaagaagaaatacaagagactcaaacacctacacattcacggaaaaaaagacgaagaagcagcaatcagtgattttcaatgtattatatttcttttgaaaaatataatatttttatgagagtggactttgtatttcactaggtacaatggaatacaacctttgacaagattttcagaggaaaaatacactgtttggtcaagttaaggaaagcagtgtgtaattttggattgcctgcccttggctgaaatacaggggtgcataccatcttgcagtggcttggctgacattgcctctttgtcctggcctctagttttcttttgatatttcatagctctccttagtttactctgcctggatagaaagttgaccactaactgcaggtttaagtactaaactgcagccttttctgtcgccagcaattaaagaccaccaatcttgtttgtccatctacatggtttgtcggggacatttaactcatggaggtgctttagatttcaacatcagatggttgaagctggaagtttaattatatgtagagtgagaaggcagttccagttttagcacagatttgtttatgtgttcagattttaatagagattcaaaaatgactcatttttaccaataatgttaaattagttttggttgtgctagcatgaattaataaccaccattttataccagtatcatcagtgaagaattgtatttcaagattcaaacaataaccagcaattaaacttttttctacaatgtatttgtttgcgagtag

SEQ ID NO: 290520 - DNA, 1288 bp, Homo sapiens
  misc_feature (1239)..(1239): n is a, c, g, or t
gggggagctgggagcccgacgtttccgggagcgccgcgtggttagcgtcggcggcttttggcatggcgactttttctggcccggctgggccaatcctgtcgcttaatccgcaggaagatgtcgagtttcaaaaggaggtggcgcaggttcgcaagcgcataacccagcgaaaaaaacaagaacaacttactcctggagtagtctatgtgcgccacctacctaacctacttgacgaaacccagatcttttcatatttctcccagtttggcactgtgacacggttcaggctgtccagaagtaaaaggactggaaatagcaaaggctatgcatttgtggagtttgagtctgaggatgttgccaaaatagttgctgaaacaatgaacaactacctgtttggtgaaagactcttggagtgtcattttatgccacctgaaaaagtacataaagaactctttaaagactggaatattccatttaagcagccatcatatccatcagtgaaacggtataatcggaatcggacactaacacaaaagctacggatggaggagcgatttaaaaagaaagaaagattactcaggaagaaattagctaaaaaaggaattgactatgattttccttctttgattttacagaaaacggaaagtatttcaaaaactaatcgtcagacgtctacaaaaggccaggttttacgtaagaagaagaaaaaagtttcaggtactcttgacactcctgagaagactgtggatagccaggtaaaatggttttcaatactccagacaccagatattatagaaataatttgaaggaggagaagcagtttctgctactctcattttaagatttcaaattaaatattgtgacatttggtagatctttattgttgatttagcaattttctgcctaaaaccttataatggaacatgctatatttgttaattgtgaatttctgtaccaagtttgataagcatctaagttctttattctttgcaatagtatcaccaaaagatggtaacagagctaaaataatggggcacaacttgtaaaaatagaggagagatgatatttttgggtaaagtcataatcatgttttacatttatgtattataatctttacttgttgaatccagggccccacaccagtttgtacaccaacatttttggagaggcgaaaatctcaagtggctgaactgaatgatgatgataaagatgatgaaatagttttcaaacagcgtatanctcagtttttttttttgctcttattctggcacaatactatatactagcg

SEQ ID NO: 290521 - DNA, 1111 bp, Homo sapiens
gggggagctgggagcccgacgtttccgggagcgccgcgtggttagcgtcggcggcttttggcatggcgactttttctggcccggctgggccaatcctgtcgcttaatccgcaggaagatgtcgagtttcaaaaggaggtggcgcaggttcgcaagcgcataacccagcgaaaaaaacaagaacaacttactcctggagtagtctatgtgcgccacctacctaacctacttgacgaaacccagatcttttcatatttctcccagtttggcactgtgacacggttcaggctgtccagaagtaaaaggactggaaatagcaaaggctatgcatttgtggagtttgagtctgaggatgttgccaaaatagttgctgaaacaatgaacaactacctgtttggtgaaagactcttggagtgtcattttatgccacctgaaaaagtacataaagaactctttaaagactggaatattccatttaagcagccatcatatccatcagtgaaacggtataatcggaatcggacactaacacaaaagctacggatggaggagcgatttaaaaagaaagaaagattactcaggaagaaattagctaaaaaaggaattgactatgattttccttctttgattttacagaaaacggaaagtatttcaaaaactaatcgtcagacgtctacaaaaggccaggtaaaattttttttatcattttacatgcaagatattagagaaggataagtaggaaaacatattcaagactactgtagctgatcaatattcaaattgatgtgttttaaaatttattttaaggttttacgtaagaagaagaaaaaagtttcaggtactcttgacactcctgagaagactgtggatagccagggccccacaccagtttgtacaccaacatttttggagaggcgaaaatctcaagtggctgaactgaatgatgatgataaagatgatgaaatagttttcaaacagcccatatcctgtgtaaaagaagaaatacaagagactcaaacacctacacattcacggaaaaaaagacgaagaagcagcaatcagtgattttcaatgtattatatttcttttgaaaaatataatatttttatgag

SEQ ID NO: 290522 - DNA, 3892 bp, Homo sapiens
ccgcgggcggggccggctggcgttcacgtgacccggcgtcattggctcgctcgcggaagtagtcctacattcgcggtcagcgcggggtctccgggcgccctgcagggcgggcaggctgtgccatcccgccggacgtcgggatggtgcagctgtacaacctgcacccgttcgggtcgcagcaggtggtgccctgcaagctggagccggaccggttctgtggcggggggcgtgacgcgcttttcgtggcggcgggctgcaaggtggaggcgttcgcggtggccggccaggagctgtgccagccgcggtgcgccttctccacgctgggccgggtgttgcgcctggcctacagcgaggctggagattatttggtagcaattgaagagaaaaacaaagctacatttctacgtgcttatgtgaactggagaaataaaaggactgaaaactctcgtgtgtgtatccgaatgattgggcataatgtggagggaccattcagcaaagccttcagagaccagatgtacattattgaaatgccgctttcggaggcccccttgtgcatttcctgttgccctgtgaaaggagaccttctcgttggctgcacaaataaattagtcttatttagtttgaagtaccagatcattaatgaggaattctcactattggactttgaacgttctttaattatacacatagataatatcactcctgttgaggtttctttttgtgttggatatgttgctgtcatgtcagacttagaagtcttaatcgtaaaactggagtcaggccctaaaaatggagagagagttcaccaccatccacataagaccaacaatcgaataagacggacagaagaaggcatcagtaatgaaatttcacagcttgagtcagatgattttgtcatctgccagaagcccctggaacttcttggtgaaaaaagtgaacagtctggattatctgttacactggagtctacgggattagctgatgaaaaaagaaaatattcccactttcagcacctgctctatagacgttttgctcctgatatttcgtcctatgtcttgtctgatgacatcaagctacattccctccagctgctacccatttaccagaccggttctcttacatctgatggaaaaaatttgtctcaggaaaaagaattgctgagtctcttttgctttttctccttacctcatgtgggctatctctacatggttgtcaaatctgttgaattgatgtcagtctaccagtatcctgaaaagtctcagcaggcagtactcacgccacaatttttgcacgtcattacaagtaacaacctgcagtgtttcactgtgcggtgcagtgcggcggcagctcgtgaggaggacccgtacatggacaccaccctgaaggcttgcccacctgtcagtatggatgtctgtgctttaagaatacagcttttcataggcttgaaagccatctgtcactttaaaaaccacatcatacttttgactaaagcagaacctgaagccattccagagagaagacagtcacccaagaggcttctttcgagaaaagataccagtgttaaaatcaaaatacctcctgtagctgaggctgggtggaatttgtatattgtgaatacgatctcaccagtgcagctgtacaaagagatggtagactatagcaatacctataagactgtcaaaacccagagctgcattcaccttctcagtgaggctcatctgttagtgcgagctgccctgatggatgccagtcagctggaacctggagagaaggcagagcttttggaagcatttaaggaaagctgtgggcaccttggggactgttacagcaggcttgactcccagcattctcatctcaccttgccatactataagatgtctggtttgtctatggctgaagttctggcccgcacggactggacagtagaggatggattacagaaatacgagagaggattaatcttttacattaatcattcactttatgaaaacctggatgaagaattaaatgaagaattagcagcaaaagtggttcagatgttttatgtggctgagccaaagcaagtgccccatattctctgtagtccttctatgaagaatattaatcctttaactgccatgagctatctaaggaagctggatacttctgggttttcatcgatcttagtgacattgaccaaggcagcagtggctctgaaaatgggagatcttgacatgcacagaaatgaaatgaaaagccattcagagatgaagttggtatgtggcttcattctggaacctcggctgttgattcaacagagaaagggacagattgttccaaccgagcttgcacttcacttgaaggaaactcagcctggattgcttgtggcttcagttctgggcttgcagaagaacaacaaaattggaattgaagaagcagattccttttttaaggtgctttgtgctaaggatgaagatacaattcctcagctcttggtagacttttgggaagctcagctagtggcatgtctcccagatgtggtacttcaggaactctttttcaaactcacatcacagtacatctggagattgtctaagaggcagcctcctgacaccacaccattgcgaacatcggaggatctgataaatgcctgtagtcattatggcttaatttatccatgggttcacgtcgtaatatcatctgattctttagctgataaaaattatacagaagatctttcaaaattacagtctcttatatgtggtccttcatttgacatagcttccattattccgttcttggagccactttcagaagacactattgccggcctcagtgtccatgttctgtgtcgtacacgcttgaaagagtatgaacagtgcatagacatactgttagagagatgcccggaggcagtcattccatatgctaatcatgaactgaaagaagagaaccggactctgtggtggaaaaaactgttgcctgaactttgtcagagaataaaatgtggtggagagaagtatcaactctacctgtcatcattaaaagaaacattgtcaattgttgctgtggaactagaactgaaggatttcatgaatgttctcccagaagatggtactgcaacatttttcttgccatatcttctctattgcagtcgaaagaaaccattgacttaaaggtatcatttgaaaaataccataatggcatttgagactgaatttctaaaaattgaatgccaaagtacaagtagaggagttttttattttatatatcacacacacacacacacacacacacacacacacacacatatatgatacaaatgctttcaggctgcttaccttaccgtgtagtggtaactattcacttcttaatttatgacctcaatcaatttaattgtctagaatgtaaaaagtctttaagacataagaattcctcaaagaagccatacattttttaaggtggggattgacttttattccaaggaacaacatcagttcactgttgttggagacatgacaatcattttcatcccaagaacactttaaggaaacattttacaagtatgcttgaaagaatgtcactaactggtccagaattttatcttcttgatttttccagatttctctatgtttttgagaaagatgttaatgttttgccatggtaaaagatttcaaacctcattttttttgttccttttcttgttacttttaagaaaactcatgctctgtttctctgaatcaaatgaagtagaagtttacaaagctaactttcttcttgtctagctattaacatgatttgtcaaatgcatgtttttttcagccaaagccttgtttccatttttgttgatgtgtactcttgctcttttagctagagtgtatgtgaaaataaagaaatacatcattgtattcac

SEQ ID NO: 290523 - DNA, 988 bp, Homo sapiens
ccgcgggcggggccggctggcgttcacgtgacccggcgtcattggctcgctcgcggaagtagtcctacattcgcggtcagcgcggggtctccgggcgccctgcagggcgggcaggctgtgccatcccgccggacgtcgggatggtgcagctgtacaacctgcacccgttcgggtcgcagcaggtggtgccctgcaagctggagccggaccggttctgtggcggggggcgtgacgcgcttttcgtggcggcgggctgcaaggtggaggcgttcgcggtggccggccaggagctgtgccagccgcggtgcgccttctccacgctgggccgggtgttgcgcctggcctacagcgaggctggcatcagtaatgaaatttcacagcttgagtcagatgattttgtcatctgccagaagcccctggaacttcttggtgaaaaaagtgaacagtctggattatctgttacactggagtctacgggattagctgatgaaaaaagaaaatattcccactttcagcacctgctctatagacgttttgctcctgatatttcgtcctatgtcttgtctgatgacatcaagctacattccctccagctgctacccatttaccagaccggttctcttacatctgatggaaaaaatttgtctcaggaaaaagaattgctgagtctcttttgctttttctccttacctcatgtgggctatctctacatggttgtcaaatctgttgaattgatgtcagtctaccagtatcctgaaaagtctcagcaggcagtactcacgccacaatttttgcacgtcattacaagtaacaacctgccgggtgtcccgtgcgcgcacagtcggcgggaccccttgagcggaactcgctcttgttgccccctgtagggtttcccccgctgcctgcgggtctgcgccacaaaacacgtttctacgcttatacccctttgcgtttataacccttactttgcgtcagccacgttagacct

SEQ ID NO: 290524 - DNA, 3964 bp, Homo sapiens
ccgcgggcggggccggctggcgttcacgtgacccggcgtcattggctcgctcgcggaagtagtcctacattcgcggtcagcgcggggtctccgggcgccctgcagggcgggcaggctgtgccatcccgccggacgtcgggatggtgcagctgtacaacctgcacccgttcgggtcgcagcaggtggtgccctgcaagctggagccggaccggttctgtggcggggggcgtgacgcgcttttcgtggcggcgggctgcaaggtggaggcgttcgcggtggccggccaggagctgtgccagccgcggtgcgccttctccacgctgggccgggtgttgcgcctggcctacagcgaggctggagattatttggtagcaattgaagagaaaaacaaagctacatttctacgtgcttatgtgaactggagaaataaaaggactgaaaactctcgtgtgtgtatccgaatgattgggcataatgtggagggaccattcagcaaagccttcagagaccagatgtacattattgaaatgccgctttcggaggcccccttgtgcatttcctgttgccctgtgaaaggagaccttctcgttggctgcacaaataaattagtcttatttagtttgaagtaccagatcattaatgaggaattctcactattggactttgaacgttctttaattatacacatagataatatcactcctgttgaggtttctttttgtgttggatatgttgctgtcatgtcagacttagaagtcttaatcgtaaaactggagtcaggccctaaaaatggagagagagttcaccaccatccacataagaccaacaatcgaataagacggacagaagaaggcatcagtaatgaaatttcacagcttgagtcagatgattttgtcatctgccagaagcccctggaacttcttggtgaaaaaagtgaacagtctggattatctgttacactggagtctacgggattagctgatgaaaaaagaaaatattcccactttcagcacctgctctatagacgttttgctcctgatatttcgtcctatgtcttgtctgatgacatcaagctacattccctccagctgctacccatttaccagaccggttctcttacatctgatggaaaaaatttgtctcaggaaaaagaattgctgagtctcttttgctttttctccttacctcatgtgggctatctctacatggttgtcaaatctgttgaattgatgtcagtctaccagtatcctgaaaagtctcagcaggcagtactcacgccacaatttttgcacgtcattacaagtaacaacctgcagtgtttcactgtgcggtgcagtgcggcggcagctcgtgaggaggacccgtacatggacaccaccctgaaggcttgcccacctgtcagtatggatgtctgtgctttaagaatacagcttttcataggcttgaaagccatctgtcactttaaaaaccacatcatacttttgactaaagcagaacctgaagccattccagagagaagacagtcacccaagaggcttctttcgagaaaagataccagtgttaaaatcaaaatacctcctgtagctgaggctgggtggaatttgtatattgtgaatacgatctcaccagtgcagctgtacaaagagatggtagactatagcaatacctataagactgtcaaaacccagagctgcattcaccttctcagtgaggctcatctgttagtgcgagctgccctgatggatgccagtcagctggaacctggagagaaggcagagcttttggaagcatttaaggaaagctgtgggcaccttggggactgttacagcaggcttgactcccagcattctcatctcaccttgccatactataagatgtctggtttgtctatggctgaagttctggcccgcacggactggacagtagaggatggattacagaaatacgagagaggattaatcttttacattaatcattcactttatgaaaacctggatgaagaattaaatgaagaattagcagcaaaagtggttcagatgttttatgtggctgagccaaagcaagtgccccatattctctgtagtccttctatgaagaatattaatcctttaactgccatgagctatctaaggaagctggatacttctgggttttcatcgatcttagtgacattgaccaaggcagcagtggctctgaaaatgggagatcttgacatgcacagaaatgaaatgaaaagccattcagagatgaagttggtatgtggcttcattctggaacctcggctgttgattcaacagagaaagggacagattgttccaaccgagcttgcacttcacttgaaggaaactcagcctggattgcttgtggcttcagttctgggcttgcagaagaacaacaaaattggaattgaagaagcagattccttttttaaggtgctttgtgctaaggatgaagatacaattcctcagctcttggtagacttttgggaagctcagctagtggcatgtctcccagatgtggtacttcaggaactctttttcaaactcacatcacagtacatctggagattgtctaagaggcagcctcctgacaccacaccattgcgaacatcggaggatctgataaatgcctgtagtcattatggcttaatttatccatgggttcacgtcgtaatatcatctgattctttagctgataaaaattatacagaagatctttcaaaattacagcttccattattccgttcttggagccactttcagaagacactattgccggcctcagtgtccatgttctgtgtcgtacacgcttgaaagagtatgaacagtgcatagacatactgttagagagatgcccggaggcagtcattccatatgctaatcatgaactgaaagaagagaaccggactctgtggtggaaaaaactgttgcctgaactttgtcagagaataaaatgtggtggagagaagtatcaactctacctgtcatcattaaaagcttaattttcacgggaactgtggaagctagcagacagtaccactacattataaatgaggaacctaggacttggaagattaagtgactttcttaaagccactcgaaacattgtcaattgttgctgtggaactagaactgaaggatttcatgaatgttctcccagaagatggtactgcaacatttttcttgccatatcttctctattgcagtcgaaagaaaccattgacttaaaggtatcatttgaaaaataccataatggcatttgagactgaatttctaaaaattgaatgccaaagtacaagtagaggagttttttattttatatatcacacacacacacacacacacacacacacacacacacatatatgatacaaatgctttcaggctgcttaccttaccgtgtagtggtaactattcacttcttaatttatgacctcaatcaatttaattgtctagaatgtaaaaagtctttaagacataagaattcctcaaagaagccatacattttttaaggtggggattgacttttattccaaggaacaacatcagttcactgttgttggagacatgacaatcattttcatcccaagaacactttaaggaaacattttacaagtatgcttgaaagaatgtcactaactggtccagaattttatcttcttgatttttccagatttctctatgtttttgagaaagatgttaatgttttgccatggtaaaagatttcaaacctcattttttttgttccttttcttgttacttttaagaaaactcatgctctgtttctctgaatcaaatgaagtagaagtttacaaagctaactttcttcttgtctagctattaacatgatttgtcaaatgcatgtttttttcagccaaagccttgtttccatttttgttgatgtgtactcttgctcttttagctagagtgtatgtgaaaataaagaaatacatcattgtattcac

SEQ ID NO: 290525 - DNA, 3361 bp, Homo sapiens
ccgcgggcggggccggctggcgttcacgtgacccggcgtcattggctcgctcgcggaagtagtcctacattcgcggtcagcgcggggtctccgggcgccctgcagggcgggcaggctgtgccatcccgccggacgtcgggatggtgcagctgtacaacctgcacccgttcgggtcgcagcaggtggtgccctgcaagctggagccggaccggttctgtggcggggggcgtgacgcgcttttcgtggcggcgggctgcaaggtggaggcgttcgcggtggccggccaggagctgtgccagccgcggtgcgccttctccacgctgggccgggtgttgcgcctggcctacagcgaggctggcatcagtaatgaaatttcacagcttgagtcagatgattttgtcatctgccagaagcccctggaacttcttggtgaaaaaagtgaacagtctggattatctgttacactggagttacattccctccagctgctacccatttaccagaccggttctcttacatctgatggaaaaaatttgtctcaggaaaaagaattgctgagtctcttttgctttttctccttacctcatgtgggctatctctacatggttgtcaaatctgttgaattgatgtcagtctaccagtatcctgaaaagtctcagcaggcagtactcacgccacaatttttgcacgtcattacaagtaacaacctgcagtgtttcactgtgcggtgcagtgcggcggcagctcgtgaggaggacccgtacatggacaccaccctgaaggcttgcccacctgtcagtatggatgtctgtgctttaagaatacagcttttcataggcttgaaagccatctgtcactttaaaaaccacatcatacttttgactaaagcagaacctgaagccattccagagagaagacagtcacccaagaggcttctttcgagaaaagataccagtgttaaaatcaaaatacctcctgtagctgaggctgggtggaatttgtatattgtgaatacgatctcaccagtgcagctgtacaaagagatggtagactatagcaatacctataagactgtcaaaacccagagctgcattcaccttctcagtgaggctcatctgttagtgcgagctgccctgatggatgccagtcagctggaacctggagagaaggcagagcttttggaagcatttaaggaaagctgtgggcaccttggggactgttacagcaggcttgactcccagcattctcatctcaccttgccatactataagatgtctggtttgtctatggctgaagttctggcccgcacggactggacagtagaggatggattacagaaatacgagagaggattaatcttttacattaatcattcactttatgaaaacctggatgaagaattaaatgaagaattagcagcaaaagtggttcagatgttttatgtggctgagccaaagcaagtgccccatattctctgtagtccttctatgaagaatattaatcctttaactgccatgagctatctaaggaagctggatacttctgggttttcatcgatcttagtgacattgaccaaggcagcagtggctctgaaaatgggagatcttgacatgcacagaaatgaaatgaaaagccattcagagatgaagttggtatgtggcttcattctggaacctcggctgttgattcaacagagaaagggacagattgttccaaccgagcttgcacttcacttgaaggaaactcagcctggattgcttgtggcttcagttctgggcttgcagaagaacaacaaaattggaattgaagaagcagattccttttttaaggtgctttgtgctaaggatgaagatacaattcctcagctcttggtagacttttgggaagctcagctagtggcatgtctcccagatgtggtacttcaggaactctttttcaaactcacatcacagtacatctggagattgtctaagaggcagcctcctgacaccacaccattgcgaacatcggaggatctgataaatgcctgtagtcattatggcttaatttatccatgggttcacgtcgtaatatcatctgattctttagctgataaaaattatacagaagatctttcaaaattacagcttccattattccgttcttggagccactttcagaagacactattgccggcctcagtgtccatgttctgtgtcgtacacgcttgaaagagtatgaacagtgcatagacatactgttagagagatgcccggaggcagtcattccatatgctaatcatgaactgaaagaagagaaccggactctgtggtggaaaaaactgttgcctgaactttgtcagagaataaaatgtggtggagagaagtatcaactctacctgtcatcattaaaagcttaattttcacgggaactgtggaagctagcagacagtaccactacattataaatgaggaacctaggacttggaagattaagtgactttcttaaagccactcgaaacattgtcaattgttgctgtggaactagaactgaaggatttcatgaatgttctcccagaagatggtactgcaacatttttcttgccatatcttctctattgcagtcgaaagaaaccattgacttaaaggtatcatttgaaaaataccataatggcatttgagactgaatttctaaaaattgaatgccaaagtacaagtagaggagttttttattttatatatcacacacacacacacacacacacacacacacacacacatatatgatacaaatgctttcaggctgcttaccttaccgtgtagtggtaactattcacttcttaatttatgacctcaatcaatttaattgtctagaatgtaaaaagtctttaagacataagaattcctcaaagaagccatacattttttaaggtggggattgacttttattccaaggaacaacatcagttcactgttgttggagacatgacaatcattttcatcccaagaacactttaaggaaacattttacaagtatgcttgaaagaatgtcactaactggtccagaattttatcttcttgatttttccagatttctctatgtttttgagaaagatgttaatgttttgccatggtaaaagatttcaaacctcattttttttgttccttttcttgttacttttaagaaaactcatgctctgtttctctgaatcaaatgaagtagaagtttacaaagctaactttcttcttgtctagctattaacatgatttgtcaaatgcatgtttttttcagccaaagccttgtttccatttttgttgatgtgtactcttgctcttttagctagagtgtatgtgaaaataaagaaatacatcattgtattcac

SEQ ID NO: 290526 - DNA, 2149 bp, Homo sapiens
cgaagtattggatatcgtcgaccacgcgctccgctcatctcaccttgccatactataagatgtctggtttgtctatggctgaagttctggcccgcacggactggacagtagaggatggattacagaaatacgagagaggattaatcttttacattaatcattcactttatgaaaacctggatgaagaattaaatgaagaattagcagcaaaagtggttcagatgttttatgtggctgagccaaagcaagtgccccatattctctgtagtccttctatgaagaatattaatcctttaactgccatgagctatctaaggaagctggatacttctgggttttcatcgatcttagtgacattgaccaaggcagcagtggctctgaaaatgggagatcttgacatgcacagaaatgaaatgaaaagccattcagagatgaagttggtatgtggcttcattctggaacctcggctgttgattcaacagagaaagggacagattgttccaaccgagcttgcacttcacttgaaggaaactcagcctggattgcttgtggcttcagttctgggcttgcagaagaacaacaaaattggaattgaagaagcagattccttttttaaggtgctttgtgctaaggatgaagatacaattcctcagctcttggtagacttttgggaagctcagctagtggcatgtctcccagatgtggtacttcaggaactctttttcaaactcacatcacagtacatctggagattgtctaagaggcagcctcctgacaccacaccattgcgaacatcggaggatctgataaatgcctgtagtcattatggcttaatttatccatgggttcacgtcgtaatatcatctgattctttagctgataaaaattatacagaagatctttcaaaattacagcttccattattccgttcttggagccactttcagaagacactattgccggcctcagtgtccatgttctgtgtcgtacacgcttgaaagagtatgaacagtgcatagacatactgttagagagatgcccggaggcagtcattccatatgctaatcatgaactgaaagaagagaaccggactctgtggtggaaaaaactgttgcctgaactttgtcagagaataaaatgtggtggagagaagtatcaactctacctgtcatcattaaaagcttaattttcacgggaactgtggaagctagcagacagtaccactacattataaatgaggaacctaggacttggaagattaagtgactttcttaaagccactcgaaacattgtcaattgttgctgtggaactagaactgaaggatttcatgaatgttctcccagaagatggtactgcaacatttttcttgccatatcttctctattgcagtcgaaagaaaccattgacttaaaggtatcatttgaaaaataccataatggcatttgagactgaatttctaaaaattgaatgccaaagtacaagtagaggagttttttattttatatatcacacacacacacacacacacacacacacacacacacatatatgatacaaatgctttcaggctgcttaccttaccgtgtagtggtaactattcacttcttaatttatgacctcaatcaatttaattgtctagaatgtaaaaagtctttaagacataagaattcctcaaagaagccatacattttttaaggtggggattgacttttattccaaggaacaacatcagttcactgttgttggagacatgacaatcattttcatcccaagaacactttaaggaaacattttacaagtatgcttgaaagaatgtcactaactggtccagaattttatcttcttgatttttccagatttctctatgtttttgagaaagatgttaatgttttgccatggtaaaagatttcaaacctcattttttttgttccttttcttgttacttttaagaaaactcatgctctgtttctctgaatcaaatgaagtagaagtttacaaagctaactttcttcttgtctagctattaacatgatttgtcaaatgcatgtttttttcagccaaagccttgtttccatttttgttgatgtgtactcttgctcttttagctagagtgtatgtgaaaataaagaaatacatcattgtattcac

SEQ ID NO: 290527 - DNA, 3522 bp, Homo sapiens
  misc_feature (3437)..(3437): n is a, c, g, or t
ccgcgggcggggccggctggcgttcacgtgacccggcgtcattggctcgctcgcggaagtagtcctacattcgcggtcagcgcggggtctccgggcgccctgcagggcgggcaggctgtgccatcccgccggacgtcgggatggtgcagctgtacaacctgcacccgttcgggtcgcagcaggtggtgccctgcaagctggagccggaccggttctgtggcggggggcgtgacgcgcttttcgtggcggcgggctgcaaggtggaggcgttcgcggtggccggccaggagctgtgccagccgcggtgcgccttctccacgctgggccgggtgttgcgcctggcctacagcgaggctggagattatttggtagcaattgaagagaaaaacaaagctacatttctacgtgcttatgtgaactggagaaataaaaggactgaaaactctcgtgtgtgtatccgaatgattgggcataatgtggagggaccattcagcaaagccttcagagaccagatgtacattattgaaatgccgctttcggaggcccccttgtgcatttcctgttgccctgtgaaaggagaccttctcgttggctgcacaaataaattagtcttatttagtttgaagtaccagatcattaatgaggaattctcactattggactttgaacgttctttaattatacacatagataatatcactcctgttgaggtttctttttgtgttggatatgttgctgtcatgtcagacttagaagtcttaatcgtaaaactggagtcaggccctaaaaatggagagagagttcaccaccatccacataagaccaacaatcgaataagacggacagaagaaggcatcagtaatgaaatttcacagcttgagtcagatgattttgtcatctgccagaagcccctggaacttcttggtgaaaaaagtgaacagtctggattatctgttacactggagtctacgggattagctgatgaaaaaagaaaatattcccactttcagcacctgctctatagacgttttgctcctgatatttcgtcctatgtcttgtctgatgacatcaagctacattccctccagctgctacccatttaccagaccggttctcttacatctgatggaaaaaatttgtctcaggaaaaagaattgctgagtctcttttgctttttctccttacctcatgtgggctatctctacatggttgtcaaatctgttgaattgatgtcagtctaccagtatcctgaaaagtctcagcaggcagtactcacgccacaatttttgcacgtcattacaagtaacaacctgcagtgtttcactgtgcggtgcagtgcggcggcagctcgtgaggaggacccgtacatggacaccaccctgaaggcttgcccacctgtcagtatggatgtctgtgctttaagaatacagcttttcataggcttgaaagccatctgtcactttaaaaaccacatcatacttttgactaaagcagaacctgaagccattccagagagaagacagtcacccaagaggcttctttcgagaaaagataccagtgttaaaatcaaaatacctcctgtagctgaggctgggtggaatttgtatattgtgaatacgatctcaccagtgcagctgtacaaagagatggtagactatagcaatacctataagactgtcaaaacccagagctgcattcaccttctcagtgaggctcatctgttagtgcgagctgccctgatggatgccagtcagctggaacctggagagaaggcagagcttttggaagcatttaaggaaagctgtgggcaccttggggactgttacagcaggcttgactcccagcattctcatctcaccttgccatactataagatgtctggtttgtctatggctgaagttctggcccgcacggactggacagtagaggatggattacagaaatacgagagaggattaatcttttacattaatcattcactttatgaaaacctggatgaagaattaaatgaagaattagcagcaaaagtggttcagatgttttatgtggctgagccaaagcaagtgccccatattctctgtagtccttctatgaagaatattaatcctttaactgccatgagctatctaaggaagctggatacttctgggttttcatcgatcttagtgacattgaccaaggcagcagtggctctgaaaatgggagatcttgacatgcacagaaatgaaatgaaaagccattcagagatgaagttggtatgtggcttcattctggaacctcggctgttgattcaacagagaaagggacagattgttccaaccgagcttgcacttcacttgaaggaaactcagcctggattgcttgtggcttcagttctgggcttgcagaagaacaacaaaattggaattgaagaagcagattccttttttaaggtgctttgtgctaaggatgaagatacaattcctcagctcttggtagacttttgggaagctcagctagtggcatgtctcccagatgtggtacttcaggaactctttttcaaactcacatcacagtacatctggagattgtctaagaggcagcctcctgacaccacaccattgcgaacatcggaggatctgataaatgcctgtagtcattatggcttaatttatccatgggttcacgtcgtaatatcatctgattctttagctgataaaaattatacagaagatctttcaaaattacagtctcttatatgtggtccttcatttgacatagcttccattattccgttcttggagccactttcagaagacactattgccggcctcagtgtccatgttctgtgtcgtacacgcttgaaagagtatgaacagtgcatagacatactgttagagagatgcccggaggcagtcattccatatgctaatcatgaactgaaagaagagaaccggactctgtggtggaaaaaactgttgcctgaactttgtcagagaataaaatgtggtggagagaagtatcaactctacctgtcatcattaaaagaaacattgtcaattgttgctgtggaactagaactgaaggatttcatgaatgttctcccagaagatggtactgcaacatttttcttgccatatcttctctattgcagtcgaaagaaaccattgacttaaaggtatcatttgaaaaataccataatggcatttgagactgaatttctaaaaattgaatgccaaagtacaagtagaggagttttttattttatatatcacacacacacacacacacacacacacacacacacacatatatgatacaaatgctttcaggctgcttaccttaccgtgtagtggtaactattcacttcttaatttatgacctcaatcaatttaattgtctagaatgtaaaaagtctttaagacataagaattcctcaaagaagccatacattttangggggagcgcctttattccgggaacacctcggtcctggggggggacatgacaccttttctccagacctggggacttcacgttggg

SEQ ID NO: 290528 - DNA, 3370 bp, Homo sapiens
ccgcgggcggggccggctggcgttcacgtgacccggcgtcattggctcgctcgcggaagtagtcctacattcgcggtcagcgcggggtctccgggcgccctgcagggcgggcaggctgtgccatcccgccggacgtcgggatggtgcagctgtacaacctgcacccgttcgggtcgcagcaggtggtgccctgcaagctggagccggaccggttctgtggcggggggcgtgacgcgcttttcgtggcggcgggctgcaaggtggaggcgttcgcggtggccggccaggagctgtgccagccgcggtgcgccttctccacgctgggccgggtgttgcgcctggcctacagcgaggctggagattatttggtagcaattgaagagaaaaacaaagctacatttctacgtgcttatgtgaactggagaaataaaaggactgaaaactctcgtgtgtgtatccgaatgattgggcataatgtggagggaccattcagcaaagccttcagagaccagatgtacattattgaaatgccgctttcggaggcccccttgtgcatttcctgttgccctgtgaaaggagaccttctcgttggctgcacaaataaattagtcttatttagtttgaagtaccagatcattaatgaggaattctcactattggactttgaacgttctttaattatacacatagataatatcactcctgttgaggtttctttttgtgttggatatgttgctgtcatgtcagacttagaagtcttaatcgtaaaactggagtcaggccctaaaaatggagagagagttcaccaccatccacataagaccaacaatcgaataagacggacagaagaaggcatcagtaatgaaatttcacagcttgagtcagatgattttgtcatctgccagaagcccctggaacttcttggtgaaaaaagtgaacagtctggattatctgttacactggagtctacgggattagctgatgaaaaaagaaaatattcccactttcagcacctgctctatagacgttttgctcctgatatttcgtcctatgtcttgtctgatgacatcaagctacattccctccagctgctacccatttaccagaccggttctcttacatctgatggaaaaaatttgtctcaggaaaaagaattgctgagtctcttttgctttttctccttacctcatgtgggctatctctacatggttgtcaaatctgttgaattgatgtcagtctaccagtatcctgaaaagtctcagcaggcagtactcacgccacaatttttgcacgtcattacaagtaacaacctgcagtgtttcactgtgcggtgcagtgcggcggcagctcgtgaggaggacccgtacatggacaccaccctgaaggcttgcccacctgtcagtatggatgtctgtgctttaagaatacagcttttcataggcttgaaagccatctgtcactttaaaaaccacatcatacttttgactaaagcagaacctgaagccattccagagagaagacagtcacccaagaggcttctttcgagaaaagataccagtgttaaaatcaaaatacctcctgtagctgaggctgggtggaatttgtatattgtgaatacgatctcaccagtgcagctgtacaaagagatggtagactatagcaatacctataagactgtcaaaacccagagctgcattcaccttctcagtgaggctcatctgttagtgcgagctgccctgatggatgccagtcagctggaacctggagagaaggcagagcttttggaagcatttaaggaaagctgtgggcaccttggggactgttacagcaggcttgactcccagcattctcatctcaccttgccatactataagatgtctggtttgtctatggctgaagttctggcccgcacggactggacagtagaggatggattacagaaatacgagagaggattaatcttttacattaatcattcactttatgaaaacctggatgaagaattaaatgaagaattagcagcaaaagtggttcagatgttttatgtggctgagccaaagcaagtgccccatattctctgtagtccttctatgaagaatattaatcctttaactgccatgagctatctaaggaagctggatacttctgggttttcatcgatcttagtgacattgaccaaggcagcagtggctctgaaaatgggagatcttgacatgcacagaaatgaaatgaaaagccattcagagatgaagttggtatgtggcttcattctggaacctcggctgttgattcaacagagaaagggacagattgttccaaccgagcttgcacttcacttgaaggaaactcagcctggattgcttgtggcttcagttctgggcttgcagaagaacaacaaaattggaattgaagaagcagattccttttttaaggtgctttgtgctaaggatgaagatacaattcctcagctcttggtagacttttgggaagctcagctagtggcatgtctcccagatgtggtacttcaggaactctttttcaaactcacatcacagtacatctggagattgtctaagaggcagcctcctgacaccacaccattgcgaacatcggaggatctgataaatgcctgtagtcattatggcttaatttatccatgggttcacgtcgtaatatcatctgattctttagctgataaaaattatacagaagatctttcaaaattacagtctcttatatgtggtccttcatttgacatagcttccattattccgttcttggagccactttcagaagacactattgccggcctcagtgtccatgttctgtgtcgtacacgcttgaaagagtatgaacagtgcatagacatactgttagagagatgcccggaggcagtcattccatatgctaatcatgaactgaaagaagagaaccggactctgtggtggaaaaaactgttgcctgaactttgtcagagaataaaatgtggtggagagaagtatcaactctacctgtcatcattaaaagaaacattgtcaattgttgctgtggaactagaactgaaggatttcaccacatctatacagttcattccatcgtcaacatctaaaacaatgctgaaacagagcaagctttccagtcttactttacgagcaaaatcaagatctacatactacaactttcacttacgtttctccatctaacccatcctctctttcaataactgtaactgttggattgaagaactgcatcttggaatacattgccctgtcttaagataataactactaactcagtatatcaccatgcaataaaggacagtccaacatccgactatcactcaggacagttactctaccaagacttcata

SEQ ID NO: 290529 - DNA, 2031 bp, Homo sapiens
ccgcgggcggggccggctggcgttcacgtgacccggcgtcattggctcgctcgcggaagtagtcctacattcgcggtcagcgcggggtctccgggcgccctgcagggcgggcaggctgtgccatcccgccggacgtcgggatggtgcagctgtacaacctgcacccgttcgggtcgcagcaggtggtgccctgcaagctggagccggaccggttctgtggcggggggcgtgacgcgcttttcgtggcggcgggctgcaaggtggaggcgttcgcggtggccggccaggagctgtgccagccgcggtgcgccttctccacgctgggccgggtgttgcgcctggcctacagcgaggctggagattatttggtagcaattgaagagaaaaacaaagctacatttctacgtgcttatgtgaactggagaaataaaaggactgaaaactctcgtgtgtgtatccgaatgattgggcataatgtggagggaccattcagcaaagccttcagagaccagatgtacattattgaaatgccgctttcggaggcccccttgtgcatttcctgttgccctgtgaaaggagaccttctcgttggctgcacaaataaattagtcttatttagtttgaagtaccagatcattaatgaggaattctcactattggactttgaacgttctttaattatacacatagataatatcactcctgttgaggtttctttttgtgttggatatgttgctgtcatgtcagacttagaagtcttaatcgtaaaactggagtcaggccctaaaaatggagagagagttcaccaccatccacataagaccaacaatcgaataagacggacagaagaaggcatcagtaatgaaatttcacagcttgagtcagatgattttgtcatctgccagaagcccctggaacttcttggtgaaaaaagtgaacagtctggattatctgttacactggagtctacgggattagctgatgaaaaaagaaaatattcccactttcagcacctgctctatagacgttttgctcctgatatttcgtcctatgtcttgtctgatgacatcaagctacattccctccagctgctacccatttaccagaccggttctcttacatctgatggaaaaaatttgtctcaggaaaaagaattgctgagtctcttttgctttttctccttacctcatgtgggctatctctacatggttgtcaaatctgttgaattgatgtcagtctaccagtatcctgaaaagtctcagcaggcagtactcacgccacaatttttgcacgtcattacaagtaacaacctgcagtgtttcactgtgcggtgcagtgcggcggcagctcgtgaggaggacccgtacatggacaccaccctgaaggcttgcccacctgtcagtatggatgtctgtgctttaagaatacagcttttcataggcttgaaagccatctgtcactttaaaaaccacatcatacttttgactaaagcagaacctgaagccattccagagagaagacagtcacccaagaggcttctgtaagcatccccttgccccaggcattcctgccagtttctggaatgagttgtaactggtatattttgtgtttatcttttttcaaatcataacttggaatgatcaaatggcttttttatggtggtctttttccagagaaagaaaagaaggttctaacaatctctgtaatacactttataactgacctggaaacttttaggagaaaatggattataaaatagtttcagtaaaaatcaaaggtgttttagattagttaaaggccatgcttttctgtgtaattaatgagaaagactgagcctataatgctaattgaaactacaggactttttactgtctttcttctttgaccctttcagttgttacatttttatctaaaattattttctgatattatgaaagaaattaataatgtatgtcttaccttaaagcacatttatgatctatagatatgtgctcatgtatctgaaaataaagttgtattttgataacattc

SEQ ID NO: 290530 - DNA, 192 bp, Homo sapiens
accacagggattctgaggcattcctcttattgagaagaagtttaacttggcaatatttgacaaatacttgactgtcacccctgcccattgccctgtttgcctgtgaaaccctccctgctgtgggtatgttggttcttggcctcactttgctcagcagcctgtgtcttcctcctcagtaacaacctgcagtgt

SEQ ID NO: 290531 - DNA, 718 bp, Homo sapiens
tgggattacagcgtgagcaccacgcctgcctgaactggctctaattggttggttaagtaagaagagattgaatgaaagacagactttcaattctaattcagatattcttttctacacagaaacattgtcaattgttgctgtggaactagaactgaaggatttcatgaatgttctcccagaagatggtactgcaacatttttcttgccatatcttctctattgcagtcgaaagaaaccattgacttaaaggtatcatttgaaaaataccataatggcatttgagactgaatttctaaaaattgaatgccaaagtacaagtagaggagttttttattttatatatcacacacacacacacacacacacacacacacacacacatatatgatacaaatgctttcaggctgcttaccttaccgtgtagtggtaactattcacttcttaatttatgacctcaatcaatttaattgtctagaatgtaaaaagtctttaagacataagaattcctcaaagaagccatacattttttaaggtggggattgacttttattccaaggaacaacatcagttcactgttgttggagacatgacaatcattttcatcccaagaacactttaaggaaacattttacaagtatgcttgaaagaatgtcactaactggtccagaattttatcttcttgatttttccagatttctctatgtttttgagaaagatg

SEQ ID NO: 290532 - DNA, 289 bp, Homo sapiens
gtcttttcacaaccacagtgccttgtaaatgtgtgcatattataaataaatgaaattactatatgtctaattggtgagaggatgttgtaaaatctaattttcattcaagcaggactgttacattttatttttttaaggcatcagtaatgaaatttcacagcttgagtcagatgattttgtcatctgccagaagcccctggaacttcttggtgaaaaaagtgaacagtctggattatctgttacactggagtctacgggattagctgatgaaaaaagaaaatattcccac

SEQ ID NO: 290533 - DNA, 1756 bp, Homo sapiens
ttcaaaatcttctcaggcacactgatacacatacctcagatttttaattctccggttgtgttcaccaggtgcttggtcatgattaagaattccgtgatgtgtaccccatgtgtttaaatttgctgctgagttaactttgtggcggcctgtggactagacctctgcacatgcaatgcagaacggcagggccagatttgaaatcctgctatcttttcggctgccttgtaaaaataacatcaggcgatggggatacgatgccagaggtcacctgtgataagttctgtttatggccattttacttctaggaagacaggaagtgtcaggatctcagggatctaggaagccaaaatgtttttccactctgaaataaagtgactgaccaggagttcccggccacgcagccctgtgggaactgccgcacggccacttttatgaagtggacacgtgttggtcccactgaaaagaaactccccacccatggctccctcacgctgcagcagaggccctgccacagcacctgtcagcccctgccagcttgcaggggcgcaggcgcagagcggtttgtgcccttgctggagccagggaagggcacagggtccctcctggagtcatgggaggtgcagccgaggttctatattaaaatacagaggctagcacatgtgcttggggaatgcagctacagtagtggaatgaaagtgctgtccgttccttacccccccagcttctcacctgtcctccacacgcatatccctggctccctttccctagtaaggagactgaattgaaattgtggcttgcccgaggctgcatacctgtgctctttctgaagcccaagtcactggctctagaattctaacctgtgaggaagccactgaggatgtttgtcaaaatacatatttctgtgccttgccccagttccacggcccaggaatctgcagttttcacaagcacccccaggtgattctggtggtgtctttgcacttcttcaaggcagtactgcctggaacgcagaatcccagcctcctctatcctccttgcctaatggcctggatgctctcagatctacaggggaagggaaggtcacacagtcatcgcaatagtaacctcagctgataaatcctcccccataaaacttattccccagtgttttttaataggaaacaataaaactgtaaccagcccaaatatccatcaaagagaaaatggagaagtaaatcatcgcacattcacctggaccagatctattgtaaagccaataatactgaagccccttccaaggccctgggagtcctaacagtgcactggcagtgtctataatttatattatgaaatttgcataaggaaaacattttgtctcatttgtgcaatttctccttctaaatatacgtgtcactttgtacctgatttctataagacccaggacctacaaaccctgtgtctgcccctgcagccacccagggaaggactgcacagcagcaagacagattgccatggagcatgttgtgcccaactagggacagcgcagatagattctgtaatttgcctaacaatgtctataggatgatcccatttgtcaaaaaaaaaaaagaactgggctttattgatgtcacctaaatgcacctaaacttcttttttgccccatgctcttctgtactcttgatctttccccaaatttttaaaaacatgacactcattcccttatttttcctacttagaaaagtgtagatggttttatcataggaagttcaaaaaaatt

SEQ ID NO: 290534 - DNA, 1627 bp, Homo sapiens
gtcctaggctgggacccgggctgtccgccagggctgggagacactggaggaggccggccgatgattacgcgcgatgccaacgacgactgccctacggtggaccgcggctgcccgtgtgcggaggaaagggagaggcggctgggtgccggctgcgctgcggtccgtgagccaggacagagtcccaggctgtacagtgatgggcggagagactcgcagtcctgagaacgcagtggacttcactggaagatgctatttcaccaaaatctgcaaatgtaaactgaaggacatcgcatgtttaaaatgtgggaacattgtaggttatcatgtgattgttccatgtagttcctgtcttctttcctgcaacaacggacacttctggatgtttcacagccaggcagtttatgatattaacagactagactccacaggtgtaaacgtcctacttcggggcaacttgccagagatagaagagagtacagatgaagatgtgttaaatatctcagcagaggagtgtattagataaatggaattatgatatatatgatatacaaacttttttctatttaaaaatatattaatggatcaactttaaaattgttagttgccagtgatcttttttggaaaacaaaaatggggcatttgttgatttatttattttccgtctctaattagttacctcagtttgattgaagccagtggagttgtgcttttcctctacttctacttcctctcccccacctttttctgcccagtgtaggtgtattcttaaattcagacgggaagattctttcacatatcactcagttacctcccaatctgggggagtttttcttacaacttgataccagataccattaattttacattcctgaataaaggcctagtacccacgcatatttcaaccatgcatatatcaagttcaaccgagttttaataggggattaaaaaaacaagctgttaggtttccatgggcactggttctcataggttctattggtgataactgctttaacatggagcaagagtttgtgaatcaggaaatagaataaattaaaatttaaaatatatagaggaatcctcttgattgctcagcatgatgttagataaatgagtttgtcagaaaatatcagtatacgctgtttaccaatgttatttatttacattcttctaaagccattatggatattgtattatgagagctaaacctaaataagttatcctgttccctaggaccttctctgtaaatagtgaattttagacgagtggtctgtcctaaatcttaaatagaaaaaaaaactaaagcgatttgcttaagccattgtacattataaagagctgttttgttttgctttgctttgctttgttttgtttttttaaagctgcattcagagctacaaaggaataggaaagtagggtagtgttggattctggttttatgtaactctaaaataaatgtatctctttaatatctcagttgtagggattttgtcaataccaaagcagactgagttgtggttttgtaaataaagttttttctaaaaatgaccattcttcctttaattttttgttatgcccacatattgtatgtaaaaatataaataaatagtacttaaagtatagaatataa

SEQ ID NO: 290535 - DNA, 1540 bp, Homo sapiens
tacacgcctgtagtccaagtgacttgggaggctgaggtaggaggatcacttgagccctggaggttcaggctgcagtgatctgtgattgtgaaccgtgatcctgccaggcactccagcctgggcaacacagagagaatttctctcaaaataaataaataaagtttatgtcctagatggataatattaggtaattttatttgcagtacattcttcaatagctactctttttactgctaacactatggtttacataagaatattaacatataaagtttcgtaatttgtgttctgagttataacagtagtaagcattaaagaattttatgactttttattttcaggtgtaaacgtcctacttcggggcaacttgccagagatagaagagagtacagatgaagatgtgttaaatatctcagcagaggagtgtattagataaatggaattatgatatatatgatatacaaacttttttctatttaaaaatatattaatggatcaactttaaaattgttagttgccagtgatcttttttggaaaacaaaaatggggcatttgttgatttatttattttccgtctctaattagttacctcagtttgattgaagccagtggagttgtgcttttcctctacttctacttcctctcccccacctttttctgcccagtgtaggtgtattcttaaattcagacgggaagattctttcacatatcactcagttacctcccaatctgggggagtttttcttacaacttgataccagataccattaattttacattcctgaataaaggcctagtacccacgcatatttcaaccatgcatatatcaagttcaaccgagttttaataggggattaaaaaaacaagctgttaggtttccatgggcactggttctcataggttctattggtgataactgctttaacatggagcaagagtttgtgaatcaggaaatagaataaattaaaatttaaaatatatagaggaatcctcttgattgctcagcatgatgttagataaatgagtttgtcagaaaatatcagtatacgctgtttaccaatgttatttatttacattcttctaaagccattatggatattgtattatgagagctaaacctaaataagttatcctgttccctaggaccttctctgtaaatagtgaattttagacgagtggtctgtcctaaatcttaaatagaaaaaaaaactaaagcgatttgcttaagccattgtacattataaagagctgttttgttttgctttgctttgctttgttttgtttttttaaagctgcattcagagctacaaaggaataggaaagtagggtagtgttggattctggttttatgtaactctaaaataaatgtatctctttaatatctcagttgtagggattttgtcaataccaaagcagactgagttgtggttttgtaaataaagttttttctaaaaatgaccattcttcctttaattttttgttatgcccacatattgtatgtaaaaatataaataaatagtacttaaagtatagaatataa

SEQ ID NO: 290536 - DNA, 356 bp, Homo sapiens
cacttgctaacaatgtagattccagggtcctagtcccataaattctgattcaggtctaatattgaggcctggcaatctgcattgtcaacaatgcagcttatcctgaagtgggtaatctgggaatatcctttgaaaaacactgaaatagactaccaacatctatgaaaacatttacgggtgcttaaatttcaggatgtttcttttctttctccccatttcctctcatccattatgcatgaaagacttctgcaagatgccaagaggggaacttgggctttttcttttttccaatttgccttttacagagtgatggaaagttaactacgaactcctgcggggaaaagaagagacgatct

SEQ ID NO: 290537 - DNA, 331 bp, Homo sapiens
gtcctaggctgggacccgggctgtccgccagggctgggagacactggaggaggccggccgatgattacgcgcgatgccaacgacgactgccctacggtggaccgcggctgcccgtgtgcggaggaaagggagaggcggctgggtgccggctgcgctgcggtccgtgagccaggacagagtcccaggctgtacagtgatgggcggagagactcgcagtcctgagaaatctgtgccccagtccctggaggacctccgccaactccgcaggacccccggggtagagaggaggggtgttgcggggaattttaaccaataaagagtagagaccggt

SEQ ID NO: 290538 - DNA, 2437 bp, Homo sapiens
gcgctggcaattcaaactgataccgggttggagaggcaggaaaagcggaagagggagcgaaaaccaacgtgttcggtgacagaccccagcgccgactgagcctctaaagcgacttcagctctgccccaccaacaccaccgcgcgcccgggaacagccgctccgggaagaaacctgaggggactgcggggggcacgagggacagctgagggaagggaggacgcgagagaaacagcgcaagcacgctgagggccgggggttgccaggagaggggcccgcggacccgcagagcggaggaaggtccgggagaaaaggggcgggacggaggagaatccgggatcgcctggcagaaaaagagaagggagtttctgaatcctgggaagaggaggcgtgggtagggatgcttagcccgagatccgacagcagggaaccggagcgctccgggggaggggcttaatgctggggaagggatgtcttaaaagaggagaagctttaaattagacgatcggagaaggctgagggaattgctatgaaggggcgggagctgaagtgtagaggactcctttagacagcagaaagggaaagccgttgagaagttcccttcaaactccacctgcctcctctccaattcaaactccactcccttctccaaaagttaaaaggaaagccaagtttgccacgctcccctgttcctactcaataaatacttcttctactccgccaccgggaaaacagaaaaaaaaaactaatttccttcccaatattaggacttagaaaagctctaggtcccgcaacttgaattttagcctaggggaatcaaaatagtaggagcattactcttgtttcctttttcaaaatcccacacctcatccttcctgcgacgccatgtctaccaacatttgtagtttcaaggacaggtgcgtgtccatcctgtgttgcaaattctgtaaacaagtgctcagctctaggggaatgaaggctgttttgctggctgatactgaaatagaccttttctctacagacatccctcctaccaacgcagtggacttcactggaagatgctatttcaccaaaatctgcaaatgtaaactgaaggacatcgcatgtttaaaatgtgggaacattgtaggttatcatgtgattgttccatgtagttcctgtcttctttcctgcaacaacggacacttctggatgtttcacagccaggcagtttatgatattaacagactagactccacaggtgtaaacgtcctacttcggggcaacttgccagagatagaagagagtacagatgaagatgtgttaaatatctcagcagaggagtgtattagataaatggaattatgatatatatgatatacaaacttttttctatttaaaaatatattaatggatcaactttaaaattgttagttgccagtgatcttttttggaaaacaaaaatggggcatttgttgatttatttattttccgtctctaattagttacctcagtttgattgaagccagtggagttgtgcttttcctctacttctacttcctctcccccacctttttctgcccagtgtaggtgtattcttaaattcagacgggaagattctttcacatatcactcagttacctcccaatctgggggagtttttcttacaacttgataccagataccattaattttacattcctgaataaaggcctagtacccacgcatatttcaaccatgcatatatcaagttcaaccgagttttaataggggattaaaaaaacaagctgttaggtttccatgggcactggttctcataggttctattggtgataactgctttaacatggagcaagagtttgtgaatcaggaaatagaataaattaaaatttaaaatatatagaggaatcctcttgattgctcagcatgatgttagataaatgagtttgtcagaaaatatcagtatacgctgtttaccaatgttatttatttacattcttctaaagccattatggatattgtattatgagagctaaacctaaataagttatcctgttccctaggaccttctctgtaaatagtgaattttagacgagtggtctgtcctaaatcttaaatagaaaaaaaaactaaagcgatttgcttaagccattgtacattataaagagctgttttgttttgctttgctttgctttgttttgtttttttaaagctgcattcagagctacaaaggaataggaaagtagggtagtgttggattctggttttatgtaactctaaaataaatgtatctctttaatatctcagttgtagggattttgtcaataccaaagcagactgagttgtggttttgtaaataaagttttttctaaaaatgaccattcttcctttaattttttgttatgcccacatattgtatgtaaaaatataaataaatagtacttaaagtatagaatataa

SEQ ID NO: 290539 - DNA, 2412 bp, Homo sapiens
cggacgcgtgggtcgacccacgcgtcggggagcgaaaaccaacgtgttcggtgacagaccccagcgccgactgagcctctaaagcgacttcagctctgccccaccaacaccaccgcgcgcccgggaacagccgctccgggaagaaacctgaggggactgcggggggcacgagggacagctgagggaagggaggacgcgagagaaacagcgcaagcacgctgagggccgggggttgccaggagaggggcccgcggacccgcagagcggaggaaggtccgggagaaaaggggcgggacggaggagaatccgggatcgcctggcagaaaaagagaagggagtttctgaatcctgggaagaggaggcgtgggtagggatgcttagcccgagatccgacagcagggaaccggagcgctccgggggaggggcttaatgctggggaagggatgtcttaaaagaggagaagctttaaattagacgatcggagaaggctgagggaattgctatgaaggggcgggagctgaagtgtagaggactcctttagacagcagaaagggaaagccgttgagaagttcccttcaaactccacctgcctcctctccaattcaaactccactcccttctccaaaagttaaaaggaaagccaagtttgccacgctcccctgttcctactcaataaatacttcttctactccgccaccgggaaaacagaaaaaaaaaactaatttccttcccaatattaggacttagaaaagctctaggtcccgcaacttgaattttagcctaggggaatcaaaatagtaggagcattactcttgtttcctttttcaaaatcccacacctcatccttcctgcgacgccatgtctaccaacatttgtagtttcaaggacaggtgcgtgtccatcctgtgttgcaaattctgtaaacaagtgctcagctctaggggaatgaaggctgttttgctggctgatactgaaatagaccttttctctacagacatccctcctaccaacgcagtggacttcactggaagatgctatttcaccaaaatctgcaaatgtaaactgaaggacatcgcatgtttaaaatgtgggaacattgtaggttatcatgtgattgttccatgtagttcctgtcttctttcctgcaacaacggacacttctggatgtttcacagccaggcagtttatgatattaacagactagactccacaggtgtaaacgtcctacttcggggcaacttgccagagatagaagagagtacagatgaagatgtgttaaatatctcagcagaggagtgtattagataaatggaattatgatatatatgatatacaaacttttttctatttaaaaatatattaatggatcaactttaaaattgttagttgccagtgatcttttttggaaaacaaaaatggggcatttgttgatttatttattttccgtctctaattagttacctcagtttgattgaagccagtggagttgtgcttttcctctacttctacttcctctcccccacctttttctgcccagtgtaggtgtattcttaaattcagacgggaagattctttcacatatcactcagttacctcccaatctgggggagtttttcttacaacttgataccagataccattaattttacattcctgaataaaggcctagtacccacgcatatttcaaccatgcatatatcaagttcaaccgagttttaataggggattaaaaaaacaagctgttaggtttccatgggcactggttctcataggttctattggtgataactgctttaacatggagcaagagtttgtgaatcaggaaatagaataaattaaaatttaaaatatatagaggaatcctcttgattgctcagcatgatgttagataaatgagtttgtcagaaaatatcagtatacgctgtttaccaatgttatttatttacattcttctaaagccattatggatattgtattatgagagctaaacctaaataagttatcctgttccctaggaccttctctgtaaatagtgaattttagacgagtggtctgtcctaaatcttaaatagaaaaaaaaactaaagcgatttgcttaagccattgtacattataaagagctgttttgttttgctttgctttgctttgttttgtttttttaaagctgcattcagagctacaaaggaataggaaagtagggtagtgttggattctggttttatgtaactctaaaataaatgtatctctttaatatctcagttgtagggattttgtcaataccaaagcagactgagttgtggttttgtaaataaagttttttctaaaaatgaccattcttcctttaattttttgttatgcccacatattgtatgtaaaaatataaataaatagtacttaaagtatagaatataa

SEQ ID NO: 290540 - DNA, 2102 bp, Homo sapiens
agcaggaggagaggatgggagaagagcctagaagagggagagaggctccaaaagtttatgcatgtattaaaaacacacacacacacacgacacacacacgagcggccggcaggggcttaatgctggggaagggatgtcttaaaagaggagaagctttaaattagacgatcggagaaggctgagggaattgctatgaaggggcgggagctgaagtgtagaggactcctttagacagcagaaagggaaagccgttgagaagttcccttcaaactccacctgcctcctctccaattcaaactccactcccttctccaaaagttaaaaggaaagccaagtttgccacgctcccctgttcctactcaataaatacttcttctactccgccaccgggaaaacagaaaaaaaaaactaatttccttcccaatattaggacttagaaaagctctaggtcccgcaacttgaattttagcctaggggaatcaaaatagtaggagcattactcttgtttcctttttcaaaatcccacacctcatccttcctgcgacgccatgtctaccaacatttgtagtttcaaggacaggtgcgtgtccatcctgtgttgcaaattctgtaaacaagtgctcagctctaggggaatgaaggctgttttgctggctgatactgaaatagaccttttctctacagacatccctcctaccaacgcagtggacttcactggaagatgctatttcaccaaaatctgcaaatgtaaactgaaggacatcgcatgtttaaaatgtgggaacattgtaggttatcatgtgattgttccatgtagttcctgtcttctttcctgcaacaacggacacttctggatgtttcacagccaggcagtttatgatattaacagactagactccacaggtgtaaacgtcctacttcggggcaacttgccagagatagaagagagtacagatgaagatgtgttaaatatctcagcagaggagtgtattagataaatggaattatgatatatatgatatacaaacttttttctatttaaaaatatattaatggatcaactttaaaattgttagttgccagtgatcttttttggaaaacaaaaatggggcatttgttgatttatttattttccgtctctaattagttacctcagtttgattgaagccagtggagttgtgcttttcctctacttctacttcctctcccccacctttttctgcccagtgtaggtgtattcttaaattcagacgggaagattctttcacatatcactcagttacctcccaatctgggggagtttttcttacaacttgataccagataccattaattttacattcctgaataaaggcctagtacccacgcatatttcaaccatgcatatatcaagttcaaccgagttttaataggggattaaaaaaacaagctgttaggtttccatgggcactggttctcataggttctattggtgataactgctttaacatggagcaagagtttgtgaatcaggaaatagaataaattaaaatttaaaatatatagaggaatcctcttgattgctcagcatgatgttagataaatgagtttgtcagaaaatatcagtatacgctgtttaccaatgttatttatttacattcttctaaagccattatggatattgtattatgagagctaaacctaaataagttatcctgttccctaggaccttctctgtaaatagtgaattttagacgagtggtctgtcctaaatcttaaatagaaaaaaaaactaaagcgatttgcttaagccattgtacattataaagagctgttttgttttgctttgctttgctttgttttgtttttttaaagctgcattcagagctacaaaggaataggaaagtagggtagtgttggattctggttttatgtaactctaaaataaatgtatctctttaatatctcagttgtagggattttgtcaataccaaagcagactgagttgtggttttgtaaataaagttttttctaaaaatgaccattcttcctttaattttttgttatgcccacatattgtatgtaaaaatataaataaatagtacttaaagtatagaatataa

SEQ ID NO: 290541 - DNA, 2283 bp, Homo sapiens
cggacgcgtgggtcgacccacgcgtcggggagcgaaaaccaacgtgttcggtgacagaccccagcgccgactgagcctctaaagcgacttcagctctgccccaccaacaccaccgcgcgcccgggaacagccgctccgggaagaaacctgaggggactgcggggggcacgagggacagctgagggaagggaggacgcgagagaaacagcgcaagcacgctgagggccgggggttgccaggagaggggcccgcggacccgcagagcggaggaaggtccgggagaaaaggggcgggacggaggagaatccgggatcgcctggcagaaaaagagaagctttaaattagacgatcggagaaggctgagggaattgctatgaaggggcgggagctgaagtgtagaggactcctttagacagcagaaagggaaagccgttgagaagttcccttcaaactccacctgcctcctctccaattcaaactccactcccttctccaaaagttaaaaggaaagccaagtttgccacgctcccctgttcctactcaataaatacttcttctactccgccaccgggaaaacagaaaaaaaaaactaatttccttcccaatattaggacttagaaaagctctaggtcccgcaacttgaattttagcctaggggaatcaaaatagtaggagcattactcttgtttcctttttcaaaatcccacacctcatccttcctgcgacgccatgtctaccaacatttgtagtttcaaggacaggtgcgtgtccatcctgtgttgcaaattctgtaaacaagtgctcagctctaggggaatgaaggctgttttgctggctgatactgaaatagaccttttctctacagacatccctcctaccaacgcagtggacttcactggaagatgctatttcaccaaaatctgcaaatgtaaactgaaggacatcgcatgtttaaaatgtgggaacattgtaggttatcatgtgattgttccatgtagttcctgtcttctttcctgcaacaacggacacttctggatgtttcacagccaggcagtttatgatattaacagactagactccacaggtgtaaacgtcctacttcggggcaacttgccagagatagaagagagtacagatgaagatgtgttaaatatctcagcagaggagtgtattagataaatggaattatgatatatatgatatacaaacttttttctatttaaaaatatattaatggatcaactttaaaattgttagttgccagtgatcttttttggaaaacaaaaatggggcatttgttgatttatttattttccgtctctaattagttacctcagtttgattgaagccagtggagttgtgcttttcctctacttctacttcctctcccccacctttttctgcccagtgtaggtgtattcttaaattcagacgggaagattctttcacatatcactcagttacctcccaatctgggggagtttttcttacaacttgataccagataccattaattttacattcctgaataaaggcctagtacccacgcatatttcaaccatgcatatatcaagttcaaccgagttttaataggggattaaaaaaacaagctgttaggtttccatgggcactggttctcataggttctattggtgataactgctttaacatggagcaagagtttgtgaatcaggaaatagaataaattaaaatttaaaatatatagaggaatcctcttgattgctcagcatgatgttagataaatgagtttgtcagaaaatatcagtatacgctgtttaccaatgttatttatttacattcttctaaagccattatggatattgtattatgagagctaaacctaaataagttatcctgttccctaggaccttctctgtaaatagtgaattttagacgagtggtctgtcctaaatcttaaatagaaaaaaaaactaaagcgatttgcttaagccattgtacattataaagagctgttttgttttgctttgctttgctttgttttgtttttttaaagctgcattcagagctacaaaggaataggaaagtagggtagtgttggattctggttttatgtaactctaaaataaatgtatctctttaatatctcagttgtagggattttgtcaataccaaagcagactgagttgtggttttgtaaataaagttttttctaaaaatgaccattcttcctttaattttttgttatgcccacatattgtatgtaaaaatataaataaatagtacttaaagtatagaatataa

SEQ ID NO: 290542 - DNA, 2471 bp, Homo sapiens
gcgctggcaattcaaactgataccgggttggagaggcaggaaaagcggaagagggagcgaaaaccaacgtgttcggtgacagaccccagcgccgactgagcctctaaagcgacttcagctctgccccaccaacaccaccgcgcgcccgggaacagccgctccgggaagaaacctgaggggactgcggggggcacgagggacagctgagggaagggaggacgcgagagaaacagcgcaagcacgctgagggccgggggttgccaggagaggggcccgcggacccgcagagcggaggaaggtccgggagaaaaggggcgggacggaggagaatccgggatcgcctggcagaaaaagagaagggagtttctgaatcctgggaagaggaggcgtgggtagggatgcttagcccgagatccgacagcagggaaccggagcgctccgggggaggggcttaatgctggggaagggatgtcttaaaagaggagaagctttaaattagacgatcggagaaggctgagggaattgctatgaaggggcgggagctgaagtgtagaggactcctttagacagcagaaagggaaagccgttgagaagttcccttcaaactccacctgcctcctctccaattcaaactccactcccttctccaaaagttaaaaggaaagccaagtttgccacgctcccctgttcctactcaataaatacttcttctactccgccaccgggaaaacagaaaaaaaaaactaatttccttcccaatattaggacttagaaaagctctaggtcccgcaacttgaattttagcctaggggaatcaaaatagtaggagcattactcttgtttcctttttcaaaatcccacacctcatccttcctgcgacgccatgtctaccaacatttgtagtttcaaggacaggtgcgtgtccatcctgtgttggccaaatttttccctttgctttaacaaaacccaaaaggttggcttccaggccctctagcgggcacatgacaggcgctgttttgctggctgatactgaaatagaccttttctctacagacatccctcctaccaacgcagtggacttcactggaagatgctatttcaccaaaatctgcaaatgtaaactgaaggacatcgcatgtttaaaatgtgggaacattgtaggttatcatgtgattgttccatgtagttcctgtcttctttcctgcaacaacggacacttctggatgtttcacagccaggcagtttatgatattaacagactagactccacaggtgtaaacgtcctacttcggggcaacttgccagagatagaagagagtacagatgaagatgtgttaaatatctcagcagaggagtgtattagataaatggaattatgatatatatgatatacaaacttttttctatttaaaaatatattaatggatcaactttaaaattgttagttgccagtgatcttttttggaaaacaaaaatggggcatttgttgatttatttattttccgtctctaattagttacctcagtttgattgaagccagtggagttgtgcttttcctctacttctacttcctctcccccacctttttctgcccagtgtaggtgtattcttaaattcagacgggaagattctttcacatatcactcagttacctcccaatctgggggagtttttcttacaacttgataccagataccattaattttacattcctgaataaaggcctagtacccacgcatatttcaaccatgcatatatcaagttcaaccgagttttaataggggattaaaaaaacaagctgttaggtttccatgggcactggttctcataggttctattggtgataactgctttaacatggagcaagagtttgtgaatcaggaaatagaataaattaaaatttaaaatatatagaggaatcctcttgattgctcagcatgatgttagataaatgagtttgtcagaaaatatcagtatacgctgtttaccaatgttatttatttacattcttctaaagccattatggatattgtattatgagagctaaacctaaataagttatcctgttccctaggaccttctctgtaaatagtgaattttagacgagtggtctgtcctaaatcttaaatagaaaaaaaaactaaagcgatttgcttaagccattgtacattataaagagctgttttgttttgctttgctttgctttgttttgtttttttaaagctgcattcagagctacaaaggaataggaaagtagggtagtgttggattctggttttatgtaactctaaaataaatgtatctctttaatatctcagttgtagggattttgtcaataccaaagcagactgagttgtggttttgtaaataaagttttttctaaaaatgaccattcttcctttaattttttgttatgcccacatattgtatgtaaaaatataaataaatagtacttaaagtatagaatataa

SEQ ID NO: 290543 - DNA, 1807 bp, Homo sapiens
cggacgcgtgggtcgacccacgcgtcggggagcgaaaaccaacgtgttcggtgacagaccccagcgccgactgagcctctaaagcgacttcagctctgccccaccaacaccaccgcgcgcccgggaacagccgctccgggaagaaacctgaggggactgcggggggcacgagggacagctgagggaagggaggacgcgagagaaacagcgcaagcacgctgagggccgggggttgccaggagaggggcccgcggacccgcagagcggaggaagtttcaaggacaggtgcgtgtccatcctgtgttgcaaattctgtaaacaagtgctcagctctaggggaatgaaggctgttttgctggctgatactgaaatagaccttttctctacagacatccctcctaccaacgcagtggacttcactggaagatgctatttcaccaaaatctgcaaatgtaaactgaaggacatcgcatgtttaaaatgtgggaacattgtaggttatcatgtgattgttccatgtagttcctgtcttctttcctgcaacaacggacacttctggatgtttcacagccaggcagtttatgatattaacagactagactccacaggtgtaaacgtcctacttcggggcaacttgccagagatagaagagagtacagatgaagatgtgttaaatatctcagcagaggagtgtattagataaatggaattatgatatatatgatatacaaacttttttctatttaaaaatatattaatggatcaactttaaaattgttagttgccagtgatcttttttggaaaacaaaaatggggcatttgttgatttatttattttccgtctctaattagttacctcagtttgattgaagccagtggagttgtgcttttcctctacttctacttcctctcccccacctttttctgcccagtgtaggtgtattcttaaattcagacgggaagattctttcacatatcactcagttacctcccaatctgggggagtttttcttacaacttgataccagataccattaattttacattcctgaataaaggcctagtacccacgcatatttcaaccatgcatatatcaagttcaaccgagttttaataggggattaaaaaaacaagctgttaggtttccatgggcactggttctcataggttctattggtgataactgctttaacatggagcaagagtttgtgaatcaggaaatagaataaattaaaatttaaaatatatagaggaatcctcttgattgctcagcatgatgttagataaatgagtttgtcagaaaatatcagtatacgctgtttaccaatgttatttatttacattcttctaaagccattatggatattgtattatgagagctaaacctaaataagttatcctgttccctaggaccttctctgtaaatagtgaattttagacgagtggtctgtcctaaatcttaaatagaaaaaaaaactaaagcgatttgcttaagccattgtacattataaagagctgttttgttttgctttgctttgctttgttttgtttttttaaagctgcattcagagctacaaaggaataggaaagtagggtagtgttggattctggttttatgtaactctaaaataaatgtatctctttaatatctcagttgtagggattttgtcaataccaaagcagactgagttgtggttttgtaaataaagttttttctaaaaatgaccattcttcctttaattttttgttatgcccacatattgtatgtaaaaatataaataaatagtacttaaagtatagaatataa

SEQ ID NO: 290544 - DNA, 1905 bp, Homo sapiens
cggacgcgtgggtcgacccacgcgtcggggagcgaaaaccaacgtgttcggtgacagaccccagcgccgactgagcctctaaagcgacttcagctctgccccaccaacaccaccgcgcgcccgggaacagccgctccgggaagaaacctgaggggactgcggggggcacgagggacagctgagggaagggaggacgcgagagaaacagcgcaagcacgctgagggccgggggttgccaggagaggggcccgcggacccgcagagcggaggaaggtccgggagaaaaggggcgggacggaggagaatccgggatcgcctggcagaaaaagagaagggagtttctgaatcctgggaagaggaggcgtgggtagtttcaaggacaggtgcgtgtccatcctgtgttgcaaattctgtaaacaagtgctcagctctaggggaatgaaggctgttttgctggctgatactgaaatagaccttttctctacagacatccctcctaccaacgcagtggacttcactggaagatgctatttcaccaaaatctgcaaatgtaaactgaaggacatcgcatgtttaaaatgtgggaacattgtaggttatcatgtgattgttccatgtagttcctgtcttctttcctgcaacaacggacacttctggatgtttcacagccaggcagtttatgatattaacagactagactccacaggtgtaaacgtcctacttcggggcaacttgccagagatagaagagagtacagatgaagatgtgttaaatatctcagcagaggagtgtattagataaatggaattatgatatatatgatatacaaacttttttctatttaaaaatatattaatggatcaactttaaaattgttagttgccagtgatcttttttggaaaacaaaaatggggcatttgttgatttatttattttccgtctctaattagttacctcagtttgattgaagccagtggagttgtgcttttcctctacttctacttcctctcccccacctttttctgcccagtgtaggtgtattcttaaattcagacgggaagattctttcacatatcactcagttacctcccaatctgggggagtttttcttacaacttgataccagataccattaattttacattcctgaataaaggcctagtacccacgcatatttcaaccatgcatatatcaagttcaaccgagttttaataggggattaaaaaaacaagctgttaggtttccatgggcactggttctcataggttctattggtgataactgctttaacatggagcaagagtttgtgaatcaggaaatagaataaattaaaatttaaaatatatagaggaatcctcttgattgctcagcatgatgttagataaatgagtttgtcagaaaatatcagtatacgctgtttaccaatgttatttatttacattcttctaaagccattatggatattgtattatgagagctaaacctaaataagttatcctgttccctaggaccttctctgtaaatagtgaattttagacgagtggtctgtcctaaatcttaaatagaaaaaaaaactaaagcgatttgcttaagccattgtacattataaagagctgttttgttttgctttgctttgctttgttttgtttttttaaagctgcattcagagctacaaaggaataggaaagtagggtagtgttggattctggttttatgtaactctaaaataaatgtatctctttaatatctcagttgtagggattttgtcaataccaaagcagactgagttgtggttttgtaaataaagttttttctaaaaatgaccattcttcctttaattttttgttatgcccacatattgtatgtaaaaatataaataaatagtacttaaagtatagaatataa

SEQ ID NO: 290545 - DNA, 1541 bp, Homo sapiens
cggacgcgtgggtcgacccacgcgtcggggagcgaaaaccaacgtgttcggtgacagaccccagcgccgactgagcctctaaagcgacttcagctctgccccaccaacaccaccgcgcgcccgggaacagccgctccggcgcagtggacttcactggaagatgctatttcaccaaaatctgcaaatgtaaactgaaggacatcgcatgtttaaaatgtgggaacattgtaggttatcatgtgattgttccatgtagttcctgtcttctttcctgcaacaacggacacttctggatgtttcacagccaggcagtttatgatattaacagactagactccacaggtgtaaacgtcctacttcggggcaacttgccagagatagaagagagtacagatgaagatgtgttaaatatctcagcagaggagtgtattagataaatggaattatgatatatatgatatacaaacttttttctatttaaaaatatattaatggatcaactttaaaattgttagttgccagtgatcttttttggaaaacaaaaatggggcatttgttgatttatttattttccgtctctaattagttacctcagtttgattgaagccagtggagttgtgcttttcctctacttctacttcctctcccccacctttttctgcccagtgtaggtgtattcttaaattcagacgggaagattctttcacatatcactcagttacctcccaatctgggggagtttttcttacaacttgataccagataccattaattttacattcctgaataaaggcctagtacccacgcatatttcaaccatgcatatatcaagttcaaccgagttttaataggggattaaaaaaacaagctgttaggtttccatgggcactggttctcataggttctattggtgataactgctttaacatggagcaagagtttgtgaatcaggaaatagaataaattaaaatttaaaatatatagaggaatcctcttgattgctcagcatgatgttagataaatgagtttgtcagaaaatatcagtatacgctgtttaccaatgttatttatttacattcttctaaagccattatggatattgtattatgagagctaaacctaaataagttatcctgttccctaggaccttctctgtaaatagtgaattttagacgagtggtctgtcctaaatcttaaatagaaaaaaaaactaaagcgatttgcttaagccattgtacattataaagagctgttttgttttgctttgctttgctttgttttgtttttttaaagctgcattcagagctacaaaggaataggaaagtagggtagtgttggattctggttttatgtaactctaaaataaatgtatctctttaatatctcagttgtagggattttgtcaataccaaagcagactgagttgtggttttgtaaataaagttttttctaaaaatgaccattcttcctttaattttttgttatgcccacatattgtatgtaaaaatataaataaatagtacttaaagtatagaatataa

SEQ ID NO: 290546 - DNA, 1773 bp, Homo sapiens
cggacgcgtgggtcgacccacgcgtcggggagcgaaaaccaacgtgttcggtgacagaccccagcgccgactgagcctctaaagcgacttcagctctgccccaccaacaccaccgcgcgcccgggaacagccgctccgggaagaaacctgaggggactgcggggggcacgagggacagctgagggaagggaggacgcgagagaaacagcgcaagcacgctgagggccgggggttgccaggagaggggcccgcggacccgcagagcggaggaaggtccgggagaaaaggggcgggacggaggagaatccgggatcgcctggcagaaaaagagaagggagtttctgaatcctgggaagaggaggcgtgggtagcgcagtggacttcactggaagatgctatttcaccaaaatctgcaaatgtaaactgaaggacatcgcatgtttaaaatgtgggaacattgtaggttatcatgtgattgttccatgtagttcctgtcttctttcctgcaacaacggacacttctggatgtttcacagccaggcagtttatgatattaacagactagactccacaggtgtaaacgtcctacttcggggcaacttgccagagatagaagagagtacagatgaagatgtgttaaatatctcagcagaggagtgtattagataaatggaattatgatatatatgatatacaaacttttttctatttaaaaatatattaatggatcaactttaaaattgttagttgccagtgatcttttttggaaaacaaaaatggggcatttgttgatttatttattttccgtctctaattagttacctcagtttgattgaagccagtggagttgtgcttttcctctacttctacttcctctcccccacctttttctgcccagtgtaggtgtattcttaaattcagacgggaagattctttcacatatcactcagttacctcccaatctgggggagtttttcttacaacttgataccagataccattaattttacattcctgaataaaggcctagtacccacgcatatttcaaccatgcatatatcaagttcaaccgagttttaataggggattaaaaaaacaagctgttaggtttccatgggcactggttctcataggttctattggtgataactgctttaacatggagcaagagtttgtgaatcaggaaatagaataaattaaaatttaaaatatatagaggaatcctcttgattgctcagcatgatgttagataaatgagtttgtcagaaaatatcagtatacgctgtttaccaatgttatttatttacattcttctaaagccattatggatattgtattatgagagctaaacctaaataagttatcctgttccctaggaccttctctgtaaatagtgaattttagacgagtggtctgtcctaaatcttaaatagaaaaaaaaactaaagcgatttgcttaagccattgtacattataaagagctgttttgttttgctttgctttgctttgttttgtttttttaaagctgcattcagagctacaaaggaataggaaagtagggtagtgttggattctggttttatgtaactctaaaataaatgtatctctttaatatctcagttgtagggattttgtcaataccaaagcagactgagttgtggttttgtaaataaagttttttctaaaaatgaccattcttcctttaattttttgttatgcccacatattgtatgtaaaaatataaataaatagtacttaaagtatagaatataa

SEQ ID NO: 290547 - DNA, 1675 bp, Homo sapiens
cggacgcgtgggtcgacccacgcgtcggggagcgaaaaccaacgtgttcggtgacagaccccagcgccgactgagcctctaaagcgacttcagctctgccccaccaacaccaccgcgcgcccgggaacagccgctccgggaagaaacctgaggggactgcggggggcacgagggacagctgagggaagggaggacgcgagagaaacagcgcaagcacgctgagggccgggggttgccaggagaggggcccgcggacccgcagagcggaggaagcgcagtggacttcactggaagatgctatttcaccaaaatctgcaaatgtaaactgaaggacatcgcatgtttaaaatgtgggaacattgtaggttatcatgtgattgttccatgtagttcctgtcttctttcctgcaacaacggacacttctggatgtttcacagccaggcagtttatgatattaacagactagactccacaggtgtaaacgtcctacttcggggcaacttgccagagatagaagagagtacagatgaagatgtgttaaatatctcagcagaggagtgtattagataaatggaattatgatatatatgatatacaaacttttttctatttaaaaatatattaatggatcaactttaaaattgttagttgccagtgatcttttttggaaaacaaaaatggggcatttgttgatttatttattttccgtctctaattagttacctcagtttgattgaagccagtggagttgtgcttttcctctacttctacttcctctcccccacctttttctgcccagtgtaggtgtattcttaaattcagacgggaagattctttcacatatcactcagttacctcccaatctgggggagtttttcttacaacttgataccagataccattaattttacattcctgaataaaggcctagtacccacgcatatttcaaccatgcatatatcaagttcaaccgagttttaataggggattaaaaaaacaagctgttaggtttccatgggcactggttctcataggttctattggtgataactgctttaacatggagcaagagtttgtgaatcaggaaatagaataaattaaaatttaaaatatatagaggaatcctcttgattgctcagcatgatgttagataaatgagtttgtcagaaaatatcagtatacgctgtttaccaatgttatttatttacattcttctaaagccattatggatattgtattatgagagctaaacctaaataagttatcctgttccctaggaccttctctgtaaatagtgaattttagacgagtggtctgtcctaaatcttaaatagaaaaaaaaactaaagcgatttgcttaagccattgtacattataaagagctgttttgttttgctttgctttgctttgttttgtttttttaaagctgcattcagagctacaaaggaataggaaagtagggtagtgttggattctggttttatgtaactctaaaataaatgtatctctttaatatctcagttgtagggattttgtcaataccaaagcagactgagttgtggttttgtaaataaagttttttctaaaaatgaccattcttcctttaattttttgttatgcccacatattgtatgtaaaaatataaataaatagtacttaaagtatagaatataa

SEQ ID NO: 290548 - DNA, 1497 bp, Homo sapiens
cttgagaacagggtcctatgactctttaaccaattatgttcaaaggagtccccaaagtgttaagcagtttcaaggacagacatccctcctaccaacgcagtggacttcactggaagatgctatttcaccaaaatctgcaaatgtaaactgaaggacatcgcatgtttaaaatgtgggaacattgtaggttatcatgtgattgttccatgtagttcctgtcttctttcctgcaacaacggacacttctggatgtttcacagccaggcagtttatgatattaacagactagactccacaggtgtaaacgtcctacttcggggcaacttgccagagatagaagagagtacagatgaagatgtgttaaatatctcagcagaggagtgtattagataaatggaattatgatatatatgatatacaaacttttttctatttaaaaatatattaatggatcaactttaaaattgttagttgccagtgatcttttttggaaaacaaaaatggggcatttgttgatttatttattttccgtctctaattagttacctcagtttgattgaagccagtggagttgtgcttttcctctacttctacttcctctcccccacctttttctgcccagtgtaggtgtattcttaaattcagacgggaagattctttcacatatcactcagttacctcccaatctgggggagtttttcttacaacttgataccagataccattaattttacattcctgaataaaggcctagtacccacgcatatttcaaccatgcatatatcaagttcaaccgagttttaataggggattaaaaaaacaagctgttaggtttccatgggcactggttctcataggttctattggtgataactgctttaacatggagcaagagtttgtgaatcaggaaatagaataaattaaaatttaaaatatatagaggaatcctcttgattgctcagcatgatgttagataaatgagtttgtcagaaaatatcagtatacgctgtttaccaatgttatttatttacattcttctaaagccattatggatattgtattatgagagctaaacctaaataagttatcctgttccctaggaccttctctgtaaatagtgaattttagacgagtggtctgtcctaaatcttaaatagaaaaaaaaactaaagcgatttgcttaagccattgtacattataaagagctgttttgttttgctttgctttgctttgttttgtttttttaaagctgcattcagagctacaaaggaataggaaagtagggtagtgttggattctggttttatgtaactctaaaataaatgtatctctttaatatctcagttgtagggattttgtcaataccaaagcagactgagttgtggttttgtaaataaagttttttctaaaaatgaccattcttcctttaattttttgttatgcccacatattgtatgtaaaaatataaataaatagtacttaaagtatagaatataa

SEQ ID NO: 290549 - DNA, 1352 bp, Homo sapiens
gcgctggcaattcaaactgataccgggttggagaggcaggaaaagcggaagagggagcgaaaaccaacgtgttcggtgacagaccccagcgccgactgagcctctaaagcgacttcagctctgccccaccaacaccaccgcgcgcccgggaacagccgctccgggaagaaacctgaggggactgcggggggcacgagggacagctgagggaagggaggacgcgagagaaacagcgcaagcacgctgagggccgggggttgccaggagaggggcccgcggacccgcagagcggaggaaggtccgggagaaaaggggcgggacggaggagaatccgggatcgcctggcagaaaaagagaagggagtttctgaatcctgggaagaggaggcgtgggtagggatgcttagcccgagatccgacagcagggaaccggagcgctccgggggaggggcttaatgctggggaagggatgtcttaaaagaggagaagctttaaattagacgatcggagaaggctgagggaattgctatgaaggggcgggagctgaagtgtagaggactcctttagacagcagaaagggaaagccgttgagaagttcccttcaaactccacctgcctcctctccaattcaaactccactcccttctccaaaagttaaaaggaaagccaagtttgccacgctcccctgttcctactcaataaatacttcttctactccgccaccgggaaaacagaaaaaaaaaactaatttccttcccaatattaggacttagaaaagctctaggtcccgcaacttgaattttagcctaggggaatcaaaatagtaggagcattactcttgtttcctttttcaaaatcccacacctcatccttcctgcgacgccatgtctaccaacatttgtagtttcaaggacaggtgcgtgtccatcctgtgttgcaaattctgtaaacaagtgctcagctctaggggaatgaaggctgttttgctggctgatactgaaatagaccttttctctacagacatccctcctaccaacgcagtggacttcactggaagatgctatttcaccaaaatctgcaaatgtaaactgaaggacatcgcatgtttaaaatgtgggaacattgtaggttatcatgtgattgttccatgtagttcctgtcttctttcctgcaacaacggacacttctggatgtttcacagccaggcagtttatgatattaacagactagactccacagacttctgcaagatgccaagaggggaacttgggctttttcttttttccaatttgccttttacagagtgatggaaagttaactacgaactcctgcggggaaaagaagagacgatct

SEQ ID NO: 290550 - DNA, 1627 bp, Homo sapiens
gcgctggcaattcaaactgataccgggttggagaggcaggaaaagcggaagagggagcgaaaaccaacgtgttcggtgacagaccccagcgccgactgagcctctaaagcgacttcagctctgccccaccaacaccaccgcgcgcccgggaacagccgctccgggaagaaacctgaggggactgcggggggcacgagggacagctgagggaagggaggacgcgagagaaacagcgcaagcacgctgagggccgggggttgccaggagaggggcccgcggacccgcagagcggaggaaggtccgggagaaaaggggcgggacggaggagaatccgggatcgcctggcagaaaaagagaagggagtttctgaatcctgggaagaggaggcgtgggtagggatgcttagcccgagatccgacagcagggaaccggagcgctccgggggaggggcttaatgctggggaagggatgtcttaaaagaggagaagctttaaattagacgatcggagaaggctgagggaattgctatgaaggggcgggagctgaagtgtagaggactcctttagacagcagaaagggaaagccgttgagaagttcccttcaaactccacctgcctcctctccaattcaaactccactcccttctccaaaagttaaaaggaaagccaagtttgccacgctcccctgttcctactcaataaatacttcttctactccgccaccgggaaaacagaaaaaaaaaactaatttccttcccaatattaggacttagaaaagctctaggtcccgcaacttgaattttagcctaggggaatcaaaatagtaggagcattactcttgtttcctttttcaaaatcccacacctcatccttcctgcgacgccatgtctaccaacatttgtagtttcaaggacaggtgcgtgtccatcctgtgttgcaaattctgtaaacaagtgctcagctctaggggaatgaaggctgttttgctggctgatactgaaatagaccttttctctacagacatccctcctaccaagtaagtcatgctagtggcgggcaacggtagcttttaactaaatgggaacacttatggcttggatctgtgggagtcaacaaggaggttatcatttcggtgtttcagccactcccaccagtttgatgatccccttggaatatatctaagtgggcagactgtctggacaaagtctgtggtttagccaaggtggtcagtcctgatgtaatgcttctagttcaattgcagtcatgcgaccacacatctcttaagtttgatccctggttcagtgccctgcccaaccatcctatttcactgaatcaagtccgtggcgtagactttaggtaaattcaggcaaaattttctgtactgttggagaggagaggtcatttaagtttttcatttttatccatgaaattttgcaccaaaaaaaaaaaatccgttttctatcattatttgcaattggcatcctaaatcagatccgttgttcatcaaattcagttttctttcctcaaaactctctctctctgaaagagatgtaaatagatttttatgggatgaaaaatagagacttagccttaatccttatctccaataaagactattttggacatta

SEQ ID NO: 290551 - DNA, 369 bp, Homo sapiens
ccctggaggacctccgccaactccgcaggaccccgccgggaagtagagcccacccctttaccaatcaccgcccgttttctatcgaccgatggggcccatagccaataggaagagctgatcccgagaggcccggaatgagggggaggagctggcaaaacttggaggtgtgactagcactgccgaggcgtggtcacagattaagctccaccccgggttgttgaacccctaagtagaactgatgggcgggattaaggtggaaccgacgaccaaacacaaactcttgagctgaggcacggccaattgggccggggtagagaggaggggtgttgcggggaattttaaccaataaagagtagagaccggtggaga

SEQ ID NO: 290552 - DNA, 277 bp, Homo sapiens
atggtctatttatataagcaatatgaaaagacttatctggctagttattacatggtatctagtaacatttactttcttttctagtgggaacattgtaggttatcatgtgattgttccatgtagttcctgtcttctttcctgcaacaacggacacttctggatgtttcacagccaggcagtttatgatattaacagactagactccacaggtaagaaacaattgacttggacattcctgtaacatttctctatcaatacctgagtaaaattcccaata

SEQ ID NO: 290553 - DNA, 1386 bp, Homo sapiens
agaggaagagtgatgtggcagctcctggaaacccaggcatctctgggaaagcaagcagtgttatggctcatgtgtcaccttttacccacaggagttgatgatgtggttcccggtatgccaagtaactaggagggaggaggtcagcactggggaggggaaggtaacatcctcagtcaaagttggacctcccagacctgttaggcagagttacaaagaaagacaatgggttggaaggaggatggaaactgaggtgctggccaagaacatagcaagattttggccccccaaaacaagctggaaagtgatgtcacttcctatgtaataataatgtggcttccgtggaaaccttccaacttaacactgcagaatctgaaaagaaatggcaatgagcagaggtctcccaccctcacgtggaggacagggtccgcaaagatgagtcacattgtagaacttcactattcagagaaagacccttcacatgcagaatctcgctggtctctcaggacaatcctgtgaggtaggcagcaccaggggtgttactgccccttacagaagagggaactggcattagtgatgatcagaatgggtcttagatagctctgggatgtgcaggaaggacacttgtatgaagaataaaagaccggccgggcgagtggctcacgcctgtaatcccagcactttgggaggccaagacaggcggatcatgaggtcaggcattcgagaccagcctggccaacatagtgaaaccccatctctactaaaaatacaaaaaattagccgggcgtggttggcgggcgcctgtaatcccagctacttgggaggctgaggcaggagaatcgctttaacccggaaggtggaggttgcagtgagccaagattgtggccactgcactccagcccgggcgacagtgcgagactccatctcaaaaaaaaaaataataaaataaaaataaaagactgcaggccctttctccttccccgtgcccatttctgtagaatcatttattcattaaattcactgaacactttccatgggctgggcactcttaggcattgggaacataggagtacacaggtcctgggcactgtcctccccttgtggctgggtcagtcatccttactctgaatcatgggcccagactggccttgccctactcctctctaggtagagcagtgatctcaggccaactcttgcattttgttccagaaaccttgattatttccctgactattggtcacttcccgaaatgcactgaactgtgccaggaataggatatgtttttaagtgcttgagacacagacaagtggcagacgcatacccaaattccaaccatactttacttctgacctaattttaatatatgtttcatgcagttacacaattatc

SEQ ID NO: 290554 - DNA, 3244 bp, Homo sapiens
  misc_feature (859)..(859): n is a, c, g, or t
cagcctccctctcccacctctgtctgcccgctgcctcttgtctagctgctgtcaggagctgactgcctccagggctggaatcctgtgctccctctgtgcccagagccccacgatgtcggccaacgccacactgaagccactctgccccatcctggagcagatgagccgtctccagagccacagcaacaccagcatccgctacatcgaccacgcggccgtgctgctgcacgggctggcctcgctgctgggcctggtggagaatggagtcatcctcttcgtggtgggctgccgcatgcgccagaccgtggtcaccacctgggtgctgcacctggcgctgtccgacctgttggcctctgcttccctgcccttcttcacctacttcttggccgtgggccactcgtgggagctgggcaccaccttctgcaaactgcactcctccatcttctttctcaacatgttcgccagcggcttcctgctcagcgccatcagcctggaccgctgcctgcaggtggtgcggccggtgtgggcgcagaaccaccgcaccgtggccgcggcgcacaaagtctgcctggtgctttgggcactagcggtgctcaacacggtgccctatttcgtgttccgggacaccatctcgcggctggacgggcgcattatgtgctactacaatgtgctgctcctgaacccggggcctgaccgcgatgccacgtgcaactcgcgccaggcggccctggccgtcagcaagttcctgctggccttcctggtgccgctggcgatcatcgcctcgagccacgcggccgtgagcctgcggttgcagcaccgcggccgccggcggccaggccgcttcgtgcgcctggtggcngccgtcgtggccgccttcgcgctctgctgggggccctaccacgtgttcagcctgctggaggcgcgggcgcacgcaaacccggggctgcggccgctcgtgtggcgcgggctgcccttcgtcaccagcctggccttcttcaacagcgtggccaacccggtgctctacgtgctcacctgccccgacatgctgcgcaagctgcggcgctcgctgcgcacggtgctggagagcgtgctggtggacgacagcgagctgggtggcgcgggaagcagccgccgccgccgcacctcctccaccgcccgctcggcctcccctttagctctctgcagccgcccggaggaaccgcggggccccgcgcgtctcctcggctggctgctgggcagctgcgcagcgtccccgcagacgggccccctgaaccgggcgctgagcagcacctcgagttagaacccggcccacgtagggcggcactcacacgcgaaagtatcaccagggtgccgcggttcaattcgatatccggactcctgccgcagtgatcaaagtccgaggggcgggacccaggcacctgcattttaaagcgccccgggagactctgaatctttttcagaaacagtgagttaaagcagtgcttctcaaaccttgatgtgcctgtgaatcacctaggggtcttgttaagtgcagtctgatccaggaggccggggccgggtactgagagtctgcacttaacaagctcccaggccgagaagccagtgcggcaggttcacaggcgaggcctggagtaacacaaagtgaaactcataatagacttcccactctagggcagtggagtcggaagggcacacggggtgcgtctccccggagttcagttttaccagatgatgggggaggggggaaggagttttatgttaaaccatccatgtatttttggagaagagagaggaaaggtttgagaagcactgttccagcctgccctcttcatttagccaatgcttactgcgctagacgcttcatcccacaatcttaaggggcagcttctattagccagtctttacagctgagcacattctggctcagggaggttaagtgacttgcccagtttcagggctaacgaccacagggtctgcactctaaccctaggcatcacatgctcaatgactctctggtgagcgaggacattctctgacctactcgagggacttaagatgctaccttgtgacccagcactgcccaaagtgcttccaaggcagaagcagcaggggatggcgtggtcaagcactcgggaaacctggggctaatcaaatccaatgggggaaatgactaaaagtcttcggtcgttagaagttgaatgggcacagcaactctaagactacagcacacgtcatttcttagctaagcggaccagcctccctgtcggcctggtgttctgtgggatccctctgggcactggtaatcccaagatctgtgcagccccgcctccaggccacatggggctgggcagctaccatttcccttttgcggatgggaggggtaacttgcacctctgacctatcacttccactgcaccccgtctcattcctccacctgccgtggacttggggtcagagactgctgtgtttgagctctgcagcccagggaccgaaaagttggtgtcaatgaattttgcttggtggatgaaatgtcagtggaagaagcagatgagaaactcttgagatcttggtcctgtgttttttctgccaccaaaggccagggtcactgaaggcctggcccacagcaggtgctgagcaaagggaacagtgaggtgcccagctagctgcagagccaccctgtgttgacacctcgcccctgctccctcccatcccttccccctttactcatagcacttcccccattggacacgtggtgcattttgcttgtttattatgttttctctccatcagaatgaaagctcctcgagggcagggactttggtctattgtctgtatttgccggtgcctaggattgtgcctgtatgcaacaggcactcaataaatatttttgctgtagactggacaggcatgagttagattctctggggcttctgcagagactggtttgggaaagtgggtgctagggaaaagctctgctccctgcaacctccccattttaatctttcagtattgaaaagtggagaggaaccggattcagtttgctggggacagaggcagtggggtgtggagaggcgggaccggggttggggagagtggggctcagcatgcgcgtgcgcaattcgcgcgagcgcagtcaacatgtgattgatgagccagtctttttcctgggattcgcttttgcctttcttgcaaagtttcctggggaaagaagagcgagcaagtagaaaagggaaagtgggaggac

SEQ ID NO: 290555 - DNA, 1170 bp, Homo sapiens
agcgggcgagacgaccagggccggcgagcgcagtgcagcgccgcgcggtgcgggcggccgagtgggggcgtcatggaggatgagcggagcttttcggatatctgcggcggccgcctggcgctgcagcgccgctactactccccgtcctgccgggaattctgcctcagctgccctcggctctcgctgcgttcgctcaccgctgtcacctgcacggtgtggctggcggcctacggactcttcaccctctgcgagaacagcatgatcctctctgctgccatcttcatcaccctcttaggtctgcttggttatctccattttgtgaagattgatcaggagactctgttaatcattgattcccttggcattcagatgacttcatcttatgcttcaggcaaagaaagcactaccttcatagaaatgggcaaggtcaaggatattgtcatcaatgaggccatttacatgcagaaggtgatttactacctctgcatcttattgaaagatccagtggaaccacatgggatatcccaagtagtacccgtcttccagagtgccaagccccggctggactgcttgattgaagtatacaggagctgccaggagatcctggcacaccagaaagccacatcaacaagcccatgagccccagcgttcagaaggccagcattgtcttccatgggagatgactcttaagccataggggctggttttccgtactccaaaccatcaggtggacacagtcctaggaaccattatggatgtagtgcatcttagagccatagagcaggtgactggaaatctaactcagtatatttccgtgtattatagtgttttccttgtaaggttttgcctactttaccaaaggaggggagaccttaagaattttgacacagtatgtcaaaagtaatgtcagcaaagaacactttcggaaattgctaagcatgttcaggtttactttgttgatgtttgtgaagcaaaacaatgggaaactgacatcagatgtcttgagaaagctatattttccaatagtaccccttgtgtaaagttacgaaaaaaacaagcccttcagtactggttagcaggaagaaatgtcctacaaaagacgagtctgtcaacctagtgcctgtgttctgtacagggcttatttatttactgttaataaacagatcttcc

SEQ ID NO: 290556 - DNA, 1527 bp, Homo sapiens
agcgggcgagacgaccagggccggcgagcgcagtgcagcgccgcgcggtgcgggcggccgagtgggggcgtcatggaggatgagcggagcttttcggatatctgcggcggccgcctggcgctgcagcgccgctactactccccgtcctgccgggaattctgcctcagctgccctcggctctcgctgcgttcgctcaccgctgtcacctgcacggtgtggctggcggcctacggactcttcaccctctgcgagaacagcatgatcctctctgctgccatcttcatcaccctcttaggtctgcttggttatctccattttgtgaagattgatcaggagactctgttaatcattgattcccttggcattcagatgacttcatcttatgcttcaggcaaagaaagcactaccttcatagaaatgggcaaggtcaaggatattgtcatcaatgaggccatttacatgcagaaggtgatttactacctctgcatcttattgaaagatccagtggaaccacatgggatatcccaagtagtacccgtcttccagagacagagtctcactttgtcacctaggctggagtgcagtgacaatcaccactcattgcagcctccacctcccgggctcaagaaatcctcctgcctcagcctcctgagaacttgggactacagagtgccaagccccggctggactgcttgattgaagtatacaggagctgccaggagatcctggcacaccagaaagccacatcaacaagcccatgagccccagcgttcagaaggccagcattgtcttccatgggagatgactcttaagccataggggctggttttccgtactccaaaccatcaggtggacacagtcctaggaaccattatggatgtagtgcatcttagagccatagagcaggtgactggaaatctaactcagtatatttccgtgtattatagtgttttccttgtaaggttttgcctactttaccaaaggaggggagaccttaagaattttgacacagtatgtcaaaagtaatgtcagcaaagaacactttcggaaattgctaagcatgttcaggtttactttgttgatgtttgtgaagcaaaacaatgggaaactgacatcagatgtcttgagaaagctatattttccaatagtaccccttgtgtaaagttacgaaaaaaacaagcccttcagtactggttagcaggaagaaatgtcctacaaaagacgagtctgtcaacctagtgcctgtgttctgtacagggcttatttatttactgttaataaacagatcttccaaaacacacagttacctggttcacagatagctgctttttattgacaaacaagatcatagtatttcagtcatggtgtcaagcacattaatacttttctgttactcagcatttttttttatatcagttcaaaagctacttttgccaagaaggatgagacaaaaggccagacagaaattggactttggttttcagacatgggactctcatgttaacaaagaataaataagcaaatatt

SEQ ID NO: 290557 - DNA, 659 bp, Homo sapiens
agcgggcgagacgaccagggccggcgagcgcagtgcagcgccgcgcggtgcgggcggccgagtgggggcgtcatggaggatgagcggagcttttcggatatctgcggcggccgcctggcgctgcagcgccgctactactccccgtcctgccgggaattctgcctcagctgccctcggctctcgctgcgttcgctcaccgctgtcacctgcacggtgtggctggcggcctacggactcttcaccctctgcgagaacagcatgatcctctctgctgccatcttcatcaccctcttaggtctgcttggttatctccattttgtgaagattgatcaggagactctgttaatcattgattcccttggcattcagatgacttcatcttatgcttcaggcaaagaaagcactaccttcatagaaatgggcaaggtcaaggatattgtcatcaatgaggccatttacatggtaagtatttaaaaggtaagtattacaggcctctctggaggaggtagccagcccatgggatgttcccagatttaaactaaaaccataaaagtgagacttatatttaaaaggtaaatctctttatttttaaagagatgcagcaggttttcatggatagggaattagcatttcaactttatcttcaagacggcaagcgg

SEQ ID NO: 290558 - DNA, 752 bp, Homo sapiens
atgagtttcacttagactttgctatttgatttattttcttacagcagaaggtgatttactacctctgcatcttattgaaagatccagtggaaccacatgggatatcccaagtagtacccgtcttccagagtgccaagccccggctggactgcttgattgaagtatacaggagctgccaggagatcctggcacaccagaaagccacatcaacaagcccatgagccccagcgttcagaaggccagcattgtcttccatgggagatgactcttaagccataggggctggttttccgtactccaaaccatcaggtggacacagtcctaggaaccattatggatgtagtgcatcttagagccatagagcaggtgactggaaatctaactcagtatatttccgtgtattatagtgttttccttgtaaggttttgcctactttaccaaaggaggggagaccttaagaattttgacacagtatgtcaaaagtaatgtcagcaaagaacactttcggaaattgctaagcatgttcaggtttactttgttgatgtttgtgaagcaaaacaatgggaaactgacatcagatgtcttgagaaagctatattttccaatagtaccccttgtgtaaagttacgaaaaaaacaagcccttcagtactggttagcaggaagaaatgtcctacaaaagacgagtctgtcaacctagtgcctgtgttctgtacagggcttatttatttactgttaataaacagatcttcc

SEQ ID NO: 290559 - DNA, 1321 bp, Homo sapiens
agcgggcgagacgaccagggccggcgagcgcagtgcagcgccgcgcggtgcgggcggccgagtgggggcgtcatggaggatgagcggagcttttcggatatctgcggcggccgcctggcgctgcagcgccgctactactccccgtcctgccgggaattctgcctcagctgccctcggctctcgctgcgttcgctcaccgctgtcacctgcacggtgtggctggcggcctacggactcttcaccctctgcgagaacagcatgatcctctctgctgccatcttcatcaccctcttaggtctgcttggttatctccattttgtgaagattgatcaggagactctgttaatcattgattcccttggcattcagatgacttcatcttatgcttcaggcaaagaaagcactaccttcatagaaatgggcaaggtcaaggatattgtcatcaatgaggccatttacatgagtgccaagccccggctggactgcttgattgaagtatacaggagctgccaggagatcctggcacaccagaaagccacatcaacaagcccatgagccccagcgttcagaaggccagcattgtcttccatgggagatgactcttaagccataggggctggttttccgtactccaaaccatcaggtggacacagtcctaggaaccattatggatgtagtgcatcttagagccatagagcaggtgactggaaatctaactcagtatatttccgtgtattatagtgttttccttgtaaggttttgcctactttaccaaaggaggggagaccttaagaattttgacacagtatgtcaaaagtaatgtcagcaaagaacactttcggaaattgctaagcatgttcaggtttactttgttgatgtttgtgaagcaaaacaatgggaaactgacatcagatgtcttgagaaagctatattttccaatagtaccccttgtgtaaagttacgaaaaaaacaagcccttcagtactggttagcaggaagaaatgtcctacaaaagacgagtctgtcaacctagtgcctgtgttctgtacagggcttatttatttactgttaataaacagatcttccaaaacacacagttacctggttcacagatagctgctttttattgacaaacaagatcatagtatttcagtcatggtgtcaagcacattaatacttttctgttactcagcatttttttttatatcagttcaaaagctacttttgccaagaaggatgagacaaaaggccagacagaaattggactttggttttcagacatgggactctcatgttaacaaagaataaataagcaaatatt

SEQ ID NO: 290560 - DNA, 333 bp, Homo sapiens
tactactccccgtcctgccgggaattctgcctcagctgccctcggctctcgctgcgttcgctcaccgctgtcacctgcacggtgtggctggcggcctacggactcttcaccctctgcgaggtaatggcaagtcggcccctccccgcgctcgaaggagggggttcggctttgggagggtctttggggtctttggtcgagcccggacctctggtcggcccctcctacagtgataggacaggagggcgggaactcacgggttctggggacgatattccgctgctggacagctctttaaatgacgtttagtgaaatgtgtgctcctggatagtacat

SEQ ID NO: 290561 - DNA, 1405 bp, Homo sapiens
agcgggcgagacgaccagggccggcgagcgcagtgcagcgccgcgcggtgcgggcggccgagtgggggcgtcatggaggatgagcggagcttttcggatatctgcggcggccgcctggcgctgcagcgccgctactactccccgtcctgccgggaattctgcctcagctgccctcggctctcgctgcgttcgctcaccgctgtcacctgcacggtgtggctggcggcctacggactcttcaccctctgcgagaacagcatgatcctctctgctgccatcttcatcaccctcttaggtctgcttggttatctccattttgtgaagattgatcaggagactctgttaatcattgattcccttggcattcagatgacttcatcttatgcttcaggcaaagaaagcactaccttcatagaaatgggcaaggtcaaggatattgtcatcaatgaggccatttacatgcagaaggtgatttactacctctgcatcttattgaaagatccagtggaaccacatgggatatcccaagtagtacccgtcttccagagtgccaagccccggctggactgcttgattgaagtatacaggagctgccaggagatcctggcacaccagaaagccacatcaacaagcccatgagccccagcgttcagaaggccagcattgtcttccatgggagatgactcttaagccataggggctggttttccgtactccaaaccatcaggtggacacagtcctaggaaccattatggatgtagtgcatcttagagccatagagcaggtgactggaaatctaactcagtatatttccgtgtattatagtgttttccttgtaaggttttgcctactttaccaaaggaggggagaccttaagaattttgacacagtatgtcaaaagtaatgtcagcaaagaacactttcggaaattgctaagcatgttcaggtttactttgttgatgtttgtgaagcaaaacaatgggaaactgacatcagatgtcttgagaaagctatattttccaatagtaccccttgtgtaaagttacgaaaaaaacaagcccttcagtactggttagcaggaagaaatgtcctacaaaagacgagtctgtcaacctagtgcctgtgttctgtacagggcttatttatttactgttaataaacagatcttccaaaacacacagttacctggttcacagatagctgctttttattgacaaacaagatcatagtatttcagtcatggtgtcaagcacattaatacttttctgttactcagcatttttttttatatcagttcaaaagctacttttgccaagaaggatgagacaaaaggccagacagaaattggactttggttttcagacatgggactctcatgttaacaaagaataaataagcaaatatt

SEQ ID NO: 290562 - DNA, 867 bp, Homo sapiens
agcgggcgagacgaccagggccggcgagcgcagtgcagcgccgcgcggtgcgggcggccgagtgggggcgtcatggaggatgagcggagcttttcggatatctgcggcggccgcctggcgctgcagcgccgctactactccccgtcctgccgggaattctgcctcagctgccctcggctctcgctgcgttcgctcaccgctgtcacctgcacggtgtggctggcggcctacggactcttcaccctctgcgagaacagcatgatcctctctgctgccatcttcatcaccctcttaggtctgcttggttatctccattttgtgaagattgatcaggagactctgttaatcattgattcccttggcattcagatgacttcatcttatgcttcaggcaaagaaagcactaccttcatagaaatgggcaaggtcaaggatattgtcatcaatgaggccatttacatgcagaaggtgatttactacctctgcatcttattgaaagatccagtggaaccacatgggatatcccaagtagtacccgtcttccaggctgcatggtgcattcattctaagctggcaacccgaccctcctgcttcctgaacagaaccttacctgggccatcagggcagccatctcaagagccaattccttgttgataggaaacctccctgccactatctctctactggtttgagaggcaaggagcagccgttctcggtccgtctcccctttgacttgactgcgaaagtacagcctacaaagaagagaataagaaaccaggactcagcagggattccaaacagggatggggctttctctgggtctgttacctttatttccaaaaagataaagtactcttttcccactat

SEQ ID NO: 290563 - DNA, 1476 bp, Homo sapiens
tgcggccgccgcagatatccgaaaagctttgctcatcctccatgacgcccccactcggccgcccgcaccgcgcggcgccgctactactccccgtcctgccgggaattctgcctcagctgccctcggctctcgctgcgttcgctcaccgctgtcacctgcacggtgtggctggcggcctacggactcttcaccctctgcgagaacagcatgatcctctctgctgccatcttcatcaccctcttaggtctgcttggttatctccattttgtgaagattgatcaggagactctgttaatcattgattcccttggcattcagatgacttcatcttatgcttcaggcaaagaaagcactaccttcatagaaatgggcaaggtcaaggatattgtcatcaatgaggccatttacatgcagaaggtgatttactacctctgcatcttattgaaagatccagtggaaccacatgggatatcccaagtagtacccgtcttccagagacagagtctcactttgtcacctaggctggagtgcagtgacaatcaccactcattgcagcctccacctcccgggctcaagaaatcctcctgcctcagcctcctgagaacttgggactacagagtgccaagccccggctggactgcttgattgaagtatacaggagctgccaggagatcctggcacaccagaaagccacatcaacaagcccatgagccccagcgttcagaaggccagcattgtcttccatgggagatgactcttaagccataggggctggttttccgtactccaaaccatcaggtggacacagtcctaggaaccattatggatgtagtgcatcttagagccatagagcaggtgactggaaatctaactcagtatatttccgtgtattatagtgttttccttgtaaggttttgcctactttaccaaaggaggggagaccttaagaattttgacacagtatgtcaaaagtaatgtcagcaaagaacactttcggaaattgctaagcatgttcaggtttactttgttgatgtttgtgaagcaaaacaatgggaaactgacatcagatgtcttgagaaagctatattttccaatagtaccccttgtgtaaagttacgaaaaaaacaagcccttcagtactggttagcaggaagaaatgtcctacaaaagacgagtctgtcaacctagtgcctgtgttctgtacagggcttatttatttactgttaataaacagatcttccaaaacacacagttacctggttcacagatagctgctttttattgacaaacaagatcatagtatttcagtcatggtgtcaagcacattaatacttttctgttactcagcatttttttttatatcagttcaaaagctacttttgccaagaaggatgagacaaaaggccagacagaaattggactttggttttcagacatgggactctcatgttaacaaagaataaataagcaaatatt

SEQ ID NO: 290564 - DNA, 824 bp, Homo sapiens
tgttagattaaaaccgttaaacagtgtacggcgaatcggagagatctcttatctcagcagaagcctacttctgaatggcagtcagatatgcatcaatgaggcttacatgccagaaccagaaggtgatttactacctctgcatcttattgaaagatccagtggaaccacatgggatatcccaagtagtacccgtcttccagagtgccaagccccggctggactgcttgattgaagtatacaggagctgccaggagatcctggcacaccagaaagccacatcaacaagcccatgagccccagcgttcagaaggccagcattgtcttccatgggagatgactcttaagccataggggctggttttccgtactccaaaccatcaggtggacacagtcctaggaaccattatggatgtagtgcatcttagagccatagagcaggtgactggaaatctaactcagtatatttccgtgtattatagtgttttccttgtaaggttttgcctactttaccaaaggaggggagaccttaagaattttgacacagtatgtcaaaagtaatgtcagcaaagaacactttcggaaattgctaagcatgttcaggtttactttgttgatgtttgtgaagcaaaacaatgggaaactgacatcagatgtcttgagaaagctatattttccaatagtaccccttgtgtaaagttacgaaaaaaacaagcccttcagtactggttagcaggaagaaatgtcctacaaaagacgagtctgtcaacctagtgcctgtgttctgtacagggcttatttatttactgttaataaacagatcttcc

SEQ ID NO: 290565 - DNA, 4515 bp, Homo sapiens
  misc_feature (449)..(450): n is a, c, g, or t
  misc_feature (1273)..(1274): n is a, c, g, or t
  misc_feature (1294)..(1295): n is a, c, g, or t
gtgcccctgacaggcttttaaaaggcccggatgccaatgcacattccaacactatccacaaaaaggagactgagcagtgctcttccctgcattgggcaaggagactctccctccctgcctaaccacttgcctgccctgttttgtgggagaattacaagtaaatgctacagaggcagtggagaaaaaagggtgttttaattcctctccagagtttcctttatttgatgtatgttgcatcctttaaacaagttgtgcaaaatggctgcagggtagattggctctcccttttaaagctctccatccggctgggtttatttgtaaatactgcatctatccttcttagtgttttaggactggctggaaagactcttcttcctgtaggttgggtcagtgtgagagatctaaaaaatcattttcccttaaaattactgtattttaataaaaggatnnggcaggggctggaatgagagaaaactggtccttcaaaatgtaaaactgtcatacttaaaccagtttacaaaatatgcgtttaattatgtggtgggatgtgtgtaggtgtatgatgagagaggcaaccaacatggctatttggggtgcaaggatgtgggaacaggcaagtaattttcacattggactttcatcctagggagctgggttctagtcacagctctgagctgtgtgaccttgggtaggtctcatctccccggggttttgtttcaccagttgaacagtatgaggatgagtcacagctaacatttgttccatgatatttacccagcaccatacaagtgttatttctgtcctcccagttaacactgacgtgggtagtattatatgcccattttacagatgaggaaactgaagcctgaagaagttaaatacttatcccagaacacacagctggtaagtggcagacctggaattggaatctagttcagtttgattccccaacccatgctcttgaccactatactgttttttcaagtccagatctgaaatctcattttctgtgtggctgtgtgtttgggacaggggtaaccaattcctgactactctatatgctgcatagaacctggagaggatttttcaaagtaaatgaatctcgaaagctggattgcagagcaaacgagtgcagtcaattcagccaggggcttgcaagagggagaaagagaaaaagactgtggaatggaaagtttcccaacccaagcctttcccaaggggtagccattctctgttctacagtttagggcttgcatgtgctttttctggagtnnaaaaatacataagttataannaatttaacagacagaaaggcgcacagaggaatttaaagtgtgggctggggggcgaggcggtgggcgggaggcgagcgggcgcaggcggaacaccgttttccaagctaagccgccgcaaataaaaaggcgtaaagggagagaagttggtgctcaacgtgagccaggagcagcgtcccggctcctcccctgctcattttaaaagcacttcttcttgtattgtttttaaggtgagaaataggaaagaaaacgccggcttgtgcgctcgctgcctgcctctctggctgtctgcttttgcagggctgctgggagtttttaagctctgtgagaatcctgggagttggtgatgtcagactagttgggtcatttgaaggttagcagcccgggtagggttcaccgaaagttcactcgcatatattaggcaattcaatctttcattctgtgtgacagaagtagtaggaagtgagctgttcagaggcaggagggtctattctttgccaaaggggggaccagaattcccccatgcgagctgtttgaggactgggatgccgagaacgcgagcgatccgagcagggtttgtctgggcaccgtcggggtaggatccggaacgcattcggaaggctttttgcaagcatttacttggaaggagaacttgggatctttctgggaaccccccgccccggctggattggccgagcaagcctggaaaatgcaattgaaacacagagcaccagctctgaggaactcgtcccaagccccccatctccacttcctccccctcgagtgtacaaaccctgcttcgtctgccaggacaaatcatcagggtaccactatggggtcagcgcctgtgagggatgtaagggctttttccgcagaagtattcagaagaatatgatttacacttgtcaccgagataagaactgtgttattaataaagtcaccaggaatcgatgccaatactgtcgactccagaagtgctttgaagtgggaatgtccaaagaatctgtcaggaatgacaggaacaagaaaaagaaggagacttcgaagcaagaatgcacagagagctatgaaatgacagctgagttggacgatctcacagagaagatccgaaaagctcaccaggaaactttcccttcactctgccagctgggtaaatacaccacgaattccagtgctgaccatcgagtccgactggacctgggcctctgggacaaattcagtgaactggccaccaagtgcattattaagatcgtggagtttgctaaacgtctgcctggtttcactggcttgaccatcgcagaccaaattaccctgctgaaggccgcctgcctggacatcctgattcttagaatttgcaccaggtataccccagaacaagacaccatgactttctcagacggccttaccctaaatcgaactcagatgcacaatgctggatttggtcctctgactgaccttgtgttcacctttgccaaccagctcctgcctttggaaatggatgacacagaaacaggccttctcagtgccatctgcttaatctgtggagaccgccaggaccttgaggaaccgacaaaagtagataagctacaagaaccattgctggaagcactaaaaatttatatcagaaaaagacgacccagcaagcctcacatgtttccaaagatcttaatgaaaatcacagatctccgtagcatcagtgctaaaggtgcagagcgtgtaattaccttgaaaatggaaattcctggatcaatgccacctctcattcaagaaatgctggagaattctgaaggacatgaacccttgaccccaagttcaagtgggaacacagcagagcacagtcctagcatctcacccagctcagtggaaaacagtggggtcagtcagtcaccactcgtgcaataagacattttctagctacttcaaacattccccagtaccttcagttccaggatttaaaatgcaagaaaaaacatttttactgctgcttagtttttggactgaaaagatattaaaactcaagaaggaccaagaagttttcatatgtatcaatatatatactcctcactgtgtaacttacctagaaatacaaacttttccaattttaaaaaatcagccatttcatgcaaccagaaactagttaaaagcttctattttcctctttgaacactcaagattgcatggcaaagacccagtcaaaatgatttacccctggttaagtttctgaagactttgtacatacagaagtatggctctgttctttctatactgtatgtttggtgctttccttttgtcttgcatactcaaaataaccatgacaccaaggttatgaaatagactactgtacacgtctacctaggttcaaaaagataactgtcttgctttcatggaatagtcaagacatcaaggtaaggaaacaggactattgacaggactattgtacagtatgacaagataaggctgaagatattctactttagttagtatggaagcttgtctttgctctttctgatgctctcaaactgcatcttttatttcatgttgcccagtaaaagtatacaaattccctgcactagcagaagagaattctgtatcagtgtaactgccagttcagttaatcaaatgtcatttgttcaattgttaatgtcactttaaattaaaagtggtttattacttgtttaatgacataactacacagttagttaaaaaaaatttttttacagtaatgatagcctccaaggcagaaacacttttcagtgttaagtttttgtttacttgttcacaagccattagggaaatttcatgggataattagcaggctggtctaccacctggaccatgtaactctagtgtccttcctgattcatgcctgatattgggatttttttttccagccttcttgatgccaaggggctaattaatattaacaactcccaaagaaacaggcatagaatctgcctcctttgaccttgttcaatcactatgaagcagagtgaaagctgtggtagagtggttaacagatacaagtgtcagtttcttagttctcatttaagcactagtggaattttttttttttgatatattagcaagtctgtgatgtactttcactggctctgtttgtacattgagattgtttgtttaacaatgctttctatgttcatatactgtttacctttttccatggagtctcctggcaaagaataaaatatatttattttaaaaaaat

SEQ ID NO: 290566 - DNA, 4872 bp, Homo sapiens
  misc_feature (449)..(450): n is a, c, g, or t
  misc_feature (1273)..(1274): n is a, c, g, or t
  misc_feature (1294)..(1295): n is a, c, g, or t
gtgcccctgacaggcttttaaaaggcccggatgccaatgcacattccaacactatccacaaaaaggagactgagcagtgctcttccctgcattgggcaaggagactctccctccctgcctaaccacttgcctgccctgttttgtgggagaattacaagtaaatgctacagaggcagtggagaaaaaagggtgttttaattcctctccagagtttcctttatttgatgtatgttgcatcctttaaacaagttgtgcaaaatggctgcagggtagattggctctcccttttaaagctctccatccggctgggtttatttgtaaatactgcatctatccttcttagtgttttaggactggctggaaagactcttcttcctgtaggttgggtcagtgtgagagatctaaaaaatcattttcccttaaaattactgtattttaataaaaggatnnggcaggggctggaatgagagaaaactggtccttcaaaatgtaaaactgtcatacttaaaccagtttacaaaatatgcgtttaattatgtggtgggatgtgtgtaggtgtatgatgagagaggcaaccaacatggctatttggggtgcaaggatgtgggaacaggcaagtaattttcacattggactttcatcctagggagctgggttctagtcacagctctgagctgtgtgaccttgggtaggtctcatctccccggggttttgtttcaccagttgaacagtatgaggatgagtcacagctaacatttgttccatgatatttacccagcaccatacaagtgttatttctgtcctcccagttaacactgacgtgggtagtattatatgcccattttacagatgaggaaactgaagcctgaagaagttaaatacttatcccagaacacacagctggtaagtggcagacctggaattggaatctagttcagtttgattccccaacccatgctcttgaccactatactgttttttcaagtccagatctgaaatctcattttctgtgtggctgtgtgtttgggacaggggtaaccaattcctgactactctatatgctgcatagaacctggagaggatttttcaaagtaaatgaatctcgaaagctggattgcagagcaaacgagtgcagtcaattcagccaggggcttgcaagagggagaaagagaaaaagactgtggaatggaaagtttcccaacccaagcctttcccaaggggtagccattctctgttctacagtttagggcttgcatgtgctttttctggagtnnaaaaatacataagttataannaatttaacagacagaaaggcgcacagaggaatttaaagtgtgggctggggggcgaggcggtgggcgggaggcgagcgggcgcaggcggaacaccgttttccaagctaagccgccgcaaataaaaaggcgtaaagggagagaagttggtgctcaacgtgagccaggagcagcgtcccggctcctcccctgctcattttaaaagcacttcttcttgtattgtttttaaggtgagaaataggaaagaaaacgccggcttgtgcgctcgctgcctgcctctctggctgtctgcttttgcagggctgctgggagtttttaagctctgtgagaatcctgggagttggtgatgtcagactagttgggtcatttgaaggttagcagcccgggtagggttcaccgaaagttcactcgcatatattaggcaattcaatctttcattctgtgtgacagaagtagtaggaagtgagctgttcagaggcaggagggtctattctttgccaaaggggggaccagaattcccccatgcgagctgtttgaggactgggatgccgagaacgcgagcgatccgagcagggtttgtctgggcaccgtcggggtaggatccggaacgcattcggaaggctttttgcaagcatttacttggaaggagaacttgggatctttctgggaaccccccgccccggctggattggccgagcaagcctggaaaatggtaaatgatcatttggatcaattacaggcttttagctggcttgtctgtcataattcatgattcggggctgggaaaaagaccaacagcctacgtgccaaaaaaggggcagagtttgatggagttgggtggacttttctatgccatttgcctccacacctagaggataagcacttttgcagacattcagtgcaagggagatcatgtttgactgtatggatgttctgtcagtgagtcctgggcaaatcctggatttctacactgcgagtccgtcttcctgcatgctccaggagaaagctctcaaagcatgcttcagtggattgacccaaaccgaatggcagcatcggcacactgctcaatcaattgaaacacagagcaccagctctgaggaactcgtcccaagccccccatctccacttcctccccctcgagtgtacaaaccctgcttcgtctgccaggacaaatcatcagggtaccactatggggtcagcgcctgtgagggatgtaagggctttttccgcagaagtattcagaagaatatgatttacacttgtcaccgagataagaactgtgttattaataaagtcaccaggaatcgatgccaatactgtcgactccagaagtgctttgaagtgggaatgtccaaagaatctgtcaggaatgacaggaacaagaaaaagaaggagacttcgaagcaagaatgcacagagagctatgaaatgacagctgagttggacgatctcacagagaagatccgaaaagctcaccaggaaactttcccttcactctgccagctgggtaaatacaccacgaattccagtgctgaccatcgagtccgactggacctgggcctctgggacaaattcagtgaactggccaccaagtgcattattaagatcgtggagtttgctaaacgtctgcctggtttcactggcttgaccatcgcagaccaaattaccctgctgaaggccgcctgcctggacatcctgattcttagaatttgcaccaggtataccccagaacaagacaccatgactttctcagacggccttaccctaaatcgaactcagatgcacaatgctggatttggtcctctgactgaccttgtgttcacctttgccaaccagctcctgcctttggaaatggatgacacagaaacaggccttctcagtgccatctgcttaatctgtggagaccgccaggaccttgaggaaccgacaaaagtagataagctacaagaaccattgctggaagcactaaaaatttatatcagaaaaagacgacccagcaagcctcacatgtttccaaagatcttaatgaaaatcacagatctccgtagcatcagtgctaaaggtgcagagcgtgtaattaccttgaaaatggaaattcctggatcaatgccacctctcattcaagaaatgctggagaattctgaaggacatgaacccttgaccccaagttcaagtgggaacacagcagagcacagtcctagcatctcacccagctcagtggaaaacagtggggtcagtcagtcaccactcgtgcaataagacattttctagctacttcaaacattccccagtaccttcagttccaggatttaaaatgcaagaaaaaacatttttactgctgcttagtttttggactgaaaagatattaaaactcaagaaggaccaagaagttttcatatgtatcaatatatatactcctcactgtgtaacttacctagaaatacaaacttttccaattttaaaaaatcagccatttcatgcaaccagaaactagttaaaagcttctattttcctctttgaacactcaagattgcatggcaaagacccagtcaaaatgatttacccctggttaagtttctgaagactttgtacatacagaagtatggctctgttctttctatactgtatgtttggtgctttccttttgtcttgcatactcaaaataaccatgacaccaaggttatgaaatagactactgtacacgtctacctaggttcaaaaagataactgtcttgctttcatggaatagtcaagacatcaaggtaaggaaacaggactattgacaggactattgtacagtatgacaagataaggctgaagatattctactttagttagtatggaagcttgtctttgctctttctgatgctctcaaactgcatcttttatttcatgttgcccagtaaaagtatacaaattccctgcactagcagaagagaattctgtatcagtgtaactgccagttcagttaatcaaatgtcatttgttcaattgttaatgtcactttaaattaaaagtggtttattacttgtttaatgacataactacacagttagttaaaaaaaatttttttacagtaatgatagcctccaaggcagaaacacttttcagtgttaagtttttgtttacttgttcacaagccattagggaaatttcatgggataattagcaggctggtctaccacctggaccatgtaactctagtgtccttcctgattcatgcctgatattgggatttttttttccagccttcttgatgccaaggggctaattaatattaacaactcccaaagaaacaggcatagaatctgcctcctttgaccttgttcaatcactatgaagcagagtgaaagctgtggtagagtggttaacagatacaagtgtcagtttcttagttctcatttaagcactagtggaattttttttttttgatatattagcaagtctgtgatgtactttcactggctctgtttgtacattgagattgtttgtttaacaatgctttctatgttcatatactgtttacctttttccatggagtctcctggcaaagaataaaatatatttattttaaaaaaat

SEQ ID NO: 290567 - DNA, 321 bp, Homo sapiens
catagagctgtgaaaacctctttatttgttgtagatttttaacactaatataaattttctttttggattttctagagagaacaaggataaagaagtatccaaatacaaagaaaatgttatgcaagtgacctttagagatgttttaaagatgacaaaatattgatgaagatgggccaacaagtgttactgttacctctaataaagtttcatcactagtttcaccatggttaattggaaatggcttccgcccatctgtggaaaacagacaaacaattgaatgcttagctgtttttacaggataatgtgctttcaacttccatt

SEQ ID NO: 290568 - DNA, 549 bp, Homo sapiens
gcggccgcccggcccgcttgacataccagaaatagctgcacacaattgtacctttcccggccaagaaacctcccccgctggggagcgcggcccgccgccctcacctgagccccggccagctgagcccgctacccgctctcccgccgcgatccggcccagccgccagctaaagaagtcactttcaagagatctggagaagtaagatggccaaataaaagcctctaccaatcatcctccccacaggaacaccaaatttaagaactatctacacaaaaaagcaccttcataagaaccaaaaatcagagagaacaaggataaagaagtatccaaatacaaagaaaatgttatgcaagtgacctttagagatgttttaaagatgacaaaatattgatgaagatgggccaacaagtgttactgttacctctaataaagtttcatcactagtttcaccatggttaattggaaatggcttccgcccatctgtggaaaacagacaaacaattgaatgcttagctgtttttacaggataatgtgctttcaacttccatt

SEQ ID NO: 290569 - DNA, 593 bp, Homo sapiens
gcggccgcccggcccgcttgacataccagaaatagctgcacacaattgtacctttcccggccaagaaacctcccccgctggggagcgcggcccgccgccctcacctgagccccggccagctgagcccgctacccgctctcccgccgcgatccggcccagccgccaggcatattctaccagtgcaagagatcaacaatgattacaaaattgctaaagaagtcactttcaagagatctggagaagtaagatggccaaataaaagcctctaccaatcatcctccccacaggaacaccaaatttaagaactatctacacaaaaaagcaccttcataagaaccaaaaatcagagagaacaaggataaagaagtatccaaatacaaagaaaatgttatgcaagtgacctttagagatgttttaaagatgacaaaatattgatgaagatgggccaacaagtgttactgttacctctaataaagtttcatcactagtttcaccatggttaattggaaatggcttccgcccatctgtggaaaacagacaaacaattgaatgcttagctgtttttacaggataatgtgctttcaacttccatt

SEQ ID NO: 290570 - DNA, 412 bp, Homo sapiens
gcggccgcccggcccgcttgacataccagaaatagctgcacacaattgtacctttcccggccaagaaacctcccccgctggggagcgcggcccgccgccctcacctgagccccggccagctgagcccgctacccgctctcccgccgcgatccggcccagccgccagagagaacaaggataaagaagtatccaaatacaaagaaaatgttatgcaagtgacctttagagatgttttaaagatgacaaaatattgatgaagatgggccaacaagtgttactgttacctctaataaagtttcatcactagtttcaccatggttaattggaaatggcttccgcccatctgtggaaaacagacaaacaattgaatgcttagctgtttttacaggataatgtgctttcaacttccatt

SEQ ID NO: 290571 - DNA, 940 bp, Homo sapiens
gcggccgcccggcccgcttgacataccagaaatagctgcacacaattgtacctttcccggccaagaaacctcccccgctggggagcgcggcccgccgccctcactgagcccgctacccgctctcccgccgcgatccggcccagccgccaggtgagcgccgtcccctcccacgctccccgccccctgcggcggccgggccctcccggcggcagaggagggtcgtggccttggcacgtgctgccgcttccccccggcggagttcggccccgctccgcccggcttccaggtgggtgcggtggaaggagggtccctgcccctccaccccggctcgcggctgagggttcgagcaagctggagggttccttgcattccccacttcccgcccgctcagcccagtttaggccgtttgatgatcgccctcgcggtgagcgtcaaaattcccacccttcgtggtttgaggacactcaggggacagcgaggtggcaggttatgcggtatccgccgcggccctgggcatattctaccagtgcaagagatcaacaatgattacaaaattgctaaagaagtcactttcaagagatctggagaagtaagatggccaaataaaagcctctaccaatcatcctccccacaggaacaccaaatttaagaactatctacacaaaaaagcaccttcataagaaccaaaaatcagagagaacaaggataaagaagtatccaaatacaaagaaaatgttatgcaagtgacctttagagatgttttaaagatgacaaaatattgatgaagatgggccaacaagtgttactgttacctctaataaagtttcatcactagtttcaccatggttaattggaaatggcttccgcccatctgtggaaaacagacaaacaattgaatgcttagctgtttttacaggataatgtgctttcaacttccatt

SEQ ID NO: 290572 - DNA, 1515 bp, Homo sapiens
agcgggagggtgcccggttcatccaaggcgcaagatggcgctgctttttgcacgttctttgcgcttgtgccgctggggagccaaacgattgggagttgcctccacagaggcccagagaggcgtcagtttcaaactggaagaaaaaaccgcccacagcagcctggcactcttcagagatgatacgggtgtcaaatatggcttggtgggattggagcccaccaaggtggccttgaatgtggagcgcttccgggagtgggcagtggtgctggcagacacagcggtcaccagtggcagacactactgggaagtgacagtgaagcgctcccagcagttccggataggagtggcagatgtggacatgtcccgggatagctgcattggtgttgatgatcgttcctgggtgttcacctatgcccagcgcaagtggtacaccatgttggccaacgagaaagccccagttgagggtattgggcagccagagaaggtggggctgttgctggagtatgaggcccagaagctgagcctggtggatgtgagccaggtctctgtggttcacacgctacagacagatttccggggtccagtggtgcctgcctttgctctctgggatggggagctgctgacccattcagggcttgaggtgcccgagggcctctagtatgtccattactggagtccctaatcacgcctttggccagcctccttttgaaagtgtccgaagcctttttactttgcctcaagcaacctctagctcccacaattcagtgttgggtcctctgtgcaatatcatgatcatcttcctcatcccctaccttgtgaaagctaggcatacagccaaaccctccttttccccacccaccaacactactgccaatttcctaggctaccatgggtgtatcttccttgacctgcttccttcagtccctctgcctccctttgcccaggcctttctcagactgtattccatcctggggtcttatcattcagctttgtttgaatttattaatcaccatgatacctctccctccctttgtccacatgtaacttgttcttggggctctaccagatggctgaagagtaaatcctttctacctctggctgaaggagtggtgcagtcaatgacttggccctttttctacagcacatttagagtttgggctctggctccctcagtaagtgctttattaactcagtgtgtcaaaatgaaaacagagccctccttccccagtagctcagtgccacagaccttcagccccacacagctgtagctatccttaccctgagtccatctaccttaaatctgtacctctgacacccagccagtctgtcataatcattatcccagttataaccttgaccaaaggggaagagagacacttgggggatatctaggggatgagtgctagaaactatttatttatttttgagacagagtctcactctgtcacccaggctggagtgcagtggcatgatcttggctcactgcaaactctgccttttgggttcaagcgactc

SEQ ID NO: 290573 - DNA, 1102 bp, Homo sapiens
agcgggagggtgcccggttcatccaaggcgcaagatggcgctgctttttgcacgttctttgcgcttgtgccgctggggagccaaacgattgggagttgcctccacagaggcccagagaggcgtcagtttcaaactggaagaaaaaaccgcccacagcagcctggcactcttcagagatgatacgggtgtcaaatatggcttggtgggattggagcccaccaaggtggccttgaatgtggagcgcttccgggagtgggcagtggtgctggcagacacagcggtcaccagtggcagacactactgggaagtgacagtgaagcgctcccagcagttccggataggagtggcagatgtggacatgtcccgggatagctgcattggtgttgatgatcgttcctgggtgttcacctatgcccagcgcaagtggtacaccatgttggccaacgagaaagccccagttgagggtattgggcagccagagaaggtggggctgttgctggagtatgaggcccagaagctgagcctggtggatgtgagccaggtctctgtggttcacacgctacagacagatttccggggtccagtggtgcctgcctttgctctctgggatggggagctgctgacccattcagggcttgaggtgcccgagggcctctagtatgtccattactggagtccctaatcacgcctttggccagcctccttttgaaagtgtccgaagcctttttactttgcctcaagcaacctctagctcccacaattcagtgttgggtcctctgtgcaatatcatgatcatcttcctcatcccctaccttgtgaaagctaggcatacagccaaaccctccttttccccacccaccaacactactgccaatttcctaggctaccatgggtgtatcttccttgacctgcttccttcagtccctctgcctccctttgcccaggcctttctcagactgtattccatcctggggtcttatcattcagctttgtttgaatttattaatcaccatgatacctctccctccctttgtccacatgtaacttgttcttggggctctaccagatggctgaagagtaaatcctttctacctctggctga

SEQ ID NO: 290574 - DNA, 1051 bp, Homo sapiens
agcgggagggtgcccggttcatccaaggcgcaagatggcgctgctttttgcacgttctttgcgcttgtgccgctggggagccaaacgattgggagttgcctccacagaggcccagagaggcgtcagtttcaaactggaagaaaaaaccgcccacagcagcctggcactcttcagagatgatacgggtgtcaaatatggcttggtgggattggagcccaccaaggtggccttgaatgtggagcgcttccgggagtgggcagtggtgctggcagacacagcggtcaccagtggcagacactactgggaagtgacagtgaagcgctcccagcagttccggataggagtggcagatgtggacatgtcccgggatagctgcattggtgttgatgatcgttcctgggtgttcacctatgcccagcgcaagtggtacaccatgttggccaacgagaaagccccagttgagggtattgggcagccagagaaggtggggctgttgctggagtatgaggcccagaagctgagcctggtggatgtgagccaggtctctgtggttcacacgctacagacagatttccggggtccagtggtgcctgcctttgctctctgggatggggagctgctgacccattcagggcttgaggtgcccgagggcctctagtatgtccattactggagtccctaatcacgcctttggccagcctccttttgaaagtgtccgaagcctttttactttgcctcaagcaacctctagctcccacaattcagtgttgggtcctctgtgcaatatcatgatcatcttcctcatcccctaccttgtgaaagctaggcatacagccaaaccctccttttccccacccaccaacactactgccaatttcctaggctaccatgggtgtatcttccttgacctgcttccttcagtccctctgcctccctttgcccaggcctttctcagactgtattccatcctggggtcttatcattcagctttgtttgaatttattaatcaccatgatacctctcccgtacaggggaaactctagatcacctc

SEQ ID NO: 290575 - DNA, 1126 bp, Homo sapiens
agcgggagggtgcccggttcatccaaggcgcaagatggcgctgctttttgcacgttctttgcgcttgtgccgctggggagccaaacgattgggagttgcctccacagaggcccagagaggcgtcagtttcaaactggaagaaaaaaccgcccacagcagcctggcactcttcagagatgatacgggtgtcaaatatggcttggtgggattggagcccaccaaggtggccttgaatgtggagcgcttccgggagtgggcagtggtgctggcagacacagcggtcaccagtggcagacactactgggaagtgacagtgaagcgctcccagcagttccggataggagtggcagatgtggacatgtcccgggatagctgcattggtgttgatgatcgttcctgggtgttcacctatgcccagcgcaagtggtacaccatgttggccaacgagaaacctccttttccccacccaccaacactactgccaatttcctaggctaccatgggtgtatcttccttgacctgcttccttcagtccctctgcctccctttgcccaggcctttctcagactgtattccatcctggggtcttatcattcagctttgtttgaatttattaatcaccatgatacctctccctccctttgtccacatgtaacttgttcttggggctctaccagatggctgaagagtaaatcctttctacctctggctgaaggagtggtgcagtcaatgacttggccctttttctacagcacatttagagtttgggctctggctccctcagtaagtgctttattaactcagtgtgtcaaaatgaaaacagagccctccttccccagtagctcagtgccacagaccttcagccccacacagctgtagctatccttaccctgagtccatctaccttaaatctgtacctctgacacccagccagtctgtcataatcattatcccagttataaccttgaccaaaggggaagagagacacttgggggatatctaggggatgagtgctagaaactatttatttatttttgagacagagtctcactctgtcacccaggctggagtgcagtggcatgatcttggctcactgcaaactctgccttttgggttcaagcgactc

SEQ ID NO: 290576 - DNA, 698 bp, Homo sapiens
tgcagcagatggaagcgagctgatttatatactatagcactgttttaaatcgggtctatgtgccccatcgctcaatgacctggagcgggactccctgaaaggtcacgggccaaatgaaaaagacggaagggctgttgttcgttccccctttaaacacagtactgtaattctccttcagctctccgagttctacaaacatttagaggcttccctctgtgcagccggccgggactggcctccgcacacctcaccctgcagcgcgtcccagggacagagcctagtgagggcgcaggagaaaagggcctgcagaaggcagggagcaggcgtttctattgcactctctcaaaccgagccggaacactttatttcatacatctccggtttctctgtttttccagacccgaaagacttcctggcctcccacgctcacgggccgagcgccgggggcgcgcccagcctgctactcttgctgccctgcgcactcctgcaccgcctcctgcgcccggatgcgcccgcgcaccctcggtccctggtcccttccgtcctccagcgggagcggcgcccctgcggaaggccgggacttgggcatcgcctttaattttctatgttgtaaataatagatgtgtttagtttaccgtaagctgaagcactgggtgaatatttttattgggtaataaatattttcatgaaagcgcatt

SEQ ID NO: 290577 - DNA, 271 bp, Homo sapiens
ccaaaattgatctggagcctccatgtcagaccgatgtttaaggtcagtgtggaattacaaatcttcaaattgggaaacagctatcaaagagagaaacataacggcggtagagaggaagtcaccaaggttgccactcagaagcaccgacagtcaccgctcaactggacctccagtcatttcggagaggtgattcccatcaccgacaggcagggacagagtaaatgctcccatactcccggaaaataaggagagagatgagtccgtgcggccg

SEQ ID NO: 290578 - DNA, 988 bp, Homo sapiens
gcccccgaccctagctcagggactgcagaactcaagataccatcccgtttctcctggctgaggaagggaagggaacatccacatcttctgtactcgtccattctgtgtccccggggcctggagtaaagacaccttcaaatgcagagactcttcagattcagctttcctggaaactgatcttcaatgcactaagagaaggagactctcaaaccaaaaatgacctggaggcaccatgtcaggcttctgtttacggtcagtttggcattacagatcatcaatttgggaaacagctatcaaagagagaaacataacggcggtagagaggaagtcaccaaggttgccactcagaagcaccgacagtcaccgctcaactggacctccagtcatttcggagaggtgactgggagcgccgagggctgggggccggaggagccgctcccctactcccgggctttcggagagggtgcgtccgcgcggccgcgctgctgcaggaacggcggtacctgcgtgctgggcagcttctgcgtgtgcccggcccacttcaccggccgctactgcgagcatgaccagaggcgcagtgaatgcggcgccctggagcacggagcctggaccctccgcgcctgccacctctgcaggtgcatcttcggggccctgcactgcctccccctccagacgcctgaccgctgtgacccgaaagacttcctggcctcccacgctcacgggccgagcgccgggggcgcgcccagcctgctactcttgctgccctgcgcactcctgcaccgcctcctgcgcccggatgcgcccgcgcaccctcggtccctggtcccttccgtcctccagcgggagcggcgcccctgcggaaggccgggacttgggcatcgcctttaattttctatgttgtaaataatagatgtgtttagtttaccgtaagctgaagcactgggtgaatatttttattgggtaataaatattttcatgaaagcgcatt

SEQ ID NO: 290579 - DNA, 1825 bp, Homo sapiens
  misc_feature (1817)..(1817): n is a, c, g, or t
  misc_feature (1820)..(1825): n is a, c, g, or t
tgatctgaaaggaatggaagcacaaaatgatgaataaggtatttttaacaaagatacatgggtaaattaacagcagtaatgtaaaaaagactgagggagcaacaatgtggaaagggaaggaaaggaagctgtataggaacaatcacacaaataatcatcaaaattaaactttataaatctaaacatagtatctacaacctttatgaaggttaagttttgttaaattgtctaagttttgcatttttacaattttcactgtagagaaaaaaatattaatagttaccaaaggaataaaagactaaaataatttgttatacatctgcaaatagctccttaaatttggaacactaatttcataatgatatttggatccataaatgtgaaactgtcacactgaatgtaggtactgttttccccacaatggatactactgcattggcatctagcagaaattgtaagctatttggaatgttactaaacctactgggactaaggttttcaatcttttgtctttcaaattaaaattaaaaactaattcactctgggcaattcaggtactctaaggaaattcaagtactctagttttaaatacgaattttcaaaaacgcaacccaagtaccctttcctctcaacttctgtgaggccaagccacgacctccacctattcaatctttgctgctagataacaacccttttggtagtgctaggcaacaggcatgatgtgacaaacctagacatcaaaacttttccacagaaagataaggtaaacaagatatacttagcgccacacccatttaaatgcacaagcaaccaaaattgctccctccccccgcaacaccccccccccccccccaaagctccagctggtcaggaaacattgtctttacaatcaagataaacatctggctcagggtgttcagccattcctcacctacaggcttgcctaagccccattctccaatgccatcaccaccagaaccggaacattctgttgggaagccggcaaacgtccaaataccccaagtatcctcgcccgagttctgcaaccaaaaatctgttttggctactgagcatgctcagacttaagacgggcgcgccacatgggagttttcaaagcttaggctccaaactccacgtagtaacagcagctgaaaggaggagaggggaaaaggggaggggaagagactggaatattaatttgagccctgatattgaagtataggacccggccagcggctgaatatggtgaaggcaaaaagacgctgctttggcattctctttgcagcacagagaagtttacatgaagtagaagaaatccttgcagtggtgaaaactgacatggcaagtggcagaaaccaggtctaactaccagctgattgcagtagccggtcacaactgcccagagtgtaattcccaccgataagcgcggatccttatctttgaaacacaaagcgacggcggcacggattcatcaagccattggacagcttcgcagtgcagcagcccaggctgcccggccgagcaccgcagtcctatcaaggtttgctgtagctcagaaggctctgcctacatgactactgcataccctactgggagaattggaagaatgtgatgatggtaggagtcacccagcatagaagcatgagtgaatgacatcccagagatctgcaaaggatcctggtagccacttcaaagactttttctcccttcctcagacaatcatggcacatggacatcagaggaagaaatggcgaagtttgtatgactcctccagcagagtccttggaaacaataaagcttcctttccaaattctganaannnnnn

SEQ ID NO: 290580 - DNA, 966 bp, Homo sapiens
tcagaacagcaatagactttcaagaggaggaactcacatttctgcaaaagaaagaggccgtaaatgaaaagcagcttggagagaatgagcccacatgcatgagacacagcacacgactcacacccttcttcctcaagtttctctaacatgtgtggctcttggaaacagacatgtcatggctgagttattttttgtgcaaacaaggacacatctgcctctccaggacctcagattcctgacaacactgttggcttcccggagactccttcatcctgcagaagatgcaattccacggggtcctgagagattggacatgggtgggatgtggcagtcctcatggaagactcttgaacaagtgtcgcaacagaacagctcccctccgtcccggcacacctcacactcatccaagtttctcatctagaagacatctggctgtgggctgtgagacataaacctccatgtcaagctcatacaaaatcagccacgcaaacactgacctccagggctgttttaaccattcgtgagtccctgagttggccgggcatcaaaatcagtgtggaaaagacctaaatctgattggaggactgctttggaggttctcattcacacccagtcttcgaaaaaccatcaccttgtcctgaatctacactgcacttaacctatttgtttgttgcgttcttaagtgaaggaaaaatcactttcacagataaaaagcaggtctgcacagtccctctggtagaaccaaagaggtggcatcaacataaaagattttcctggtcagctcctcctgtaaaatacgtttgcctctggagatcttcctccccaatggcaccatcttgacaaaggtaaataatttcccattgagaaagaattctgtgtatctgtgtgtacatttttttggaaggtgaaagaggatgtgaaagatcagaaaagaaatattatttttattacctatttcatgaaatg

SEQ ID NO: 290581 - DNA, 1119 bp, Homo sapiens
tcagaacagcaatagactttcaagaggaggaactcacatttctgcaaaagaaagaggccgtaaatgaaaagcagcttggagagaatgagcccacatgcatgagacacagcacacgactcacacccttcttcctcaagtttctctaacatgtgtggctcttggaaacagacatgtcatggctgagttattttttgtgcaaacaaggtgtggtgttctatcagtgccattgaagtgtggcgcggaagagcaggctcctttcagtacattcccctgcccttgcgcttgttcatggttctcacgtgtgaggggaaaggagaaggcttggggtttgcatctgatttaccaactgttcctcaggacacatctgcctctccaggacctcagattcctgacaacactgttggcttcccggagactccttcatcctgcagaagatgcaattccacggggtcctgagagattggacatgggtgggatgtggcagtcctcatggaagactcttgaacaagtgtcgcaacagaacagctcccctccgtcccggcacacctcacactcatccaagtttctcatctagaagacatctggctgtgggctgtgagacataaacctccatgtcaagctcatacaaaatcagccacgcaaacactgacctccagggctgttttaaccattcgtgagtccctgagttggccgggcatcaaaatcagtgtggaaaagacctaaatctgattggaggactgctttggaggttctcattcacacccagtcttcgaaaaaccatcaccttgtcctgaatctacactgcacttaacctatttgtttgttgcgttcttaagtgaaggaaaaatcactttcacagataaaaagcaggtctgcacagtccctctggtagaaccaaagaggtggcatcaacataaaagattttcctggtcagctcctcctgtaaaatacgtttgcctctggagatcttcctccccaatggcaccatcttgacaaaggtaaataatttcccattgagaaagaattctgtgtatctgtgtgtacatttttttggaaggtgaaagaggatgtgaaagatcagaaaagaaatattatttttattacctatttcatgaaatg

SEQ ID NO: 290582 - DNA, 670 bp, Homo sapiens
ctttccgcctcgcgttttcctccctgaccctggtcccggctcccgtccgggcgccagctggtggggcgagcgccgggagcccatctgcccccagggtgcacggggcgcggggccggctcccgcccggcacatggctgcagccacctcgctgcgcaccccgaggcgccgcgcccagctcgcccgaggtccgtcggaggcgcccggccgccccggagccaagcagcagctgagcggggaagcgcccgcgtccggggatcgggatgtccctcctcattttcctcttccagtttcctactatgttggaaccttggggactcacactgagatcaagagagtggcagaggaaaaggtcactttgccctgccaccatcaactggggcttccagaaaaagacactctggatattgaatggctgctcaccgataatgaagggaaccaaaaagtggtgatcacttactccagtcgtcatgtctacaataacttgactgaggaacagaagggccgagtggcctttgcttccaatttcctggcaggagatgcctccttgcagattgaacctctgaagcccagtgatgagggccggtacacctgtaaggttaagaattccgcgggcgctacgtgtggagccatgtcatcttaaaagtcttaggtaagataggatgccaaagtg

SEQ ID NO: 290583 - DNA, 2713 bp, Homo sapiens
atgttgaggaacagcaccttcaaaaacatgcagcgccggcacacaacgctgagggagaagggccgtcgccaggccatccggggtcccgcctacatgttcaacgagaagggcaccagtctgacgcccgaggaggagcgcttcctggactcggctgagtatggcaacatcccggtggtccggaaaatgctggaggagtccaagacccttaacttcaactgtgtggactacatggggcagaacgctctgcagctggccgtgggcaacgagcacctagaggtcacggagctgctgctgaagaaggagaacctggcacgggtgggggacgcgctgctgctggccatcagcaagggctatgtgcgcatcgtggaggccatcctcaaccacccggccttcgcgcagggccagcgcctgacgctcagcccgctggaacaggagctgcgcgacgacgacttctatgcctacgacgaggacggcacgcgcttctcccacgacatcacgcccatcatcctggcggcgcactgccaggagtatgagatcgtgcacatcctgctgctcaagggcgcccgcatcgagcggccccacgactacttctgcaagtgcaatgagtgcaccgagaaacagcggaaagactccttcagccactcgcgctcgcgcatgaacgcctacaaaggactggcgagtgctgcctacttgtccctgtccagcgaagaccctgtcctcaccgccctggagctcagcaacgagttagccagactagccaacattgagactgaatttaagaacgattacaggaagttatctatgcaatgcaaggattttgtagtgggcgtgctggacctgtgccgagacacagaagaggtggaagcaattttaaacggtgatgtgaacttccaagtctggtccgaccaccaccgtccaagtctgagccggatcaaactcgccattaaatatgaagtcaagaagttcgttgctcatcctaactgtcagcagcaattgcttaccatgtggtatgaaaatctctcaggcttacgtcaacagtctatcgctgtgaaattcctggctgtctttggagtctccataggcctcccttttctcgccatagcctattggattgctccgtgcagcaagctaggacgaaccctgaggagccctttcatgaagtttgtagctcatgcagtttcttttacaatcttcttgggattattagttgtgaatgcatctgaccgatttgaaggtgttaaaaccctgccaaacgaaaccttcacagactacccaaaacaaatcttcagagtgaaaaccacacagttctcctggacagaaatgctcattatgaagtgggtcttaggaatgatttggtccgaatgcaaggaaatctgggaggaggggccacgggagtacgtgctgcacttgtggaacctgctagatttcgggatgctgtccatcttcgtggcctccttcacagcacgcttcatggccttcctgaaggccacggaggcacagctgtacgtggaccagcacgtgcaggacgacacgctgcacaatgtctcgcttccgccggaagtggcatacttcacctacgccagggacaagtggtggccttcagaccctcagatcatatcggaagggctctacgcgatagccgtcgtgctgagcttctctcgcattgcatacattctgccagccaacgagagttttgggcccctgcagatctcgctagggagaactgtgaaagatatcttcaagttcatggtcattttcatcatggtatttgtggccttcatgattgggatgttcaacctgtactcttactaccgaggtgccaaatacaacccagcgtttacaacggttgaagaaagttttaaaactttgttttggtccatattcggcttatctgaagtaatctcagtggtgctgaaatacgaccacaaattcatcgagaacattggctacgttctctacggcgtttataacgtcaccatggtggtagtgttgctcaacatgctaatagccatgataaacaactcctatcaggaaattgaggaggatgcagatgtggaatggaagttcgcccgagcaaaactctggctgtcttactttgatgaaggaagaactctacctgctccttttaatctagtgccaagtcctaaatcattttattatctcataatgagaatcaagatgtgcctcataaaactctgcaaatctaaggccaaaagctgtgaaaatgaccttgaaatgggcatgctgaattccaaattcaagaagactcgctaccaggctggcatgaggaattctgaaaatctgacagcaaataacactttgagcaagcccaccagataccagaaaatcatgaaacggctcataaaaagatacgtcctgaaagcccaggtggacagagaaaatgacgaagtcaatgaaggcgagctgaaggaaatcaagcaagatatctccagcctgcgctatgagcttcttgaggaaaaatctcaagctactggtgagctggcagacctgattcaacaactcagcgagaagtttggaaagaacttaaacaaagaccacctgagggtgaacaagggcaaagacatttagcagcccacatcggcgtctgtgacttctaccagcattccaaggccaggttggatgccctcgcccccatccttggtggggaggggtccccagcccactcctctaggacacgaaggggatctcctgg

SEQ ID NO: 290584 - DNA, 943 bp, Homo sapiens
  misc_feature (35)..(35): n is a, c, g, or t
  misc_feature (39)..(39): n is a, c, g, or t
  misc_feature (65)..(65): n is a, c, g, or t
aagtgcctatctgggtgaacacttaatttaggagnacanccccttctgggtgggtttttatacanaagcggtggacggcgaatctggcattgtgcatggttttagtgagagcaaactccccttctctgtgccatctgtagaaaaactacaccaagtcctgcttagaagtctgctttccgaatgttggggctgtgtctctgctcctcaggttgggctccgttgttaaatcgtggcctttgagggtgtgttgttgtttcccttgttccacaggaggatgcagatgtggaatggaagttcgcccgagcaaaactctggctgtcttactttgatgaaggaagaactctacctgctccttttaatctagtgccaagtcctaaatcattttattatctcataatgagaatcaagatgtgcctcataaaactctgcaaatctaaggccaaaagctgtgaaaatgaccttgaaatgggcatgctgaattccaaattcaagaagactcgctaccaggctggcatgaggaattctgaaaatctgacagcaaataacactttgagcaagcccaccagataccagaaaatcatgaaacggctcataaaaagatacgtcctgaaagcccaggtggacagagaaaatgacgaagtcaatgaaggcgagctgaaggaaatcaagcaagatatctccagcctgcgctatgagcttcttgaggaaaaatctcaagctactggtgagctggcagacctgattcaacaactcagcgagaagtttggaaagaacttaaacaaagaccacctgagggtgaacaagggcaaagacatttagcagcccacatcggcgtctgtgacttctaccagcattccaaggccaggttggatgccctcgcccccatccttggtggggaggggtccccagcccactcctctaggacacgaaggggatctcctgg

SEQ ID NO: 290585 - DNA, 4823 bp, Homo sapiens
cggccgctgcggtgacggttggcggcggccggtgaggcgggcggggccggaggcgcggaggcggggtcccgggcgagccgccctgggaggcgggggccgtttccatagcggcggcaggaggtgtcgcgccggggaacttcctggttcccgggctcggcttcgccgggatcctcttggaagggaaacaatggggcggagggcactgcggtagccgccgccgccgccgcgccgcgccgcgccggatctgctcggccgcccgggaccgccagctctgtccgctgcccacagcctagcagtcgggaccgtactgaggacatgtattcctctgagaaaccttggacagcagattttggtttaatatctgattgggacaacattcagacccatttccagtcatgaattcagaccaggatgtagcactcaaacttgcccaggagcgagctgaaatagttgctaaatatgacagaggacgagaaggtgcagagattgaaccttgggaagatgctgattaccttgtttacaaagtcacagatagatttggctttttacatgaggaggagctcccagatcataatgtggctgtggaacggcaaaagcacctggaaattgaaagaactaccaaatggctgaaaatgctgaaaggatgggaaaaatacaagaacactgaaaagtttcataggcgaatttacaaaggaataccactccagctcagaggtgaagtctgggccctccttcttgagatccctaaaatgaaagaagaaacaagggacctgtatagtaaattaaaacacagagcacggggctgttcacctgacatcagacaaatagacctggatgtcaaccgcacatttcgggaccacattatgtttagagacagatatggtgttaagcaacaatccttattccatgtgcttgctgcctattctatttataacacggaagtcgggtattgtcaggggatgagccagatcacagctttactcctcatgtatatgaacgaggaagatgccttctgggccctggtcaaactcttctcaggccctaaacatgccatgcatggcttttttgtccaaggttttcctaaactcttgaggtttcaagaacatcatgaaaaaatactgaacaaatttctgtccaagcttaagcaacacttggattctcaagaaatctacacaagtttttacacaatgaaatggttttttcagtgtttccttgatcgtactccctttacactaaacctcagaatatgggatatctacatctttgaaggagaacgagttcttactgctatgtcttacaccatcttaaaattacacaaaaaacatctaatgaaattgtccatggaagaacttgtagaattttttcaggagaccctggcaaaggattttttctttgaagatgattttgtgatagagcaacttcagatttctatgacagaactaaagcgggcaaagttagaccttccagaacctggtaaagaggatgaatatccaaagaagcccttggggcagcttccacctgaacttcagtcttggggcgtccatcacttgagcaacggacagaggagcgtgggccggccgagcccgctggccagcggcaggagggagagcggggcgccccacaggaggcacgagcactccccgcacccccagagcaggaccgggacgcccgagagagcacagccgccaagacggaaatcggtggaggaggagagcaaaaagcttaaagatgaggcagattttcaaagaaaactcccatcgggtccacaggacagttccaggcaatataatcacgcagctgccaaccaaaatagcaacgccacttcaaatatcaggaaggagtttgtgcccaaatggaataaaccgtcagacgtctcagctacagagagaactgccaaatacaccatggaaggcaaaggtcgagcagcgcaccccgcgctcgcagttaccgtcccaggtcctgccgaggtgcgggtgtcaaacgtgcggccaaagatgaaggccctggatgctgaggacgggaagcggggctccactgcatcgcagtacgacaacgtgccaggcccggagctggacagcggcgcttccgtggaggaggcgctggaaagggcttactcccagagcccccggcatgccctttaccctcccagcccgagaaagcacgctgagccaagttctagtccatcaaaagtatccaacaagtttacttttaaagtacagcctccaagtcatgcacgatatccgtcccagctagatggggaagcccgagggctagctcatcccccctcctacagcaatccccccgtttaccacggaaactctcccaaacacttccctactgccaacagcagctttgcttctccacagtttagccctgggactcaactgaatccttccaggagacctcatggttctactctttccgtcagtgcttctccggagaaatcttacagccgcccaagcccccttgtactgccgtctagtcgaatagaagtcctccctgttgacactggtgctgggggatattcgggcaattcagggtcaccaaagaatggaaaattgatcattccaccagtggattacttgccagataacagaacatggtcagaagttagttatacatacagacctgagacgcagggacaatcatggacccgagatgctagccgtggcaatttaccaaaatactcagcctttcaactcgcaccctttcaggaccatggcctccctgcagtttctgtagatagtcccgtgagatataaagcttcaccggccgcagaagatgccagtccatctggatatccatattcagggcccccgcctccagcctaccactacaggaatcgggacgggctttccatccaagagtcagtgttgctgtgagatttgacgtgtacttgctaaagacgagagagaaaccacgtgaaacctacattgctatgttcataattgccaaagcagtatttatactattgtaaacaactcgcacatctctcctgtctgttagtaataagaatacagggaaatgtcttcagccccacgtagatgctgcttaagatgagcgtttcaattgcatcatcactgacctgttagaatttaacccggaaacatcgcaatagcatttagggatgcacgcacagtggtaatttattactcagttccggttatgtttttctccaaaacctgaacatttttactctgttggctcattctattttgactaatgttacaaagtactgaaaaaactgtagaatagatatttttaaggctatatgtagtgtatgtgtcttttaatagatataggcatctgttcatccacatttgaacacagagctaaagaaacgttttttaaaaaactacttttaatccagatccatggaataatatgtaattcttgttttccttgtcttttagtccagtttttctttttccctctcatatatttgtaacctgggtcctaaactgactgaagagtttgtcctgactttattaattgcagtctcacagaatgctcatcattctccttcagctgttgccattttctttcaatctgaaaattaaagacattggagagaaaggctaaccacttaatggtgcttaaaaatcggggcacttaaaataagtttacggccaaaggtgcagcagtgcttatcacatccacatactaagagattggtcttagtgcgtttgtgccctttgttctggtctgactcttgcgaatctcagagcaggagaagttgcagcttactgatccctcagtgctcacagtactcatgtggggcagccacactaactgcattagcagtgtggttacttctttcttctgcctcgactcacatggcttctccccacgaaggtcccagggtggccatttatacaatccatttctgtcctctttatggaatgtagtcgacggatattgctgcacctcatcaggccattacattgtccatgttaaaattataaaaatgatcctagtttttcataggagtctaggattttgatcttttaaaaaatacagtgtgatttcatgcttttgaacatcttttttttttcattgaaacaaattcaagttcttggcttaaaaaaaaattagtgatgtctttaaaaaatattctgttacactacagataccaaaacactgacaaagatttaggcactccaagagagtatgacttcgtgtttaattggggagcttgttttcaacattgcttatatttgaatagtagaaaacccgacattgatgtttcttcctgttgcaaggtggggctttaaactttcaaggtacaaaagtatgtcttttaaaatggaagtaacgtttgtttagctagtgaatgtgacaatatattttatgtatataatgagtctaatgtaattttgatcaacttggtaatgatgttattaaatagcaaaacaagtgcagtgtattaaagctaaacactacattgaaacgcaaacaaaattctggtgaaataactgggctgttgatgcaggtcaggtggaagctgagaaataaatgtatataaatatgtagctgaggatattaattcccattatataaccataattctgtgacttgtaataaaccaagctgtacaatttagtttataatagcagtatctgagctgctccaaaatatatatatcaacagtggtaaatactgtagatttttatatatatatatatatatataatatatatatgcaaaaaatatatatatacacacaagcactattttcttatgtcatttatgacattttttatctgtatacttttttgatgtgattgttttttaacatgctaaaagtaataagtaaattttgt

SEQ ID NO: 290586 - DNA, 1923 bp, Homo sapiens
cggccgctgcggtgacggttggcggcggccggtgaggcgggcggggccggaggcgcggaggcggggtcccgggcgagccgccctgggaggcgggggccgtttccatagcggcggcaggaggtgtcgcgccggggaacttcctggttcccgggctcggcttcgccgggatcctcttggaagggaaacaatggggcggagggcactgcggtagccgccgccgccgccgcgccgcgccgcgccggatctgctcggccgcccgggaccgccagctctgtccgctgcccacagcctagcagtcgggaccgtactgaggacatgtattcctctgagaaaccttggacagcagattttggtttaatatctgattgggacaacattcagacccatttccagtcatgaacggagtcttgccctgtcacccaggctggagtgcagtggcgcaatctcggctcactgcaagctccgcctcctaggttgacaccattctcctgcctcagcctcccaagtagctgggactacaggaacccgccaccacgcccagctaatctttttgtatttttagtagagacatggtttcaccatgttagccaggatggtctcgatctcctgacctcgtgatccacccgcctcggcctcccaaagtgctgggattataggtgtgagccactacgcccggcctggatgctacattcttaaaggatgctgattttatcttggtttcttgcttttttaagttatctctcatgttctttgatttgctctatgttgcttctttctgtggtcttcttgggtatactcaagtgtgtatcgcatatgtttaacaaaggaaaaatagtgttaaaagaaaaagtatcacttaatataagaagcaaaacttagtttttgtttctatgatagtgacatccaggtatgatttaggttatttttcactttaaacgggctattaacttcacgtgagaaaaaaactgtagaaacgttaactcctgtagaatgatgactatctgtggtgtagtaagatcatacaacttctctacttgttactgtgagttgcttaataaatggcagtacaagtgtcaaatccataattagtcaatatcaagagctgcattttggattgcatgtactgtcccaaatatatgttgtgcaagttactttgtatcatgttaatggagaaaagagtggatattatgaaatcagcaatataaatcaaatgtatatgtggtcctgcaatgtaattgaaggtactcagtgttctcagacactcatgcaatatcttgtgttgctttctcagattttttaggtgtatcataggggatagctgggaactggtagagcagaggtactaagttccacctggaaatgctttagagtagctctttgaatatgtctttacttattatcttacagcgtatgtgtatatgattattttctagagggtcgtaccctttattaagctgtgagcttcttgagggcaaggactgcaattcattaatcattttggagaaaagtgaataattctgaagaattcggtggttcatgagcttgcctggtatttgtttctctatggcttatcatctaagtgagataacagatagtagataattgataaatttaatctgttacctaattactgagaggattcgattcttgctttatgttattactgaaacagactgcccagtaatcttctctagagagcaattaggtttgcaatgagttattttattgagaatgctacttgaaattaaatgtttatagcactatcttgatataatttaaatataatttaaatgtgctgaagtatcttcattcagataacttgttaccccttaacaaaaggctgcttgagtattgtttctctcccatttggcaaacaccagatgcagtgattaataaaggtcattatgctacttaaaaaaaaaa

SEQ ID NO: 290587 - DNA, 606 bp, Homo sapiens
cggccgctgcggtgacggttggcggcggccggtgaggcgggcggggccggaggcgcggaggcggggtcccgggcgagccgccctgggaggcgggggccgtttccatagcggcggcaggaggtgtcgcgccggggaacttcctggttcccgggctcggcttcgccgggatcctcttggaagggaaacaatggggcggagggcactgcggtagccgccgccgccgccgcgccgcgccgcgccggatctgctcggccgcccgggaccgccagctctgtccgctgcccacagcctagcagtcgggaccgtactgaggacatgtattcctctgagaaaccttggacagcagattttggtttaatatctgattgggacaacattcagacccatttccagtcatgagttttgagacagatgcgaaagctgccctggcaggaccaagaagtgaaagactatgttatttgttgtatgataaacatctggaatgtgaaatataatagtattcattgtgtagccaacctcttagcaggactagtgctctaccaagaggatgttgggatccacgttgtggatggagtgttagaagatattcgattaggaatggaggta

SEQ ID NO: 290588 - DNA, 4770 bp, Homo sapiens
cggccgctgcggtgacggttggcggcggccggtgaggcgggcggggccggaggcgcggaggcggggtcccgggcgagccgccctgggaggcgggggccgtttccatagcggcggcaggaggtgtcgcgccggggaacttcctggttcccgggctcggcttcgccgggatcctcttggaagggaaacaatggggcggagggcactgcggtagccgccgccgccgccgcgccgcgccgcgccggatctgctcggccgcccgggaccgccagctctgtccgctgcccacagcctagcagtcgggaccgtactgaggacatgtattcctctgagaaaccttggacagcagattttggtttaatatctgattgggacaacattcagacccatttccagtcatgaattcagaccaggatgtagcactcaaacttgcccaggagcgagctgaaatagttgctaaatatgacagaggacgagaaggtgcagagattgaaccttgggaagatgctgattaccttgtttacaaagtcacagatagatttggctttttacatgaggaggagctcccagatcataatgtggctgtggaacggcaaaagcacctggaaattgaaagaactaccaaatggctgaaaatgctgaaaggatgggaaaaatacaagaacactgaaaagtttcataggcgaatttacaaaggaataccactccagctcagaggtgaagtctgggccctccttcttgagatccctaaaatgaaagaagaaacaagggacctgtatagtaaattaaaacacagagcacggggctgttcacctgacatcagacaaatagacctggatgtcaaccgcacatttcgggaccacattatgtttagagacagatatggtgttaagcaacaatccttattccatgtgcttgctgcctattctatttataacacggaagtcgggtattgtcaggggatgagccagatcacagctttactcctcatgtatatgaacgaggaagatgccttctgggccctggtcaaactcttctcaggccctaaacatgccatgcatggcttttttgtccaaggttttcctaaactcttgaggtttcaagaacatcatgaaaaaatactgaacaaatttctgtccaagcttaagcaacacttggattctcaagaaatctacacaagtttttacacaatgaaatggttttttcagtgtttccttgatcgtactccctttacactaaacctcagaatatgggatatctacatctttgaaggagaacgagttcttactgctatgtcttacaccatcttaaaattacacaaaaaacatctaatgaaattgtccatggaagaacttgtagaattttttcaggagaccctggcaaaggattttttctttgaagatgattttgtgatagagcaacttcagatttctatgacagaactaaagcgggcaaagttagaccttccagaacctggtaaagaggatgaatatccaaagaagcccttggggcagcttccacctgaacttcagtcttggggcgtccatcacttgagcaacggacagaggagcgtgggccggccgagcccgctggccagcggcaggagggagagcggggcgccccacaggaggcacgagcactccccgcacccccagagcaggaccgggacgcccgagagagcacagccgccaagacggaaatcggtggaggaggagagcaaaaagcttaaagatgaggcagattttcaaagaaaactcccatcgggtccacaggacagttccaggcaatataatcacgcagctgccaaccaaaatagcaacgccacttcaaatatcaggaaggagtttgtgcccaaatggaataaaccgtcagacgtctcagctacagagagaactgccaaatacaccatggaaggcaaaggtcgagcagcgcaccccgcgctcgcagttaccgtcccaggtcctgccgaggtgcgggtgtcaaacgtgcggccaaagatgaaggccctggatgctgaggacgggaagcggggctccactgcatcgcagtacgacaacgtgccaggcccggagctggacagcggcgcttccgtggaggaggcgctggaaagggcttactcccagagcccccggcatgccctttaccctcccagcccgagaaagcacgctgagccaagttctagtccatcaaaagtatccaacaagtttacttttaaagtacagcctccaagtcatgcacgatatccgtcccagctagatggggaagcccgagggctagctcatcccccctcctacagcaatccccccgtttaccacggaaactctcccaaacacttccctactgccaacagcagctttgcttctccacagtttagccctgggactcaactgaatccttccaggagacctcatggttctactctttccgtcagtgcttctccggagaaatcttacagccgcccaagcccccttgtactgccgtctagtcgaatagaagtcctccctgttgacactggtgctgggggatattcgggcaattcagggtcaccaaagaatggaaaattgatcattccaccagtggattacttgccagataacagaacatggtcagaagttagttatacatacagacctgagacgcagggacaatcatggacccgagatgctagccgtggcaatttacctttctgtagatagtcccgtgagatataaagcttcaccggccgcagaagatgccagtccatctggatatccatattcagggcccccgcctccagcctaccactacaggaatcgggacgggctttccatccaagagtcagtgttgctgtgagatttgacgtgtacttgctaaagacgagagagaaaccacgtgaaacctacattgctatgttcataattgccaaagcagtatttatactattgtaaacaactcgcacatctctcctgtctgttagtaataagaatacagggaaatgtcttcagccccacgtagatgctgcttaagatgagcgtttcaattgcatcatcactgacctgttagaatttaacccggaaacatcgcaatagcatttagggatgcacgcacagtggtaatttattactcagttccggttatgtttttctccaaaacctgaacatttttactctgttggctcattctattttgactaatgttacaaagtactgaaaaaactgtagaatagatatttttaaggctatatgtagtgtatgtgtcttttaatagatataggcatctgttcatccacatttgaacacagagctaaagaaacgttttttaaaaaactacttttaatccagatccatggaataatatgtaattcttgttttccttgtcttttagtccagtttttctttttccctctcatatatttgtaacctgggtcctaaactgactgaagagtttgtcctgactttattaattgcagtctcacagaatgctcatcattctccttcagctgttgccattttctttcaatctgaaaattaaagacattggagagaaaggctaaccacttaatggtgcttaaaaatcggggcacttaaaataagtttacggccaaaggtgcagcagtgcttatcacatccacatactaagagattggtcttagtgcgtttgtgccctttgttctggtctgactcttgcgaatctcagagcaggagaagttgcagcttactgatccctcagtgctcacagtactcatgtggggcagccacactaactgcattagcagtgtggttacttctttcttctgcctcgactcacatggcttctccccacgaaggtcccagggtggccatttatacaatccatttctgtcctctttatggaatgtagtcgacggatattgctgcacctcatcaggccattacattgtccatgttaaaattataaaaatgatcctagtttttcataggagtctaggattttgatcttttaaaaaatacagtgtgatttcatgcttttgaacatcttttttttttcattgaaacaaattcaagttcttggcttaaaaaaaaattagtgatgtctttaaaaaatattctgttacactacagataccaaaacactgacaaagatttaggcactccaagagagtatgacttcgtgtttaattggggagcttgttttcaacattgcttatatttgaatagtagaaaacccgacattgatgtttcttcctgttgcaaggtggggctttaaactttcaaggtacaaaagtatgtcttttaaaatggaagtaacgtttgtttagctagtgaatgtgacaatatattttatgtatataatgagtctaatgtaattttgatcaacttggtaatgatgttattaaatagcaaaacaagtgcagtgtattaaagctaaacactacattgaaacgcaaacaaaattctggtgaaataactgggctgttgatgcaggtcaggtggaagctgagaaataaatgtatataaatatgtagctgaggatattaattcccattatataaccataattctgtgacttgtaataaaccaagctgtacaatttagtttataatagcagtatctgagctgctccaaaatatatatatcaacagtggtaaatactgtagatttttatatatatatatatatatataatatatatatgcaaaaaatatatatatacacacaagcactattttcttatgtcatttatgacattttttatctgtatacttttttgatgtgattgttttttaacatgctaaaagtaataagtaaattttgt

SEQ ID NO: 290589 - DNA, 4363 bp, Homo sapiens
cggccgctgcggtgacggttggcggcggccggtgaggcgggcggggccggaggcgcggaggcggggtcccgggcgagccgccctgggaggcgggggccgtttccatagcggcggcaggaggtgtcgcgccggggaacttcctggttcccgggctcggcttcgccgggatcctcttggaagggaaacaatggggcggagggcactgcggtagccgccgccgccgccgcgccgcgccgcgccggatctgctcggccgcccgggaccgccagctctgtccgctgcccacagcctagcagtcgggaccgtactgaggacatgtattcctctgagaaaccttggacagcagattttggtttaatatctgattgggacaacattcagacccatttccagtcatgaattcagaccaggatgtagcactcaaacttgcccaggagcgagctgaaatagttgctaaatatgacagaggacgagaaggtgcagagattgaaccttgggaagatgctgattaccttgtttacaaagtcacagatagatttggctttttacatgaggaggagctcccagatcataatgtggctgtggaacggcaaaagcacctggaaattgaaagaactaccaaatggctgaaaatgctgaaaggatgggaaaaatacaagaacactgaaaagtttcataggcgaatttacaaaggaataccactccagctcagaggtgaagtctgggccctccttcttgagatccctaaaatgaaagaagaaacaagggacctgtatagtaaattaaaacacagagcacggggctgttcacctgacatcagacaaatagacctggatgtcaaccgcacatttcgggaccacattatgtttagagacagatatggtgttaagcaacaatccttattccatgtgcttgctgcctattctatttataacacggaagtcgggtattgtcaggggatgagccagatcacagctttactcctcatgtatatgaacgaggaagatgccttctgggccctggtcaaactcttctcaggccctaaacatgccatgcatggcttttttgtccaaggttttcctaaactcttgaggtttcaagaacatcatgaaaaaatactgaacaaatttctgtccaagcttaagcaacacttggattctcaagaaatctacacaagtttttacacaatgaaatggttttttcagtgtttccttgatcgtactccctttacactaaacctcagaatatgggatatctacatctttgaaggagaacgagttcttactgctatgtcttacaccatcttaaaattacacaaaaaacatctaatgaaattgtccatggaagaacttgtagaattttttcaggagaccctggcaaaggattttttctttgaagatgattttgtgatagagcaacttcagatttctatgacagaactaaagcgggcaaagttagaccttccagaacctggtaaagaggatgaatatccaaagaagcccttggggcagcttccacctgaacttcagtcttggggcgtccatcacttgagcaacggacagaggagcgtgggccggccgagcccgctggccagcggcaggagggagagcggggcgccccacaggaggcacgagcactccccgcacccccagagcaggaccgggacgcccgagagagcacagccgccaagacggaaatcggtggaggaggagagcaaaaagcttaaagatgaggcagattttcaaagaaaactcccatcgggtccacaggacagttccaggcaatataatcacgcagctgccaaccaaaatagcaacgccacttcaaatatcaggaaggagtttgtgcccaaatggaataaaccgtcagacgtctcagctacagagagaactgccaaatacaccatggaaggcaaaggtcgagcagcgcaccccgcgctcgcagttaccgtcccaggtcctgccgaggtgcgggtgtcaaacgtgcggccaaagatgaaggccctggatgctgaggacgggaagcggggctccactgcatcgcagtacgacaacgtgccaggcccggagctggacagcggcgcttccgtggaggaggcgctggaaagggcttactcccagagcccccggcatgccctttaccctcccagcccgagaaagcacgctgagccaagttctagtccatcaaaagtatccaacaagtttacttttaaagtacagcctccaagtcatgcacgatatccgtcccagctagatggggaagcccgagggctagctcatcccccctcctacagcaatccccccgtttaccacggaaactctcccaaacacttccctactgccaacagcagctttgcttctccacagtttagccctgggactcaactgaatccttccaggagacctcatggttctactctttccgtcagtgcttctccggagaaatcttacagccgcccaagcccccttgtactgccgtctagtcgaatagaagtcctccctgttgacactggtgctgggggatattcgggcaattcagggtcaccaaagaatggaaaattgatcattccaccagtggattacttgccagataacagaacatggtcagaagttagttatacatacagacctgagacgcagggacaatcatggacccgagatgctagccgtggcaatttaccaaaatactcagcctttcaactcgcaccctttcaggaccatggcctccctgcagtttctgtagatagtcccgtgagatataaagcttcaccggccgcagaagatgccagtccatctggatatccatattcagggcccccgcctccagcctaccactacaggaatcgggacgggctttccatccaagagtcagtgttgctgtgagatttgacgtgtacttgctaaagacgagagagaaaccacgtgaaacctacattgctatgttcataattgccaaagcagtatttatactattgtaaacaactcgcacatctctcctgtctgttagtaataagaatacagggaaatgtcttcagccccacgtagatgctgcttaagatgagcgtttcaattgcatcatcactgacctgttagaatttaacccggaaacatcgcaatagcatttagggatgcacgcacagtggtaatttattactcagttccggttatgtttttctccaaaacctgaacatttttactctgttggctcattctattttgactaatgttacaaagtactgaaaaaactgtagaatagatatttttaaggctatatgtagtgtatgtgtcttttaatagatataggcatctgttcatccacatttgaacacagagctaaagaaacgttttttaaaaaactacttttaatccagatccatggaataatatgtaattcttgttttccttgtcttttagtccagtttttctttttccctctcatatatttgtaacctgggtcctaaactgactgaagagtttgtcctgactttattaattgcagtctcacagaatgctcatcattctccttcagctgttgccattttctttcaatctgaaaattaaagacattggagagaaaggctaaccacttaatggtgcttaaaaatcggggcacttaaaataagtttacggccaaaggtgcagcagtgcttatcacatccacatactaagagattggtcttagtgcgtttgtgccctttgttctggtctgactcttgcgaatctcagagcaggagaagttgcagcttactgatccctcagtgctcacagtactcatgtggggcagccacactaactgcattagcagtgtggttacttctttcttctgcctcgactcacatggcttctccccacgaaggtcccagggtggccatttatacaatccatttctgtcctctttatggaatgtagtcgacggatattgctgcacctcatcaggccattacattgtccatgttaaaattataaaaatgatcctagtttttcataggagtctaggattttgatcttttaaaaaatacagtgtgatttcatgcttttgaacatcttttttttttcattgaaacaaattcaagttcttggcttaaaaaaaaattagtgatgtctttaaaaaatattctgttacactacagataccaaaacactgacaaagatttaggcactccaagagagtatgacttcgtgtttaattggggagcttgttttcaacattgcttatatttgaatagtagaaaacccgacattgatgtttcttcctgttgcaaggtggggctttaaactttcaaggtacaaaagtatgtcttttaaaatggaagtaacgtttgtttagctagtgaatgtgacaatatattttatgtatataatga

SEQ ID NO: 290590 - DNA, 689 bp, Homo sapiens
tctctgctatcctctgacctgccggctggacacgccaatgtcgctcgtttgcgtgccccgaagccccgctttgggtcctgggcttccagcgcccgcttcccgccgaggggctccgggcacctgcagccctgggcgcgcgtccccgaggcgggcgggagcgcgcacggcgggagtgcgggagcggagcgcacgtgccgccgggaaggggccgcgccaatatggcggcggctgcggccgctgcggtgacggttggcggcggccggtgaggcgggcggggccggaggcgcggaggcggggtcccgggcgagccgccctgggaggcgggggccgtttccatagcggcggcaggaggtgtcgcgccggggaacttcctggttcccgggctcggcttcgccgggatcctcttggaagggaaacaatggggcggagggcactgcggtagccgccgccgccgccgcgccgcgccgcgccggatctgctcggccgcccgggaccgccagctctgtccgctgcccacagcctagcagtcgggaccgtactgaggtaacttccattcctcagctcccgccgtgaggggccggcggcggcgggctccgcgggcgtcctccccgggccgggactcggagttggccccggggagccggacgccgccattcccggcccctggaggaggggacgcggctgcggtt

SEQ ID NO: 290591 - DNA, 1978 bp, Homo sapiens
  misc_feature (3)..(3): n is a, c, g, or t
ggncgggcccacggccgcggcagtggatggggttgagctcgtcctgggggaaggcgtgagccatgtagttgtcgtagccaaagacgaacatgccccgtgccaggtcgcgcatctgggcacgcagctgcggagggaaggcgccgctgtagcgcttctcgtactcgtccgggccgcggccccggccgcccagcacgtagccccagttggctgggccgcacatccccggcccaggacgccgcggagccttgcgcgggctctgcgctgccccggtccccggcggctgcagccacgacggcccggatacccccccaggccggcccacgggccccgaggtgggcgacgcggggccgtcggggctcctcagacgctggaagccgaagctgagcggaaagcgctggtagaagcccatgctgggccccagcccgaagacgagccacaatactccatggaggccaagccggaggagcaccagccccaggacgagcgctcgccattgcatggtcgcgcgggcgccgcgggcattattttaaagcgcgggggcctccccgccgaccaccgcaccccgcgctcgccccgtagcccggctcgcttcccctttaaggaactcccccgtgacgcaccaggaactagcccatcgtccccaacccccaggctctccggcgggccggccaggccccacggtcgcccgcccagtggcccgggattggcccggcctgggcccggcctcgcggggcgcggcccaggactccctcccacgcagtaggccgccaggacgtccgcgacgccccgaggccccgcccctcacccgggccccgccccaactcccaagccccgcccccctgggcggtccgtagcccgatgggctggcgtggcgagcaggagccgcgccggcccgcgagggaacttccagccaatgggagagcggcacggcagcgcccgccggacgctggacacagacgtgaccccagaccgcctggccttgggtggatcgggtctctgggcagagcgtgtgtccggcagagctaggaccggaaaaagccactctaggtctaggttaggagtgatgacagttaaaagatatataaggaaaagaaggaaaggatcgtttctgtataaaacgagctatttttgcatatcgagcgcataagttttataacttaggtgtctgtttatggagagggtgggatactaccttttagctcaaggagtgcacaaaacggtatcatgaattctgctcttttgattcaaacacccaactttgaagaatcgctcatggtgcttgtaaaacacgtatccccagatccctccctagacctatcgaacaactccaacggtctcgggaatgtgcgtggtttctgaaaagcttgggaagcaagacctgactagacccccaaatctgatattggctgaatggccgaccaatggagtgcataagaagtctggatacaaaggcagcccaatttctagaaatgtataccagccatgaagagataaagctccaagaggagatttctctttctggtataaggatttaaacaaaacctagaatgtcgcagtactcgaagtatccaaaacaactgaaaaatgaagaagaataaaagaagaatccaaaagtatccaaaataactgaacatatgaagaatcatggctgggcacagtgactggctcatgtccgtaatcctagcattttgggaggctgggggcggggaggcagggacagggatcacttgaggtcaggatttcaagaccagcctggccaacatggtgaaatcccatctctactaaaaacacaaaaattagctgggtgtggtggcgcatgcctgaaatcccatttgaggccgggcatggtggctcaggcctataataccagcactttgggaggccaaggcgggtggatcacttgaggtcaggagttggagaccagcatggccaacatggcaaaaccccatctctactgaaaatacaaaaattcactggg

SEQ ID NO: 290592 - DNA, 899 bp, Homo sapiens
gcgattccttctcctaccttgtggcccctgagacagattcaactgagggaaaggcaggagcctcaagctttccaggctcaggaccaggaagtgggagatgggagactaagacagtatcaaggaaactcagaagggaacgaactggagtaatacatctgataaagttgtgtatgaactcctgggctcacccccaagctgtgacatatggatctgatcccaacagcacaaaggctttgagaactaaactataaggtagaccaccacccaagtgcctggttgacccctgtgtggcacatagccagaaatgacccaaatagcaccagcaaggctttgaaaactaacatcatattagaaccaaagcccatagaaggtgggttggatcttgtggcctaaactgagttaactgtctgctataacaaaacaaaataacaaatcaatattctccacaggatttaaacaaaacctagaatgtcgcagtactcgaagtatccaaaacaactgaaaaatgaagaagaataaaagaagaatccaaaagtatccaaaataactgaacatatgaagaatcatggctgggcacagtgactggctcatgtccgtaatcctagcattttgggaggctgggggcggggaggcagggacagggatcacttgaggtcaggatttcaagaccagcctggccaacatggtgaaatcccatctctactaaaaacacaaaaattagctgggtgtggtggcgcatgcctgaaatcccatttgaggccgggcatggtggctcaggcctataataccagcactttgggaggccaaggcgggtggatcacttgaggtcaggagttggagaccagcatggccaacatggcaaaaccccatctctactgaaaatacaaaaattcactggg

SEQ ID NO: 290593 - DNA, 1132 bp, Homo sapiens
  misc_feature (3)..(3): n is a, c, g, or t
ggncgggcccacggccgcggcagtggatggggttgagctcgtcctgggggaaggcgtgagccatgtagttgtcgtagccaaagacgaacatgccccgtgccaggtcgcgcatctgggcacgcagctgcggagggaaggcgccgctgtagcgcttctcgtactcgtccgggccgcggccccggccgcccagcacgtagccccagttggctgggccgcacatccccggcccaggacgccgcggagccttgcgcgggctctgcgctgccccggtccccggcggctgcagccacgacggcccggatacccccccaggccggcccacgggccccgaggtgggcgacgcggggccgtcggggctcctcagacgctggaagccgaagctgagcggaaagcgctggtagaagcccatgctgggccccagcccgaagacgagccacaatactccatggaggccaagccggaggagcaccagccccaggacgagcgctcgccattgcatggtcgcgcgggcgccgcgggcattattttaaagcgcgggggcctccccgccgaccaccgcaccccgcgctcgccccgtagcccggctcgcttcccctttaaggaactcccccgtgacgcaccaggaactagcccatcgtccccaacccccaggctctccggcgggccggccaggccccacggtcgcccgcccagtggcccgggattggcccggcctgggcccggcctcgcggggcgcggcccaggactccctcccacgcagtaggccgccaggacgtccgcgacgccccgaggccccgcccctcacccgggccccgccccaactcccaagccccgcccccctgggcggtccgtagcccgatgggctggcgtggcgagcaggagccgcgccggcccgcgagggaacttccagccaatgggagagcggcacggcagcgcccgccggacgctggacacagacgtgaccccagaccgcctggccttgggtggatcgggtctctgggcagagcgtgtgtccggcagagctaggaccggaaaaagccactctaggtctaggttaggagtgatgacagttaaaagatatataaggaaaagaaggaaaggatcgtttctgtataaaacgagctatttttgc

SEQ ID NO: 290594 - DNA, 495 bp, Homo sapiens
gtgattgccacatctcggattcgccgcggggcaactacctgggaaaaccgcagactgggcaatgaaagactacatccggcaaccggatgctgggttctgtgactccaggaaaaggggctcctgggcccagggagaacatactaggcgatctcgacagtcgctccgtgacagcccaccaacccccaaccctctacctcgcagccaccctaaaggcgacttcaagaagatggaaggatctcacggatctcattcctaatggtccgccgaagtctcacacagtagacagacggagttgagatgctggaggatgcagtcacctcctaaacttacgacccaccaccagacttcatcccagccgggacgtcctcccccacccgagtcctccccatttcttctcctactttgccgcagttccaggtgtcctgcttccaccagtcccacaaagctcaataaataccaagagacctgcatttacagcagggggaacatctcaca

SEQ ID NO: 290595 - DNA, 394 bp, Homo sapiens
cagacagtaaatcaattttatttgtgttcacagaacatactaggcgatctcgacagtcgctccgtgacagcccaccaacccccaaccctctacctcgcagccaccctaaaggcgacttcaagaagatggaaggatctcacggatctcattcctaatggtccgccgaagtctcacacagtagacagacggagttgagatgctggaggatgcagtcacctcctaaacttacgacccaccaccagacttcatcccagccgggacgtcctcccccacccgagtcctccccatttcttctcctactttgccgcagttccaggtgtcctgcttccaccagtcccacaaagctcaataaataccaagagacctgcatttacagcagggggaacatctcaca

SEQ ID NO: 290596 - DNA, 865 bp, Homo sapiens
gaacacatagctaggttagagcatgcgtttaaattcggacgggtgccctgctgagcgggtgttgcccttgccgctgtcctgtgacgtagcccttttcaaaaccacctctcccaagtgctgcaccactcctcctccatgcccagggaccgcgggtgcttggggccccgacgcgtacccaggtgccatctggccctcacctcccgccgtagctggctgtgacgcccgccatgggcacactggggcagtgcagtgagaagacgaggatgcccagcaggctgacaacggtgcagaacaggcagaacttgatgaccgcggagccccggagcctgagcttgttcacaaagaagccgcccaggaaggtgccgccaccacccgctggcaccaccagtgtcgctgacttgaacccctgcgtctgcagcttagtgacatcctgtaaacctacactttccagcctctcaccagagcagactgtcggcctcacatcacccccacctgcaggagggcggctctttcctctcggccacacctagagcctggttccgatgaacgcaactctgaatgcctggaacattcaaatgctcttgtttgaggaggtggccaaatgtaaatggattctgaagaatcaggaacagacggtgcagccctagttagcctctgagccccaacaggcccacaggtgccttgcagagctgatgttggcgtcagaaactccgctccagcctcacaggcactctgcctgcttggaggtgttcgctggctcgctcagactgacctcagcagccatgaacatgggttctttctgtccccttccctgattaaaatgggagagcccagttctttcaaaatttatttcctgacttgagga

SEQ ID NO: 290597 - DNA, 750 bp, Homo sapiens
gggacagaaagaacccatgttcatggctgctgaggtcactctgagcgagccagcgcacacctccaagcaggcagagtgcctgtgaggctggagcggagtttctgacgccaacatcagctctgcaaggcacctgtgggcctgttggggctcagacggctaacttggggctgaacgtggacatgccggtgatgagagtggcctcggtggccccggccaggcagagcaggatgaacgtggggttcttcagcaggagccagatggagctgggcagagtgtcgctgacttgaacccctgcgtctgcagcttagtgacatcctgtaaacctacactttccagcctctcaccagagcagactgtcggcctcacatcacccccacctgcaggagggcggctctttcctctcggccacacctagagcctggttccgatgaacgcaactctgaatgcctggaacattcaaatgctcttgtttgaggaggtggccaaatgtaaatggattctgaagaatcaggaacagacggtgcagccctagttagcctctgagccccaacaggcccacaggtgccttgcagagctgatgttggcgtcagaaactccgctccagcctcacaggcactctgcctgcttggaggtgttcgctggctcgctcagactgacctcagcagccatgaacatgggttctttctgtccccttccctgattaaaatgggagagcccagttctttcaaaatttatttcctgacttgagga

SEQ ID NO: 290598 - DNA, 875 bp, Homo sapiens
gaacacatagctaggttagagcatgcgtttaaattcggacgggtgccctgctgagcgggtgttgcccttgccgctgtcctgtgacgtagcccttttcaaaaccacctctcccaagtgctgcaccactcctcctccatgcccagggaccgcgggtgcttggggccccgacgcgtacccaggtgccatctggccctcacctcccgccgtagctggctgtgacgcccgccatgggcacactggggcagtgcagtgagaagacgaggatgcccagcaggctgacaacggtgcagaacaggcagaacttgatgaccgcggagccccggagcctgagcttgttcacaaagaagccgcccaggaaggtgccgccaccacccgctggcaccaccagggcagccacaccccctcctcccccaggggcctctgccgagtccctgcaggctgtgacaaggacatttgtcgaagcctgagtggccaccaacagtaaaaaattgcgattagctggcatctagcttctgggctgacaagtgaggagggcacagacctgcccagcctgggaaggccagcctgcctctggcaccgagaaacccccagctgcactgttccaggaggtcctgaggcaccagtgcctggctcatggaacagccaggtccaaacccttcctgcaccaagtcacagaagccaagactaggtggctagggggtggagcccaccgtggacccttccacctacggagcatgtcccacaaagagggcaggaccaccactctcccggcctgtggacagagtcgctcagcccccgtggcgctctccacacctgctctggcagcgggggtgggagggcactcactgccatgtgccctgtctgggtctttctag

SEQ ID NO: 290599 - DNA, 802 bp, Homo sapiens
gaacacatagctaggttagagcatgcgtttaaattcggacgggtgccctgctgagcgggtgttgcccttgccgctgtcctgtgacgtagcccttttcaaaaccacctctcccaagtgctgcaccactcctcctccatgcccagggaccgcgggtgcttggggccccgacgcgtacccaggtgccatctggccctcacctcccgccgtagctggctgtgacgcccgccatgggcacactggggcagtgcagtgagaagacgaggatgcccagcaggctgacaacggtgcagaacaggcagaacttgatgaccgcggagccccggagcctgagcttgttcacaaagaagccgcccaggaaggtgccgccaccacccgctggcaccaccagcctctcaccagagcagactgtcggcctcacatcacccccacctgcaggagggcggctctttcctctcggccacacctagagcctggttccgatgaacgcaactctgaatgcctggaacattcaaatgctcttgtttgaggaggtggccaaatgtaaatggattctgaagaatcaggaacagacggtgcagccctagttagcctctgagccccaacaggcccacaggtgccttgcagagctgatgttggcgtcagaaactccgctccagcctcacaggcactctgcctgcttggaggtgttcgctggctcgctcagactgacctcagcagccatgaacatgggttctttctgtccccttccctgattaaaatgggagagcccagttctttcaaaatttatttcctgacttgagga

SEQ ID NO: 290600 - DNA, 657 bp, Homo sapiens
gtggttggggcaaagcgccagtaatggagaagcagagcccagcgcttggtgtgacggggtcccaggtagtcgacacactcttccccctcggccgcccccgccggaacttccgttcgagtcccgggaacccagccatcgcgctgccggaagtagcctggccgacagtacggaacccggaagcggggacccggcttcgctggatagaagctgccatgttggaggcggcggggctactccctgtcattcagccgcgcagtcgctgggttctcacccgctcccaccttgtagattcgagacagggcacccaagactcccacttgctaccaccacccatgcgcctcctggaggagggccgaccggaaggagaggcatccctcacactattgtttgcataaactttaccaccttcccatcctcatgggacacacctcttaaggcctcgggtgtctgccactggctttcatgccctattccaggatcatgaatggaatgacacactctgaaccgaagagaccttacagatcatctagttctccagccttgaagatggggaaactgaggctcaaggaaggcatgtaaacagcaacctcgggattccatttaaattctgcctctctggatctgcttcctgatatataaaatggtaataaccaaaat

SEQ ID NO: 290601 - DNA, 253 bp, Homo sapiens
gtggttggggcaaagcgccagtaatggagaagcagagcccagcgcttggtgtgacggggtcccaggtagtcggatcatgaatggaatgacacactctgaaccgaagagaccttacagatcatctagttctccagccttgaagatggggaaactgaggctcaaggaaggcatgtaaacagcaacctcgggattccatttaaattctgcctctctggatctgcttcctgatatataaaatggtaataaccaaaat

SEQ ID NO: 290602 - DNA, 241 bp, Homo sapiens
agaacaacagaaaggtggagtcaaggaacttcccaatagatgagagtggagtctcgggcacggggtggagttaatcggaggggtggagaaactgaaggctctaagtatggtttaggatgagggagggggaataaggaattgagatgtgagacggagcttaggtgatggaggcaaagtgaacggactctattaaaagaccgggtgtagcaaccccagggtgtgggaggggagggggtgcaag

SEQ ID NO: 290603 - DNA, 525 bp, Homo sapiens
attctcactttccctttgcattctgttagaatggtcctgtgtctgaattccccttggaatttggatagatttaaaagtgataggaataagtagctggtctttctagcctccgcctccaggcgggtgaggaggtgacacctgagaattcctccctctcacccctgaccctgccggaaagcgaaactgagatgcgggcattgggccctgggaagcgtggggaaggggaaaggagaaagccaggtgggtttttaggtcccttccagtgccacactgtggggtgttgaggggccgcgcgaggcaggcccttccatgaggcctggactggaggccttctctaggcgccggcgctggcctgggccgcctgccgccacgcaggggccgcacgcctgggccccagggcccctttgccggcgggaggccggggggaccgactgctcttggcgcccggggtcaggggaggccgggaaacctcggctcccgggcgacaggcacccaggcccttctcagccccccggccgcggccgc

SEQ ID NO: 290604 - DNA, 2426 bp, Homo sapiens
  misc_feature (1508)..(1508): n is a, c, g, or t
  misc_feature (1639)..(1639): n is a, c, g, or t
attctcactttccctttgcattctgttagaatggtcctgtgtctgaattccccttggaatttggatagatttaaaagtgataggaataagtagctggtctttctagcctccgcctccaggcgggtgaggaggtgacacctgagaattcctccctctcacccctgaccctgccggaaagcgaaactgagatgcgggcattgggccctgggaagcgtggggaaggggaaaggagaaagccagaaaatggagaaattaagtcctttccatggatcattccttctgtaaacagagatcacaaagcaagagcttcagcatcctcgtgaaaaagacattttgttctgggtgtcatcatctccttccactacagcttgcaattggaacaagcttcacatcctgggggtgctgcctatctctgtcttgatttctgtctgtctattcctcccattgacaggaatgtcgtttgtatcctccacgcagcagtttgcagaaatccagcaaggtttatggtttatgttgcccagcatgtataaacacaacgctctcaaatgctttttaaaaatctatgaatttgttagatgtcttcacatcctggtcctcctaccccaattctcaaacacaaagtactctgttgccctattatagtcctgcgatagttctggctaggattaggttgacggtctaagccccaagaaaggcctggcattttcatagcaggctttccccagtgctttgagtcttcctctctcactccctttttctttttccctcggaggagggggtgttgggggtgggaggtgattagtaaatgtttcaggtaatctgtgaattcttaatagtcatatttccgtggtggaagatctccctatttctctgatgtgacaggttacagaaaccttggtgttgggggttttacagatatttacaagttctaggagtttgaactttgggtcaagatgttgattccttttaatgtgcgagggtgaaggaggttttattttgctttattcttttggatattatgagatgagattgtatccagtcttggctgtaacctataccataaatgcagagctgcaaccattatttctgtctctttctccttttatcacctacacttctagagatattactttcagttttattgcaaatcatctgtgtctttagtttaaaccattatttttcatataccccaggcacatttcccttataatgagacaaattttagattattaatgttccacctaaaaggatactgtacacttttcattgccaatatgggctttgaagcttaaatatcaacatttttataggaaatttacccatgtcaaatttaaatatatttgcttatatttcttggaaaaaagattttggataactatcaattaagcagccaattccatttggggtgcagaaaattttgagccccttgataagaaggaacaaaatttttcctctaaataaccaactctggatcagaaaaactgaacttttctaaatatttattattnacaaaacttttttttgtctgattccactagaagcattctatgttgtgaacactataaagttatcctatgttgtgaacaccataaagttatgagggaaaaaatgtcaaatctaaattttatttagaagtaanatattgtttttctggacttgcaatccaattcgaatgcatcgttagacttttctgttttcttatgattaaacaacaatggcttaaaatgatagcaagtcaactgaaaagttgctttggaataaaacaaaagtgggaatgccaactttcttttcttctctataacttcattaacatggttgtatagacatttgcatgtaaaatgtagctaacaaaaattacacagaagtaaatttagtcctctagtgcctacctctatggtgaaatcagaccatttggcatagtttgaagtcttccaagaagcctggtttccacctggaaaataaattactaaatttgaatgtgttacttatactatggtgagttgtctatctgttacattttattttagtgcatatactagaaattgtatttagggtgttctaaaattgtcatctgtcaaggtagagaattataataatataattatactcagaaagcgttctgattttagattattttggcactgttacaaatatgatgaattttaaaaaaatgcagaatgtttattacaaattcatatgtttaattgtcaaattctgagattaatttagataagctataaccaaagtttattttctttgcatttattggtacatagttaatgcttatacacaggcttcagtgtaacacctatacactattacaatatttagctgtacttatttgctttatctttaaatggtactttgtcccaaaattttctgagcttgataaattattaaacatttatcaaatcaaaaaagcattc

SEQ ID NO: 290605 - DNA, 2470 bp, Homo sapiens
  misc_feature (1552)..(1552): n is a, c, g, or t
  misc_feature (1683)..(1683): n is a, c, g, or t
attctcactttccctttgcattctgttagaatggtcctgtgtctgaattccccttggaatttggatagatttaaaagtgataggaataagtagctggtctttctagcctccgcctccaggcgggtgaggaggtgacacctgagaattcctccctctcacccctgaccctgccggaaagcgaaactgagatgcgggcattgggccctgggaagcgtggggaaggggaaaggagaaagccaggttaactacgtcaggattaatgtgttccacttctgctgcctgagaaaatggagaaattaagtcctttccatggatcattccttctgtaaacagagatcacaaagcaagagcttcagcatcctcgtgaaaaagacattttgttctgggtgtcatcatctccttccactacagcttgcaattggaacaagcttcacatcctgggggtgctgcctatctctgtcttgatttctgtctgtctattcctcccattgacaggaatgtcgtttgtatcctccacgcagcagtttgcagaaatccagcaaggtttatggtttatgttgcccagcatgtataaacacaacgctctcaaatgctttttaaaaatctatgaatttgttagatgtcttcacatcctggtcctcctaccccaattctcaaacacaaagtactctgttgccctattatagtcctgcgatagttctggctaggattaggttgacggtctaagccccaagaaaggcctggcattttcatagcaggctttccccagtgctttgagtcttcctctctcactccctttttctttttccctcggaggagggggtgttgggggtgggaggtgattagtaaatgtttcaggtaatctgtgaattcttaatagtcatatttccgtggtggaagatctccctatttctctgatgtgacaggttacagaaaccttggtgttgggggttttacagatatttacaagttctaggagtttgaactttgggtcaagatgttgattccttttaatgtgcgagggtgaaggaggttttattttgctttattcttttggatattatgagatgagattgtatccagtcttggctgtaacctataccataaatgcagagctgcaaccattatttctgtctctttctccttttatcacctacacttctagagatattactttcagttttattgcaaatcatctgtgtctttagtttaaaccattatttttcatataccccaggcacatttcccttataatgagacaaattttagattattaatgttccacctaaaaggatactgtacacttttcattgccaatatgggctttgaagcttaaatatcaacatttttataggaaatttacccatgtcaaatttaaatatatttgcttatatttcttggaaaaaagattttggataactatcaattaagcagccaattccatttggggtgcagaaaattttgagccccttgataagaaggaacaaaatttttcctctaaataaccaactctggatcagaaaaactgaacttttctaaatatttattattnacaaaacttttttttgtctgattccactagaagcattctatgttgtgaacactataaagttatcctatgttgtgaacaccataaagttatgagggaaaaaatgtcaaatctaaattttatttagaagtaanatattgtttttctggacttgcaatccaattcgaatgcatcgttagacttttctgttttcttatgattaaacaacaatggcttaaaatgatagcaagtcaactgaaaagttgctttggaataaaacaaaagtgggaatgccaactttcttttcttctctataacttcattaacatggttgtatagacatttgcatgtaaaatgtagctaacaaaaattacacagaagtaaatttagtcctctagtgcctacctctatggtgaaatcagaccatttggcatagtttgaagtcttccaagaagcctggtttccacctggaaaataaattactaaatttgaatgtgttacttatactatggtgagttgtctatctgttacattttattttagtgcatatactagaaattgtatttagggtgttctaaaattgtcatctgtcaaggtagagaattataataatataattatactcagaaagcgttctgattttagattattttggcactgttacaaatatgatgaattttaaaaaaatgcagaatgtttattacaaattcatatgtttaattgtcaaattctgagattaatttagataagctataaccaaagtttattttctttgcatttattggtacatagttaatgcttatacacaggcttcagtgtaacacctatacactattacaatatttagctgtacttatttgctttatctttaaatggtactttgtcccaaaattttctgagcttgataaattattaaacatttatcaaatcaaaaaagcattc

SEQ ID NO: 290606 - DNA, 1127 bp, Homo sapiens
attctcactttccctttgcattctgttagaatggtcctgtgtctgaattccccttggaatttggatagatttaaaagtgataggaataagtagctggtctttctagcctccgcctccaggcgggtgaggaggtgacacctgagaattcctccctctcacccctgaccctgccggaaagcgaaactgagatgcgggcattgggccctgggaagcgtggggaaggggaaaggagaaagccaggttaactacgtcaggattaatgtgttccacttctgctgcctgagaaaatggagaaattaagtcctttccatggatcattccttctgtaaacagagatcacaaagcaagagcttcagcatcctcgtgaaaaagacattttgttctgggtgtcatcatctccttccactacagcttgcaattggaacaagcttcacatcctgggggtgctgcctatctctgtcttgatttctgtctgtctattcctcccattgacaggaatgtcgtttgtatcctccacgcagcagtttgcagaaatccagcaaggtttatggtttatgttgcccagcatgtataaacacaacgctctcaaatgctttttaaaaatctatgaatttgttagatgtcttcacatcctggtcctcctaccccaattctcaaacacaaagtactctgttgccctattatagtcctgcgatagttctggctaggattaggttgacggtctaagccccaagaaaggcctggcattttcatagcaggctttccccagtgctttgagtcttcctctctcactccctttttctttttccctcggaggagggggtgttgggggtgggaggtgattagtaaatgtttcaggtaatctgtgaattcttaatagtcatatttccgtggtggaagatctccctatttctctgatgtgacaggttacagaaaccttggtgttgggggttttacagatatttacaagttctaggagtttgaactttgggtcaagatgttgattccttttaatgtgcgagggtgaaggaggttttattttgctttattcttttggatattatgagatgagattgtatccagtcttggctgtaacctataccataaatgcagagctgcaaccatta

SEQ ID NO: 290607 - DNA, 3002 bp, Homo sapiens
agagtgtcgcgggtgtgcttctgaggttagggtggaggactaattgaggaggctgggaagtctaactcgtgcagcggccctcggtgcagacagccgcgtaattcgggcatcagcctctttggcaagaaatagtgaggtcccctctcctccccactcttctcagctgctgcctccctcctacgggtgaattttctctcccgagaagggctgatttcctaggcttgctttccttccctcggcagcgctctgacgtgcacaccatgtgacaggcccccttctgctataagccgaggaaggtccgccctctcctggactcagccctggcctcgccgagctctgttcttagactctcacccgtcccgcacgttcctgggcgcctggcgttctgattcgcccgcccgggccccgccaccccctcctcagctgacggggcaaaagctgctccgagaggagaaggtcaagtcctccgcccgggccgggcgcgagcggagcccagggagcgcagcatccgcgcggctaccgcggcggcgcaggagttataaagtcggcgcgcgagactccgccgccacccggcagccccggcgcagctccggcagccgcagtcgcagcgcccccagcgtggcgccccccggccgggcctgccgcccgggacccgggctggggcgcagagggagcccggagcccggcgcccccatgcgccgccccgccgccgccgcgccacagctatgaccctgagcactgagatgtccgatgcctctggcctcgccgaggaaacagacatcgacgtggtgggggagggcgaggacgaagaagacgaggaagaggaggacgacgacgagggcggcggtggcgggccccggctggctgtccccgcgcagcggcggcggcggcggcgctcgtacgccggggaggacgagctggaggatctggaggaggaggaggacgacgatgacatcctgctggccccgcctgctgggggctccccggcgcccccgggcccggccccggcggcgggggcaggagccggtgggggcggcggcggcggcggcgcgggcggcggcgggagcgcgggtagcggcgccaagaacccgctggtgaagccgccctactcgtatatcgcgctcatcactatggccatcctgcagagccccaagaagcggctgacgctgagcgagatctgtgagttcatcagcggccgcttcccctactaccgggagaagttccccgcctggcagaacagcatccgccacaacctctcgctcaacgactgcttcgtcaagatcccccgcgagcccggcaacccgggcaagggcaactactggacgctggacccggagtccgccgacatgttcgacaacggcagcttcctgcgccggaggaagcgcttcaagcggcagccgctgctcccacccaacgccgcggccgccgagtctctgctgctgcgcggcgcgggagccgcagggggcgcgggcgacccggcagccgccgccgcgctcttcccgcccgcgcccccgccgcccccgcatgcctacggctacggcccctacggctgcggctacggcctgcagctgccgccttacgcgccgccctcggccctcttcgccgccgcagcggccgccgccgccgccgccgccttccacccgcactcgcccccgccgcccccgccaccgcacggcgcggccgccgagctggcccggaccgccttcggctaccggccgcacccgctcggcgccgccctacccggccccctgccggcctccgcggccaaggcgggcggcccgggcgcctcagcgctggcgcgctcgcccttctccatcgagagcatcatcgggggcagcttgggcccggccgccgctgccgccgccgccgcgcaggccgccgccgccgctcaggcctcgccctcgccctcgccggtggcggcgccgccagctcccggatccagcggaggaggctgcgcggcgcaggcggccgtgggcccggcggccgcgctcacccgatccctcgtggccgccgcggccgccgccgcctcctcagtctcctcgtccgccgccttggggactctgcaccaagggactgccctgtccagtgtcgagaactttactgctaggatttccaattgttaataacgctatgttagcgcgctcgaggaagaaggtaggaatcccggctccttttctcgtcttggtggttcggtgttttgttcgctcctccaggcgcggcccctctcgacctcgcgcgcccattttcgccgctgcgaattctcggacaaaactgtcaacagcccgggcgcgccttttggctctgcgggtccctctatttatgcaaagccgacctatgctacagccccccaacccccgacctggggtagggaggaagagggtgccggggaagggagtccgccctgtccaggcactagaggctcccttgacgtttggcagatgaaaaacaactaagcctttttgaggtgtagagattctcaggtccaggcgttaaaaaataatggtcaaaagaataatacaaaaatagtaaaggtcttgaagaatgccagcgaagcaattcttttttatttgaggacacttgtctggtgtactttttcatgaaaaggaaaaatggttaacatgtttacacaagaaaaaaagtcaaaattatcatttatttcaacctgtgttttgtatcataacagacgtgtggatttttttgtacttactgcgtattctttacaaggagtattgtaaattttactggcaattattattgtactattctaaatgtaagatttttacactttttcagaaataaaaatgcttaattttcaaagaaaattcaccaaaaaaagaaaaaaaaaaaaatttggggccgggccgaaaagttttaacccctttggggggggccgatgtaataaagctcttctccagaaacggccgacagggggttcccaaaaagcggggccggctgacacccgggtggcttgttcacgctctcctcccgtgccggggggggcg

SEQ ID NO: 290608 - DNA, 2786 bp, Homo sapiens
agagtgtcgcgggtgtgcttctgaggttagggtggaggactaattgaggaggctgggaagtctaactcgtgcagcggccctcggtgcagacagccgcgtaattcgggcatcagcctctttggcaagaaatagtgaggtcccctctcctccccactcttctcagctgctgcctccctcctacgggtgaattttctctcccgagaagggctgatttcctaggcttgctttccttccctcggcagcgctctgacgtgcacaccatgtgacaggcccccttctgctataagccgaggaaggtccgccctctcctggactcagccctggcctcgccgagctctgttcttagactctcacccgtcccgcacgttcctgggcgcctggcgttctgattcgcccgcccgggccccgccaccccctcctcagctgacggggcaaaagctgctccgagaggagaaggtcaagtcctccgcccgggccgggcgcgagcggagcccagggagcgcagcatccgcgcggctaccgcggcggcgcaggagttataaagtcggcgcgcgagactccgccgccacccggcagccccggcgcagctccggcagccgcagtcgcagcgcccccagcgtggcgccccccggccgggcctgccgcccgggacccgggctggggcgcagagggagcccggagcccggcgcccccatgcgccgccccgccgccgccgcgccacagctatgaccctgagcactgagatgtccgatgcctctggcctcgccgaggaaacagacatcgacgtggtgggggagggcgaggacgaagaagacgaggaagaggaggacgacgacgagggcggcgggagcgcgggtagcggcgccaagaacccgctggtgaagccgccctactcgtatatcgcgctcatcactatggccatcctgcagagccccaagaagcggctgacgctgagcgagatctgtgagttcatcagcggccgcttcccctactaccgggagaagttccccgcctggcagaacagcatccgccacaacctctcgctcaacgactgcttcgtcaagatcccccgcgagcccggcaacccgggcaagggcaactactggacgctggacccggagtccgccgacatgttcgacaacggcagcttcctgcgccggaggaagcgcttcaagcggcagccgctgctcccacccaacgccgcggccgccgagtctctgctgctgcgcggcgcgggagccgcagggggcgcgggcgacccggcagccgccgccgcgctcttcccgcccgcgcccccgccgcccccgcatgcctacggctacggcccctacggctgcggctacggcctgcagctgccgccttacgcgccgccctcggccctcttcgccgccgcagcggccgccgccgccgccgccgccttccacccgcactcgcccccgccgcccccgccaccgcacggcgcggccgccgagctggcccggaccgccttcggctaccggccgcacccgctcggcgccgccctacccggccccctgccggcctccgcggccaaggcgggcggcccgggcgcctcagcgctggcgcgctcgcccttctccatcgagagcatcatcgggggcagcttgggcccggccgccgctgccgccgccgccgcgcaggccgccgccgccgctcaggcctcgccctcgccctcgccggtggcggcgccgccagctcccggatccagcggaggaggctgcgcggcgcaggcggccgtgggcccggcggccgcgctcacccgatccctcgtggccgccgcggccgccgccgcctcctcagtctcctcgtccgccgccttggggactctgcaccaagggactgccctgtccagtgtcgagaactttactgctaggatttccaattgttaataacgctatgttagcgcgctcgaggaagaaggtaggaatcccggctccttttctcgtcttggtggttcggtgttttgttcgctcctccaggcgcggcccctctcgacctcgcgcgcccattttcgccgctgcgaattctcggacaaaactgtcaacagcccgggcgcgccttttggctctgcgggtccctctatttatgcaaagccgacctatgctacagccccccaacccccgacctggggtagggaggaagagggtgccggggaagggagtccgccctgtccaggcactagaggctcccttgacgtttggcagatgaaaaacaactaagcctttttgaggtgtagagattctcaggtccaggcgttaaaaaataatggtcaaaagaataatacaaaaatagtaaaggtcttgaagaatgccagcgaagcaattcttttttatttgaggacacttgtctggtgtactttttcatgaaaaggaaaaatggttaacatgtttacacaagaaaaaaagtcaaaattatcatttatttcaacctgtgttttgtatcataacagacgtgtggatttttttgtacttactgcgtattctttacaaggagtattgtaaattttactggcaattattattgtactattctaaatgtaagatttttacactttttcagaaataaaaatgcttaattttcaaagaaaattcaccaaaaaaagaaaaaaaaaaaaatttggggccgggccgaaaagttttaacccctttggggggggccgatgtaataaagctcttctccagaaacggccgacagggggttcccaaaaagcggggccggctgacacccgggtggcttgttcacgctctcctcccgtgccggggggggcg

SEQ ID NO: 290609 - DNA, 2082 bp, Homo sapiens
agagtgtcgcgggtgtgcttctgaggttagggtggaggactaattgaggaggctgggaagtctaactcgtgcagcggccctcggtgcagacagccgcgtaattcgggcatcagcctctttggcaagaaatagtgaggtcccctctcctccccactcttctcagctgctgcctccctcctacgggtgaattttctctcccgagaagggctgatttcctaggcttgctttccttccctcggcagcgctctgacgtgcacaccatgtgacaggcccccttctgctataagccgaggaaggtccgccctctcctggactcagccctggcctcgccgagctctgttcttagactctcacccgtcccgcacgttcctgggcgcctggcgttctgattcgcccgcccgggccccgccaccccctcctcagctgacggggcaaaagctgctccgagaggagaaggtcaagtcctccgcccgggccgggcgcgagcggagcccagggagcgcagcatccgcgcggctaccgcggcggcgcaggagttataaagtcggcgcgcgagactccgccgccacccggcagccccggcgcagctccggcagccgcagtcgcagcgcccccagcgtggcgccccccggccgggcctgccgcccgggacccgggctggggcgcagagggagcccggagcccggcgcccccatgcgccgccccgccgccgccgcgccacagctatgaccctgagcactgagatgtccgatgcctctggcctcgccgaggaaacagacatcgacgtggtgggggagggcgaggacgaagaagacgaggaagaggaggacgacgacgagggcggcgggagcgcgggtagcggcgccaagaacccgctggtgaagccgccctactcgtatatcgcgctcatcactatggccatcctgcagagccccaagaagcggctgacgctgagcgagatctgtgagttcatcagcggccgcttcccctactaccgggagaagttccccgcctggcagaacagcatccgccacaacctctcgctcaacgactgcttcgtcaagatcccccgcgagcccggcaacccgggcaagggcaactactggacgctggacccggaggtccgccgccttggggactctgcaccaagggactgccctgtccagtgtcgagaactttactgctaggatttccaattgttaataacgctatgttagcgcgctcgaggaagaaggtaggaatcccggctccttttctcgtcttggtggttcggtgttttgttcgctcctccaggcgcggcccctctcgacctcgcgcgcccattttcgccgctgcgaattctcggacaaaactgtcaacagcccgggcgcgccttttggctctgcgggtccctctatttatgcaaagccgacctatgctacagccccccaacccccgacctggggtagggaggaagagggtgccggggaagggagtccgccctgtccaggcactagaggctcccttgacgtttggcagatgaaaaacaactaagcctttttgaggtgtagagattctcaggtccaggcgttaaaaaataatggtcaaaagaataatacaaaaatagtaaaggtcttgaagaatgccagcgaagcaattcttttttatttgaggacacttgtctggtgtactttttcatgaaaaggaaaaatggttaacatgtttacacaagaaaaaaagtcaaaattatcatttatttcaacctgtgttttgtatcataacagacgtgtggatttttttgtacttactgcgtattctttacaaggagtattgtaaattttactggcaattattattgtactattctaaatgtaagatttttacactttttcagaaataaaaatgcttaattttcaaagaaaattcaccaaaaaaagaaaaaaaaaaaaatttggggccgggccgaaaagttttaacccctttggggggggccgatgtaataaagctcttctccagaaacggccgacagggggttcccaaaaagcggggccggctgacacccgggtggcttgttcacgctctcctcccgtgccggggggggcg

SEQ ID NO: 290610 - DNA, 794 bp, Homo sapiens
aaatggtggatccccctggattgcaggaatagggcaaaaaacccatggaattctcggacaaaactgtcaacagcccgggcgcgccttttggctctgcgggtccctctatttatgcaaagccgacctatgctacagccccccaacccccgacctggggtagggaggaagagggtgccggggaagggagtccgccctgtccaggcactagaggctcccttgacgtttggcagatgaaaaacaactaagcctttttgaggtgtagagattctcaggtccaggcgttaaaaaataatggtcaaaagaataatacaaaaatagtaaaggtcttgaagaatgccagcgaagcaattcttttttatttgaggacacttgtctggtgtactttttcatgaaaaggaaaaatggttaacatgtttacacaagaaaaaaagtcaaaattatcatttatttcaacctgtgttttgtatcataacagacgtgtggatttttttgtacttactgcgtattctttacaaggagtattgtaaattttactggcaattattattgtactattctaaatgtaagatttttacactttttcagaaataaaaatgcttaattttcaaagaaaattcaccaaaaaaagaaaaaaaaaaaaatttggggccgggccgaaaagttttaacccctttggggggggccgatgtaataaagctcttctccagaaacggccgacagggggttcccaaaaagcggggccggctgacacccgggtggcttgttcacgctctcctcccgtgccggggggggcg

SEQ ID NO: 290611 - DNA, 2985 bp, Homo sapiens
agagtgtcgcgggtgtgcttctgaggttagggtggaggactaattgaggaggctgggaagtctaactcgtgcagcggccctcggtgcagacagccgcgtaattcgggcatcagcctctttggcaagaaatagtgaggtcccctctcctccccactcttctcagctgctgcctccctcctacgggtgaattttctctcccgagaagggctgatttcctaggcttgctttccttccctcggcagcgctctgacgtgcacaccatgtgacaggcccccttctgctataagccgaggaaggtccgccctctcctggactcagccctggcctcgccgagctctgttcttagactctcacccgtcccgcacgttcctgggcgcctggcgttctgattcgcccgcccgggccccgccaccccctcctcagctgacggggcaaaagctgctccgagaggagaaggtcaagtcctccgcccgggccgggcgcgagcggagcccagggagcgcagcatccgcgcggctaccgcggcggcgcaggagttataaagtcggcgcgcgagactccgccgccacccggcagccccggcgcagctccggcagccgcagtcgcagcgcccccagcgtggcgccccccggccgggcctgccgcccgggacccgggctggggcgcagagggagcccggagcccggcgcccccatgcgccgccccgccgccgccgcgccacagctatgaccctgagcactgagatgtccgatgcctctggcctcgccgaggaaacagacatcgacgtggtgggggagggcgaggacgaagaagacgaggaagaggaggacgacgacgagggcggcggtggcgggccccggctggctgtccccgcgcagcggcggcggcggcggcgctcgtacgccggggaggacgagctggaggatctggaggaggaggaggacgacgatgacatcctgctggccccgcctgctgggggctccccggcgcccccgggcccggccccggcggcgggggcaggagccggtgggggcggcggcggcggcggcgcgggcggcggcgggagcgcgggtagcggcgccaagaacccgctggtgaagccgccctactcgtatatcgcgctcatcactatggccatcctgcagagccccaagaagcggctgacgctgagcgagatctgtgagttcatcagcggccgcttcccctactaccgggagaagttccccgcctggcagaacagcatccgccacaacctctcgctcaacgactgcttcgtcaagatcccccgcgagcccggcaacccgggcaagggcaactactggacgctggacccggagtccgccgacatgttcgacaacggcagcttcctgcgccggaggaagcgcttcaagcggcagccgctgctcccacccaacgccgcggccgccgagtctctgctgctgcgcggcgcgggagccgcagggggcgcgggcgacccggcagccgccgccgcgctcttcccgcccgcgcccccgccgcccccgcatgcctacggctacggcccctacggctgcggctacggcctgcagctgccgccttacgcgccgccctcggccctcttcgccgccgcagcggccgccgccgccgccgccgccttccacccgcactcgcccccgccgcccccgccaccgcacggcgcggccgccgagctggcccggaccgccttcggctaccggccgcacccgctcggcgccgccctacccggccccctgccggcctccgcggccaaggcgggcggcccgggcgcctcagcgctggcgcgctcgcccttctccatcgagagcatcatcgggggcagcttgggcccggccgccgctgccgccgccgccgcgcaggccgccgccgccgctcaggcctcgccctcgccctcgccggtggcggcgccgccagctcccggatccagcggaggaggctgcgcggcgcaggcggccgtgggcccggcggccgcgctcacccgatccctcgtggccgccgcggccgccgccgcctcctcagtctcctcgtccgccgccttggggactctgcaccaagggactgccctgtccagtgtcgagaactttactgctaggatttccaattgttaataacgctatgttagcgcgctcgaggaagaaggtaggaatcccggctccttttctcgtcttggtggttcggtgttttgttcgctcctccaggcgcggcccctctcgacctcgcgcgcccattttcgccgctgcgaattctcggacaaaactgtcaacagcccgggcgcgccttttggctctgcgggtccctctatttatgcaaagccgacctatgctacagccccccaacccccgacctggggtagggaggaagagggtgccggggaagggagtccgccctgtccaggcactagaggctcccttgacgtttggcagatgaaaaacaactaagcctttttgaggtgtagagattctcaggtccaggcgttaaaaaataatggtcaaaagaataatacaaaaatagtaaaggtcttgaagaatgccagcgaagcaattcttttttatttgaggacacttgtctggtgtactttttcatgaaaaggaaaaatggttaacatgtttacacaagaaaaaaagtcaaaattatcatttatttcaacctgtgttttgtatcataacagacgtgtggatttttttgtacttactgcgtattctttacaaggagtattgtaaattttactggcaattattattgtactattctaaatgtaagatttttacactttttcagaaataaatggttatttcaagaaatccaaaaaaaaaaaaaaagagaaaaaaaaaaaggggggtaaaaatacggggccattggcccgtttgaagggcaagaaggagaaaaaaggggggaaaggggaaaggggttggggctggggtgagcccaaaggaaagtggagtggttatataatagacgggaagagaaaga

SEQ ID NO: 290612 - DNA, 2192 bp, Homo sapiens
agagtgtcgcgggtgtgcttctgaggttagggtggaggactaattgaggaggctgggaagtctaactcgtgcagcggccctcggtgcagacagccgcgtaattcgggcatcagcctctttggcaagaaatagtgaggtcccctctcctccccactcttctcagctgctgcctccctcctacgggtgaattttctctcccgagaagggctgatttcctaggcttgctttccttccctcggcagcgctctgacgtgcacaccatgtgacaggcccccttctgctataagccgaggaaggtccgccctctcctggactcagccctggcctcgccgagctctgttcttagactctcacccgtcccgcacgttcctgggcgcctggcgttctgattcgcccgcccgggccccgccaccccctcctcagctgacggggcaaaagctgctccgagaggagaaggtcaagtcctccgcccgggccgggcgcgagcggagcccagggagcgcagcatccgcgcggctaccgcggcggcgcaggagttataaagtcggcgcgcgagactccgccgccacccggcagccccggcgcagctccggcagccgcagtcgcagcgcccccagcgtggcgccccccggccgggcctgccgcccgggacccgggctggggcgcagagggagcccggagcccggcgcccccatgcgccgccccgccgccgccgcgccacagctatgaccctgagcactgagatgtccgatgcctctggcctcgccgaggaaacagacatcgacgtggtgggggagggcgaggacgaagaagacgaggaagaggaggacgacgacgagggcggcgggagcgcgggtagcggcgccaagaacccgctggtgaagccgccctactcgtatatcgcgctcatcactatggccatcctgcagagccccaagaagcggctgacgctgagcgagatctgtgagttcatcagcggccgcttcccctactaccgggagaagttccccgcctggcagaacagcatccgccacaacctctcgctcaacgactgcttcgtcaagatcccccgcgagcccggcaacccgggcaagggcaactactggacgctggacccggagtccgccgacatgttcgacaacggcagcttcctgcgccggaggaagcgcttcaagcggcagccgctgctcccacccaacgccgcggccgccgccgcctcctcagtctcctcgtccgccgccttggggactctgcaccaagggactgccctgtccagtgtcgagaactttactgctaggatttccaattgttaataacgctatgttagcgcgctcgaggaagaaggtaggaatcccggctccttttctcgtcttggtggttcggtgttttgttcgctcctccaggcgcggcccctctcgacctcgcgcgcccattttcgccgctgcgaattctcggacaaaactgtcaacagcccgggcgcgccttttggctctgcgggtccctctatttatgcaaagccgacctatgctacagccccccaacccccgacctggggtagggaggaagagggtgccggggaagggagtccgccctgtccaggcactagaggctcccttgacgtttggcagatgaaaaacaactaagcctttttgaggtgtagagattctcaggtccaggcgttaaaaaataatggtcaaaagaataatacaaaaatagtaaaggtcttgaagaatgccagcgaagcaattcttttttatttgaggacacttgtctggtgtactttttcatgaaaaggaaaaatggttaacatgtttacacaagaaaaaaagtcaaaattatcatttatttcaacctgtgttttgtatcataacagacgtgtggatttttttgtacttactgcgtattctttacaaggagtattgtaaattttactggcaattattattgtactattctaaatgtaagatttttacactttttcagaaataaaaatgcttaattttcaaagaaaattcaccaaaaaaagaaaaaaaaaaaaatttggggccgggccgaaaagttttaacccctttggggggggccgatgtaataaagctcttctccagaaacggccgacagggggttcccaaaaagcggggccggctgacacccgggtggcttgttcacgctctcctcccgtgccggggggggcg

SEQ ID NO: 290613 - DNA, 2582 bp, Homo sapiens
agagtgtcgcgggtgtgcttctgaggttagggtggaggactaattgaggaggctgggaagtctaactcgtgcagcggccctcggtgcagacagccgcgtaattcgggcatcagcctctttggcaagaaatagtgaggtcccctctcctccccactcttctcagctgctgcctccctcctacgggtgaattttctctcccgagaagggctgatttcctaggcttgctttccttccctcggcagcgctctgacgtgcacaccatgtgacaggcccccttctgctataagccgaggaaggtccgccctctcctggactcagccctggcctcgccgagctctgttcttagactctcacccgtcccgcacgttcctgggcgcctggcgttctgattcgcccgcccgggccccgccaccccctcctcagctgacggggcaaaagctgctccgagaggagaaggtcaagtcctccgcccgggccgggcgcgagcggagcccagggagcgcagcatccgcgcggctaccgcggcggcgcaggagttataaagtcggcgcgcgagactccgccgccacccggcagccccggcgcagctccggcagccgcagtcgcagcgcccccagcgtggcgccccccggccgggcctgccgcccgggacccgggctggggcgcagagggagcccggagcccggcgcccccatgcgccgccccgccgccgccgcgccacagctatgaccctgagcactgagatgtccgatgcctctggcctcgccgaggaaacagacatcgacgtggtgggggagggcgaggacgaagaagacgaggaagaggaggacgacgacgagggcggcgggagcgcgggtagcggcgccaagaacccgctggtgaagccgccctactcgtatatcgcgctcatcactatggccatcctgcagagccccaagaagcggctgacgctgagcgagatctgtgagttcatcagcggccgcttcccctactaccgggagaagttccccgcctggcagaacagcatccgccacaacctctcgctcaacgactgcttcgtcaagatcccccgcgagcccggcaacccgggcaagggcaactactggacgctggacccggagtccgccgacatgttcgacaacggcagcttcctgcgccggaggaagcgcttcaagcggcagccgctgctcccacccaacgccgcggccgccgagtctctgctgctgcgcggcgcgggagccgcagggggcgcgggcgacccggcagccgccgccgcgctcttcccgcccgcgcccccgccgcccccgcatgcctacggctacggcccctacggctgcggctacggcctgcagctgccgccttacgcgccgccctcggccctcttcgccgccgcagcggccgccgccgccgccgccgccttccacccgcactcgcccccgccgcccccgccaccgcacggcgcggccgccgagctggcccggaccgccttcggctaccggccgcacccgctcggcgccgccctacccggccccctgccggcctccgcggccaaggcgggcggcccgggcgcctcagcgctggcgcgctcgcccttctccatcgagagcatcatcgggggcagcttgggcccggccgccgctgccgccgccgccgcgcaggccgccgccgccgctcaggcctcgccctcgccctcgccggtggcggcgccgccagctcccggatccagcggaggaggctgcgcggcgcaggcggccgtgggcccggcggccgcgctcacccgatccctcgtggccgccgcggccgccgccgcctcctcagtctcctcgtccgccgccttggggactctgcaccaagggactgccctgtccagtgtcgagaactttactgctaggatttccaattgttaataacgctatgctacagccccccaacccccgacctggggtagggaggaagagggtgccggggaagggagtccgccctgtccaggcactagaggctcccttgacgtttggcagatgaaaaacaactaagcctttttgaggtgtagagattctcaggtccaggcgttaaaaaataatggtcaaaagaataatacaaaaatagtaaaggtcttgaagaatgccagcgaagcaattcttttttatttgaggacacttgtctggtgtactttttcatgaaaaggaaaaatggttaacatgtttacacaagaaaaaaagtcaaaattatcatttatttcaacctgtgttttgtatcataacagacgtgtggatttttttgtacttactgcgtattctttacaaggagtattgtaaattttactggcaattattattgtactattctaaatgtaagatttttacactttttcagaaataaaaatgcttaattttcaaagaaaattcaccaaaaaaagaaaaaaaaaaaaatttggggccgggccgaaaagttttaacccctttggggggggccgatgtaataaagctcttctccagaaacggccgacagggggttcccaaaaagcggggccggctgacacccgggtggcttgttcacgctctcctcccgtgccggggggggcg

SEQ ID NO: 290614 - DNA, 225 bp, Homo sapiens
ctgaatttgcagctcggtaagtcatggactccatgttttatcattgaatgtatatatacgagataaaccatactatggaaagagagccgctgtttgcttcacagacagatgggtttgatttgggagtaatctagtgttttggattggctgtcactgctatcctcttcagcatgaccatctgaattataaactggtactcactgggcttcataggactatgggcat

SEQ ID NO: 290615 - DNA, 750 bp, Homo sapiens
gctaggggagcatcgggcaagggttcttcccatgactgtaaggtagtgatgtttcctcttcctccacagcccaggcttgcatccctccctgcggtctccaggagttcgcccggcgtttcctctgcagcgggtgctactctagggtctgcgacctcccgctggactgcccagttcaggatgtgacagtgactcggggcgaccaggctatgttttcttgcatcgtaaacttccagctgccaaaggaggagatcacctattcctggaagttcgcaggaggaggtctccggactcaggacttgtcctatttccgagatatgccgcgggccgaaggatacctggcgcggatccggccggctcagctcacgcaccgcgggacgttctcctgcgtgatcaagcaagaccagcgccccctggcccggctctacttctttcttaacgtgacgggcccgcccccgcgggcggagacagagttgcaggcctcgttccgggaagtgctgcgctgggcgccgcgggatgccgagctgatcgagccctggaggcccagcctgggcgagctgctggccaggcccgaggctctgacgcccagcaatctgttcctgcttgcagtcctcggggccctcgcatcagcgagtgcgacagtgttggcgtggatgttctttcgatggtactgcagtggcaactaacaaaggtatctttcctccttccctatcctatttccatcctgaaaataaagaatatatttcaactcta

SEQ ID NO: 290616 - DNA, 717 bp, Homo sapiens
cctcctccctcagatccaagagtccagacccccaagtttctcttccttcagacccaaaagcccaggccccctgccccctcctccctcagaaccaggagtccgggccctgtacacctttttgaccctggtgtccaggcctccgggacctaagtttctagtcaccaacccctcctgtaacacacatacctctttgtttccccaggatgttctttcgatggtactgcagtggcaactaacaaaggtatctttcctccttccctatcctatttccatcctgaaaataaagaatatatttcaactctagattgtttcatctccgaaggtggtcactactaactcaggtaggaggaggtgcagcaagcccacacatgcccagatgaatatggcccgcataatgacagtgataggcatagctatcccagtgcaagttaggtgggaacccagataccccctcaggttactggctgtctccttgacatttccatctgcagaaggcaccctcaaatagagtcctccatgttgccctcagaggctgttcctccccaaggctttcctcctaccagaaagagcaacaccatccacctagcagttcaaaccagaaaccttggaatctaacttctcctccacttccaattcattttcatttccaaccctcagactttttaactcctaaatatctcatgaagctgccttctctgtggtcccagtcacccccac

SEQ ID NO: 290617 - DNA, 303 bp, Homo sapiens
cctcctccctcagatccaagagtccagacccccaagtttctcttccttcagacccaaaagcccaggccccctgccccctcctccctcagaaccaggagtccgggccctgtacacctttttgaccctggtgtccaggcctccgggacctaagtttctagtcaccaacccctcctgtaacacacatacctctttgtttccccaggatgttctttcgatggtactgcagtggcaactaacaaaggtatctttcctccttccctatcctatttccatcctgaaaataaagaatatatttcaactcta

SEQ ID NO: 290618 - DNA, 400 bp, Homo sapiens
actagtaatattactagtgaattcactagtaatattactagtgaattcactagtaatgcgccgcgggatgccgagctgatcgagccctggaggcccagcctgggcgagctgctggccaggcccgaggctctgacgcccagcaatctgttcctgcttgcagtcctcggggccctcgcatcagcgagtgcgacagtgttggcgtggtgagttctggggactccggagccccagcatctagctccccgctgtctcagatcccaccgagaagtctgggttcccagcaacctccaacccaggaggatgttctttcgatggtactgcagtggcaactaacaaaggtatctttcctccttccctatcctatttccatcctgaaaataaagaatatatttcaactcta

SEQ ID NO: 290619 - DNA, 1763 bp, Homo sapiens
gccagtgccgtcccgtctgccctgctggccctggctgtcttcagggtgcccgcctgggcctgtctcctctgcttcacaacctactctgagcgcctccgcatctgccagatgtttgttgggatgcggagccccaagcttgaagagtgtgaggaggccttcacggccgccttccagggcctctctgacaccgaaatcagtgaggagaccatccacacttcatcagtgtcctggggaaggtgcagagggagggcaggagaggcccagagggtcaggctgagggacagacagagagaaacagtcagaggagaaaggctcaaagaccatgagaacaacagagacttagggacagagagacacagacaggggaagacagcagggcaaagactcagagaggggaggatggagagtcagagaggggaagatggagactcagagagggggaggatggagactcagagagagaggaagatggagactcggaaagatggagactcaggagtatggagagtcagagaggggaggatggacactcaggggaggatggagagtcaggaggatggagactcatagaaaggggaggatggagagtcaggagaggttggagactggagagggaatagagacccagagaggggaggatggagactcagagggtggaagatggagactcaaagaggatggaaacccagagagaggaggacagagatgaggcagagactaggggaagcaggatagcgactggtcgggggcagagactcagggaggatagagacttgggagggactcaggaagcatagcgactgtggggcaaagagtcagagaggggaggatacagacttgggagggcagagactcagaaacagaatgttcgcattagggacatggtgtagcggggagctgcctcccccagcccctgctccctccctcaccgccagactatgatgagagaagccacctgcatgacaccttcacccagatgacccatgccctgcaggagctggctgctgcccagggatcctttgaggttgccttccctgatgctgcggagaaaatgaagaaggtcattacacagcttaaagaagcccaggcttgcatccctccctgcggtctccaggagttcgcccggcgtttcctctgcagcgggtgctactctagggtctgcgacctcccgctggactgcccagttcaggatgtgacagtgactcggggcgaccaggctatgttttcttgcatcgtaaacttccagctgccaaaggaggagatcacctattcctggaagttcgcaggaggaggtctccggactcaggacttgtcctatttccgagatatgccgcgggccgaaggatacctggcgcggatccggccggctcagctcacgcaccgcgggacgttctcctgcgtgatcaagcaagaccagcgccccctggcccggctctacttctttcttaacgtgacgggcccgcccccgcgggcggagacagagttgcaggcctcgttccgggaagtgctgcgctgggcgccgcgggatgccgagctgatcgagccctggaggcccagcctgggcgagctgctggccaggcccgaggctctgacgcccagcaatctgttcctgcttgcagtcctcggggccctcgcatcagcgagtgcgacagtgttggcgtggatgttctttcgatggtactgcagtggcaactaacaaaggtatctttcctccttccctatcctatttccatcctgaaaataaagaatatatttcaactcta

SEQ ID NO: 290620 - DNA, 813 bp, Homo sapiens
gagaggagtgagagtcggccaaagacagcagggagggcggggtcaagatgccacctggccgatggaccccgggaagctgcatggatctcaaatgggccaagggccccgggcttggaagggcaggtggcgcctagacccagcgttcccgctccacaggtctccaggagttcgcccggcgtttcctctgcagcgggtgctactctagggtctgcgacctcccgctggactgcccagttcaggatgtgacagtgactcggggcgaccaggctatgttttcttgcatcgtaaacttccagctgccaaaggaggagatcacctattcctggaagttcgcaggaggaggtctccggactcaggacttgtcctatttccgagatatgccgcgggccgaaggatacctggcgcggatccggccggctcagctcacgcaccgcgggacgttctcctgcgtgatcaagcaagaccagcgccccctggcccggctctacttctttcttaacgtgacgggcccgcccccgcgggcggagacagagttgcaggcctcgttccgggaagtgctgcgctgggcgccgcgggatgccgagctgatcgagccctggaggcccagcctgggcgagctgctggccaggcccgaggctctgacgcccagcaatctgttcctgcttgcagtcctcggggccctcgcatcagcgagtgcgacagtgttggcgtggatgttctttcgatggtactgcagtggcaactaacaaaggtatctttcctccttccctatcctatttccatcctgaaaataaagaatatatttcaactcta

SEQ ID NO: 290621 - DNA, 1846 bp, Homo sapiens
gccagtgccgtcccgtctgccctgctggccctggctgtcttcagggtgcccgcctgggcctgtctcctctgcttcacaacctactctgagcgcctccgcatctgccagatgtttgttgggatgcggagccccaagcttgaagagtgtgaggaggccttcacggccgccttccagggcctctctgacaccgaaatcagtgaggagaccatccacacttcatcagtgtcctggggaaggtgcagagggagggcaggagaggcccagagggtcaggctgagggacagacagagagaaacagtcagaggagaaaggctcaaagaccatgagaacaacagagacttagggacagagagacacagacaggggaagacagcagggcaaagactcagagaggggaggatggagagtcagagaggggaagatggagactcagagagggggaggatggagactcagagagagaggaagatggagactcggaaagatggagactcaggagtatggagagtcagagaggggaggatggacactcaggggaggatggagagtcaggaggatggagactcatagaaaggggaggatggagagtcaggagaggttggagactggagagggaatagagacccagagaggggaggatggagactcagagggtggaagatggagactcaaagaggatggaaacccagagagaggaggacagagatgaggcagagactaggggaagcaggatagcgactggtcgggggcagagactcagggaggatagagacttgggagggactcaggaagcatagcgactgtggggcaaagagtcagagaggggaggatacagacttgggagggcagagactcagaaacagaatgttcgcattagggacatggtgtagcggggagctgcctcccccagcccctgctccctccctcaccgccagactatgatgagagaagccacctgcatgacaccttcacccagatgacccatgccctgcaggagctggctgctgcccagggatcctttgaggttgccttccctgatgctgcggagaaaatgaagaaggtcattacacagcttaaagaagcccaggcttgcatccctccctgcggtctccaggagttcgcccggcgtttcctctgcagcgggtgctactctagggtctgcgacctcccgctggactgcccagttcaggatgtgacagtgactcggggcgaccaggctatgttttcttgcatcgtaaacttccagctgccaaaggaggagatcacctattcctggaagttcgcaggaggaggtctccggactcaggacttgtcctatttccgagatatgccgcgggccgaaggatacctggcgcggatccggccggctcagctcacgcaccgcgggacgttctcctgcgtgatcaagcaagaccagcgccccctggcccggctctacttctttcttaacggtggggcggggcgcggccgcgtgagtgagcggggtcgggagaggggtggggctcgtgcctggctgacgtgcgcgcccccgcagtgacgggcccgcccccgcgggcggagacagagttgcaggcctcgttccgggaagtgctgcgctgggcgccgcgggatgccgagctgatcgagccctggaggcccagcctgggcgagctgctggccaggcccgaggctctgacgcccagcaatctgttcctgcttgcagtcctcggggccctcgcatcagcgagtgcgacagtgttggcgtggatgttctttcgatggtactgcagtggcaactaacaaaggtatctttcctccttccctatcctatttccatcctgaaaataaagaatatatttcaactcta

SEQ ID NO: 290622 - DNA, 896 bp, Homo sapiens
gagaggagtgagagtcggccaaagacagcagggagggcggggtcaagatgccacctggccgatggaccccgggaagctgcatggatctcaaatgggccaagggccccgggcttggaagggcaggtggcgcctagacccagcgttcccgctccacaggtctccaggagttcgcccggcgtttcctctgcagcgggtgctactctagggtctgcgacctcccgctggactgcccagttcaggatgtgacagtgactcggggcgaccaggctatgttttcttgcatcgtaaacttccagctgccaaaggaggagatcacctattcctggaagttcgcaggaggaggtctccggactcaggacttgtcctatttccgagatatgccgcgggccgaaggatacctggcgcggatccggccggctcagctcacgcaccgcgggacgttctcctgcgtgatcaagcaagaccagcgccccctggcccggctctacttctttcttaacggtggggcggggcgcggccgcgtgagtgagcggggtcgggagaggggtggggctcgtgcctggctgacgtgcgcgcccccgcagtgacgggcccgcccccgcgggcggagacagagttgcaggcctcgttccgggaagtgctgcgctgggcgccgcgggatgccgagctgatcgagccctggaggcccagcctgggcgagctgctggccaggcccgaggctctgacgcccagcaatctgttcctgcttgcagtcctcggggccctcgcatcagcgagtgcgacagtgttggcgtggatgttctttcgatggtactgcagtggcaactaacaaaggtatctttcctccttccctatcctatttccatcctgaaaataaagaatatatttcaactcta

SEQ ID NO: 290623 - DNA, 2260 bp, Homo sapiens
gccagtgccgtcccgtctgccctgctggccctggctgtcttcagggtgcccgcctgggcctgtctcctctgcttcacaacctactctgagcgcctccgcatctgccagatgtttgttgggatgcggagccccaagcttgaagagtgtgaggaggccttcacggccgccttccagggcctctctgacaccgaaatcagtgaggagaccatccacacttcatcagtgtcctggggaaggtgcagagggagggcaggagaggcccagagggtcaggctgagggacagacagagagaaacagtcagaggagaaaggctcaaagaccatgagaacaacagagacttagggacagagagacacagacaggggaagacagcagggcaaagactcagagaggggaggatggagagtcagagaggggaagatggagactcagagagggggaggatggagactcagagagagaggaagatggagactcggaaagatggagactcaggagtatggagagtcagagaggggaggatggacactcaggggaggatggagagtcaggaggatggagactcatagaaaggggaggatggagagtcaggagaggttggagactggagagggaatagagacccagagaggggaggatggagactcagagggtggaagatggagactcaaagaggatggaaacccagagagaggaggacagagatgaggcagagactaggggaagcaggatagcgactggtcgggggcagagactcagggaggatagagacttgggagggactcaggaagcatagcgactgtggggcaaagagtcagagaggggaggatacagacttgggagggcagagactcagaaacagaatgttcgcattagggacatggtgtagcggggagctgcctcccccagcccctgctccctccctcaccgccagactatgatgagagaagccacctgcatgacaccttcacccagatgacccatgccctgcaggagctggctgctgcccagggatcctttgaggttgccttccctgatgctgcggagaaaatgaagaaggtcattacacagcttaaagaagcccaggcttgcatccctccctgcggtctccaggagttcgcccggcgtttcctctgcagcgggtgctactctagggtctgcgacctcccgctggactgcccagttcaggatgtgacagtgactcggggcgaccaggctatgttttcttgcatcgtaaacttccagctgccaaaggaggagatcacctattcctggaagttcgcaggaggaggtctccggactcaggacttgtcctatttccgagatatgccgcgggccgaaggatacctggcgcggatccggccggctcagctcacgcaccgcgggacgttctcctgcgtgatcaagcaagaccagcgccccctggcccggctctacttctttcttaacggtggggcggggcgcggccgcgtgagtgagcggggtcgggagaggggtggggctcgtgcctggctgacgtgcgcgcccccgcagtgacgggcccgcccccgcgggcggagacagagttgcaggcctcgttccgggaagtgctgcgctgggcgccgcgggatgccgagctgatcgagccctggaggcccagcctgggcgagctgctggccaggcccgaggctctgacgcccagcaatctgttcctgcttgcagtcctcggggccctcgcatcagcgagtgcgacagtgttggcgtggatgttctttcgatggtactgcagtggcaactaacaaaggtatctttcctccttccctatcctatttccatcctgaaaataaagaatatatttcaactctagattgtttcatctccgaaggtggtcactactaactcaggtaggaggaggtgcagcaagcccacacatgcccagatgaatatggcccgcataatgacagtgataggcatagctatcccagtgcaagttaggtgggaacccagataccccctcaggttactggctgtctccttgacatttccatctgcagaaggcaccctcaaatagagtcctccatgttgccctcagaggctgttcctccccaaggctttcctcctaccagaaagagcaacaccatccacctagcagttcaaaccagaaaccttggaatctaacttctcctccacttccaattcattttcatttccaaccctcagactttttaactcctaaatatctcatgaagctgccttctctgtggtcccagtcacccccac

SEQ ID NO: 290624 - DNA, 2177 bp, Homo sapiens
gccagtgccgtcccgtctgccctgctggccctggctgtcttcagggtgcccgcctgggcctgtctcctctgcttcacaacctactctgagcgcctccgcatctgccagatgtttgttgggatgcggagccccaagcttgaagagtgtgaggaggccttcacggccgccttccagggcctctctgacaccgaaatcagtgaggagaccatccacacttcatcagtgtcctggggaaggtgcagagggagggcaggagaggcccagagggtcaggctgagggacagacagagagaaacagtcagaggagaaaggctcaaagaccatgagaacaacagagacttagggacagagagacacagacaggggaagacagcagggcaaagactcagagaggggaggatggagagtcagagaggggaagatggagactcagagagggggaggatggagactcagagagagaggaagatggagactcggaaagatggagactcaggagtatggagagtcagagaggggaggatggacactcaggggaggatggagagtcaggaggatggagactcatagaaaggggaggatggagagtcaggagaggttggagactggagagggaatagagacccagagaggggaggatggagactcagagggtggaagatggagactcaaagaggatggaaacccagagagaggaggacagagatgaggcagagactaggggaagcaggatagcgactggtcgggggcagagactcagggaggatagagacttgggagggactcaggaagcatagcgactgtggggcaaagagtcagagaggggaggatacagacttgggagggcagagactcagaaacagaatgttcgcattagggacatggtgtagcggggagctgcctcccccagcccctgctccctccctcaccgccagactatgatgagagaagccacctgcatgacaccttcacccagatgacccatgccctgcaggagctggctgctgcccagggatcctttgaggttgccttccctgatgctgcggagaaaatgaagaaggtcattacacagcttaaagaagcccaggcttgcatccctccctgcggtctccaggagttcgcccggcgtttcctctgcagcgggtgctactctagggtctgcgacctcccgctggactgcccagttcaggatgtgacagtgactcggggcgaccaggctatgttttcttgcatcgtaaacttccagctgccaaaggaggagatcacctattcctggaagttcgcaggaggaggtctccggactcaggacttgtcctatttccgagatatgccgcgggccgaaggatacctggcgcggatccggccggctcagctcacgcaccgcgggacgttctcctgcgtgatcaagcaagaccagcgccccctggcccggctctacttctttcttaacgtgacgggcccgcccccgcgggcggagacagagttgcaggcctcgttccgggaagtgctgcgctgggcgccgcgggatgccgagctgatcgagccctggaggcccagcctgggcgagctgctggccaggcccgaggctctgacgcccagcaatctgttcctgcttgcagtcctcggggccctcgcatcagcgagtgcgacagtgttggcgtggatgttctttcgatggtactgcagtggcaactaacaaaggtatctttcctccttccctatcctatttccatcctgaaaataaagaatatatttcaactctagattgtttcatctccgaaggtggtcactactaactcaggtaggaggaggtgcagcaagcccacacatgcccagatgaatatggcccgcataatgacagtgataggcatagctatcccagtgcaagttaggtgggaacccagataccccctcaggttactggctgtctccttgacatttccatctgcagaaggcaccctcaaatagagtcctccatgttgccctcagaggctgttcctccccaaggctttcctcctaccagaaagagcaacaccatccacctagcagttcaaaccagaaaccttggaatctaacttctcctccacttccaattcattttcatttccaaccctcagactttttaactcctaaatatctcatgaagctgccttctctgtggtcccagtcacccccac

SEQ ID NO: 290625 - DNA, 202 bp, Homo sapiens
tccagggggcgtggtctggctcggggggcggggcttgtaggttactcagtggcaagccggagttgaggcgtttaaacccgcgtgtcccgcagctccggactcaggacttgtcctatttccgagatatgccgcgggccgaaggatacctggcgcggatccggccggctcagctcacgcaccgcgggacgttctcctgcgtgat

SEQ ID NO: 290626 - DNA, 2944 bp, Homo sapiens
cagtttcattaggctctgaagccattacaaaggttgcttaacttctaattatttgatcactgaggaaaatccagaaagctacacaacactgaaggggtgaaataaaagtccagcgatccagcgaaagaaaagagaagtgacagaaacaactttacctggactgaagataaaagcacagacaagagaacaatgccctggacatggctccagagatccacatgacaggcccaatgtgcctcattgagaacactaatggggaactggtggcgaatccagaagctctgaaaatcctgtctgccattacacagcctgtggtggtggtggcaattgtgggcctctaccgcacaggaaaatcctacctgatgaacaagctagctgggaagaataagggcttctctctgggctccacagtgaaatctcacaccaaaggaatctggatgtggtgtgtgcctcaccccaaaaagccagaacacaccttagtcctgcttgacactgagggcctgggagatgtaaagaagggtgacaaccagaatgactcctggatcttcaccctggccgtcctcctgagcagcactctcgtgtacaatagcatgggaaccatcaaccagcaggctatggaccaactgtactatgtgacagagctgacacatcgaatccgatcaaaatcctcacctgatgagaatgagaatgaggattcagctgactttgtgagcttcttcccagattttgtgtggacactgagagatttctccctggacttggaagcagatggacaacccctcacaccagatgagtacctggagtattccctgaagctaacgcaaggaagcttgcccagcttgagaaactacaagatgaagagctggaccctgaatttgtgcaacaagtagcagacttctgttcctacatctttagcaattccaaaactaaaactctttcaggaggcatcaaggtcaatgggcctcgtctagagagcctagtgctgacctatatcaatgctatcagcagaggggatctgccctgcatggagaacgcagtcctggccttggcccagatagagaactcagccgcagtgcaaaaggctattgcccactatgaccagcagatgggccagaaggtgcagctgcccgcagaaaccctccaggagctgctggacctgcacagggttagtgagagggaggccactgaagtctatatgaagaactctttcaaggatgtggaccatctgtttcaaaagaaattagcggcccagctagacaaaaagcgggatgacttttgtaaacagaatcaagaagcatcatcagatcgttgctcagctttacttcaggtcattttcagtcctctagaagaagaagtgaaggcgggaatttattcgaaaccagggggctattgtctctttattcagaagctacaagacctggagaaaaagtactatgaggaaccaaggaaggggatacaggctgaagagattctgcagacatacttgaaatccaaggagtctgtgaccgatgcaattctacagacagaccagattctcacagaaaaggaaaaggagattgaagtggaatgtgtaaaagctgaatctgcacaggcttcagcaaaaatggtggaggaaatgcaaataaagtatcagcagatgatggaagagaaagagaagagttatcaagaacatgtgaaacaattgactgagaagatggagagggagagggcccagttgctggaagagcaagagaagaccctcactagtaaacttcaggaacaggcccgagtactaaaggagagatgccaaggtgaaagtacccaacttcaaaatgagatacaaaagctacagaagaccctgaaaaaaaaaaccaagagatatatgtcgcataagctaaagatctaaacaacagagcttttctgtcatcctaacccaaggcataactgaaacaattttagaatttggaacaagtgtcactatatttgataataattagatcttgcatcataacactaaaagtttacaagaacatgcagttcaatgatcaaaatcatgttttttccttaaaaagattgtaaattgtgcaacaaagatgcatttacctctgtaccaacagaggagggatcatgagttgccaccactcagaagtttattcttccagacgaccagtggatactgaggaaagtcttaggtaaaaatcttgggacatatttgggcactggtttggccaagtgtacaatgggtcccaatatcagaaacaaccatcctagcttcctagggaagacagtgtacagttctccattatatcaaggctacaaggtctatgagcaataatgtgatttctggacattgcccatggataattctcactgatggatctcaagctaaagcaaaccatcttatacagagatctagaatcttatattttccataggaaggtaaagaaatcattagcaagagtaggaattgaatcataaacaaattggctaatgaagaaatcttttctttcttgttcaattcatctagattataaccttaatgtgacacctgagacctttagacagttgaccctgaattaaatagtcacatggtaacaattatgcactgtgtaattttagtaatgtataacatgcaatgatgcactttaactgaagatagagactatgttagaaaattgaactaatttaattatttgattgttttaatcctaaagcataagttagtcttttcctgattcttaaaggtcatacttgaaatcctgccaattttccccaaagggaatatggaatttttttgactttcttttgagcaataaaataattgtcttgccattacttagtatatgtagacttcatcccaattgtcaaacatcctaggtaagtggttgacatttcttacagcaattacagattatttttgaactagaaataaactaaactagaaataaaataagtttcactagtt

SEQ ID NO: 290627 - DNA, 3189 bp, Homo sapiens
cagtttcattaggctctgaagccattacaaaggttgcttaacttctaattatttgatcactgaggaaaatccagaaagctacacaacactgaaggggtgaaataaaagtccagcgatccagcgaaagaaaagagaagtgacagaaacaactttacctggactgaagataaaagcacagacaagagaacaatgccctggacatggctccagagatccacatgacaggcccaatgtgcctcattgagaacactaatggggaactggtggcgaatccagaagctctgaaaatcctgtctgccattacacagcctgtggtggtggtggcaattgtgggcctctaccgcacaggaaaatcctacctgatgaacaagctagctgggaagaataagggcttctctctgggctccacagtgaaatctcacaccaaaggaatctggatgtggtgtgtgcctcaccccaaaaagccagaacacaccttagtcctgcttgacactgagggcctgggagatgtaaagaagggtgacaaccagaatgactcctggatcttcaccctggccgtcctcctgagcagcactctcgtgtacaatagcatgggaaccatcaaccagcaggctatggaccaactgtagtatccttttgtgacccagaacagcaccaaggtcagaggggacacctgtattcataaaccagctgcctgactgtgaatcctgatgaatcaagctcaaaaggagaaaacaaaaaataatgcaagtacagaggagagatcccatctatgtgacagagctgacacatcgaatccgatcaaaatcctcacctgatgagaatgagaatgaggattcagctgactttgtgagcttcttcccagattttgtgtggacactgagagatttctccctggacttggaagcagatggacaacccctcacaccagatgagtacctggagtattccctgaagctaacgcaaggtaccagtcaaaaagataaaaattttaatctgccccgactctgtatccggaagttcttcccaaagaaaaaatgttttgtcttcgatctgcccattcaccgcaggaagcttgcccagcttgagaaactacaagatgaagagctggaccctgaatttgtgcaacaagtagcagacttctgttcctacatctttagcaattccaaaactaaaactctttcaggaggcatcaaggtcaatgggcctcgtctagagagcctagtgctgacctatatcaatgctatcagcagaggggatctgccctgcatggagaacgcagtcctggccttggcccagatagagaactcagccgcagtgcaaaaggctattgcccactatgaccagcagatgggccagaaggtgcagctgcccgcagaaaccctccaggagctgctggacctgcacagggttagtgagagggaggccactgaagtctatatgaagaactctttcaaggatgtggaccatctgtttcaaaagaaattagcggcccagctagacaaaaagcgggatgacttttgtaaacagaatcaagaagcatcatcagatcgttgctcagctttacttcaggtcattttcagtcctctagaagaagaagtgaaggcgggaatttattcgaaaccagggggctattgtctctttattcagaagctacaagacctggagaaaaagtactatgaggaaccaaggaaggggatacaggctgaagagattctgcagacatacttgaaatccaaggagtctgtgaccgatgcaattctacagacagaccagattctcacagaaaaggaaaaggagattgaagtggaatgtgtaaaagctgaatctgcacaggcttcagcaaaaatggtggaggaaatgcaaataaagtatcagcagatgatggaagagaaagagaagagttatcaagaacatgtgaaacaattgactgagaagatggagagggagagggcccagttgctggaagagcaagagaagaccctcactagtaaacttcaggaacaggcccgagtactaaaggagagatgccaaggtgaaagtacccaacttcaaaatgagatacaaaagctacagaagaccctgaaaaaaaaaaccaagagatatatgtcgcataagctaaagatctaaacaacagagcttttctgtcatcctaacccaaggcataactgaaacaattttagaatttggaacaagtgtcactatatttgataataattagatcttgcatcataacactaaaagtttacaagaacatgcagttcaatgatcaaaatcatgttttttccttaaaaagattgtaaattgtgcaacaaagatgcatttacctctgtaccaacagaggagggatcatgagttgccaccactcagaagtttattcttccagacgaccagtggatactgaggaaagtcttaggtaaaaatcttgggacatatttgggcactggtttggccaagtgtacaatgggtcccaatatcagaaacaaccatcctagcttcctagggaagacagtgtacagttctccattatatcaaggctacaaggtctatgagcaataatgtgatttctggacattgcccatggataattctcactgatggatctcaagctaaagcaaaccatcttatacagagatctagaatcttatattttccataggaaggtaaagaaatcattagcaagagtaggaattgaatcataaacaaattggctaatgaagaaatcttttctttcttgttcaattcatctagattataaccttaatgtgacacctgagacctttagacagttgaccctgaattaaatagtcacatggtaacaattatgcactgtgtaattttagtaatgtataacatgcaatgatgcactttaactgaagatagagactatgttagaaaattgaactaatttaattatttgattgttttaatcctaaagcataagttagtcttttcctgattcttaaaggtcatacttgaaatcctgccaattttccccaaagggaatatggaatttttttgactttcttttgagcaataaaataattgtcttgccattacttagtatatgtagacttcatcccaattgtcaaacatcctaggtaagtggttgacatttcttacagcaattacagattatttttgaactagaaataaactaaactagaaataaaataagtttcactagtt

SEQ ID NO: 290628 - DNA, 3056 bp, Homo sapiens
cagtttcattaggctctgaagccattacaaaggttgcttaacttctaattatttgatcactgaggaaaatccagaaagctacacaacactgaaggggtgaaataaaagtccagcgatccagcgaaagaaaagagaagtgacagaaacaactttacctggactgaagataaaagcacagacaagagaacaatgccctggacatggctccagagatccacatgacaggcccaatgtgcctcattgagaacactaatggggaactggtggcgaatccagaagctctgaaaatcctgtctgccattacacagcctgtggtggtggtggcaattgtgggcctctaccgcacaggaaaatcctacctgatgaacaagctagctgggaagaataagggcttctctctgggctccacagtgaaatctcacaccaaaggaatctggatgtggtgtgtgcctcaccccaaaaagccagaacacaccttagtcctgcttgacactgagggcctgggagatgtaaagaagggtgacaaccagaatgactcctggatcttcaccctggccgtcctcctgagcagcactctcgtgtacaatagcatgggaaccatcaaccagcaggctatggaccaactgtagtatccttttgtgacccagaacagcaccaaggtcagaggggacacctgtattcataaaccagctgcctgactgtgaatcctgatgaatcaagctcaaaaggagaaaacaaaaaataatgcaagtacagaggagagatcccatctatgtgacagagctgacacatcgaatccgatcaaaatcctcacctgatgagaatgagaatgaggattcagctgactttgtgagcttcttcccagattttgtgtggacactgagagatttctccctggacttggaagcagatggacaacccctcacaccagatgagtacctggagtattccctgaagctaacgcaaggtaccagtcaaaaagataaaaattttaatctgccccgactctgtatccggaagttcttcccaaagaaaaaatgttttgtcttcgatctgcccattcaccgcaggaagcttgcccagcttgagaaactacaagatgaagagctggaccctgaatttgtgcaacaagtagcagacttctgttcctacatctttagcaattccaaaactaaaactctttcaggaggcatcaaggtcaatgggcctcgtctagagagcctagtgctgacctatatcaatgctatcagcagaggggatctgccctgcatggagaacgcagtcctggccttggcccagatagagaactcagccgcagtgcaaaaggctattgcccactatgaccagcagatgggccagaaggtgcagctgcccgcagaaaccctccaggagctgctggacctgcacagggttagtgagagggaggccactgaagtctatatgaagaactctttcaaggatgtggaccatctgtttcaaaagaaattagcggcccagctagacaaaaagcgggatgacttttgtaaacagaatcaagaagcatcatcagatcgttgctcagctttacttcaggtcattttcagtcctctagaagaagaagtgaaggcgggaatttattcgaaaccagggggctattgtctctttattcagaagctacaagacctggagaaaaagtactatgaggaaccaaggaaggggatacaggctgaagagattctgcagacatacttgaaatccaaggagtctgtgaccgatgcaattctacagacagaccagattctcacagaaaaggaaaaggagattgaagtggaatgtgtaaaagctgaatctgcacaggcttcagcaaaaatggtggaggaaatgcaaataaagtatcagcagatgatggaagagaaagagaagagttatcaagaacatgtgaaacaattgactgagaagatggagagggagagggcccagttgctggaagagcaagagaagaccctcactagtaaacttcaggaacaggcccgagtactaaaggagagatgccaaggtgaaagtacccaacttcaaaatgagatacaaaagctacagaagaccctgaaaaaaaaaaccaagagatatatgtcgcataagctaaagatctaaacaacagagcttttctgtcatcctaacccaaggcataactgaaacaattttagaatttggaacaagtgtcactatatttgataataattagatcttgcatcataacactaaaagtttacaagaacatgcagttcaatgatcaaaatcatgttttttccttaaaaagattgtaaattgtgcaacaaagatgcatttacctctgtaccaacagaggagggatcatgagttgccaccactcagaagtttattcttccagacgaccagtggatactgaggaaagtcttaggtaaaaatcttgggacatatttgggcactggtttggccaagtgtacaatgggtcccaatatcagaaacaaccatcctagcttcctagggaagacagtgtacagttctccattatatcaaggctacaaggtctatgagcaataatgtgatttctggacattgcccatggataattctcactgatggatctcaagctaaagcaaaccatcttatacagagatctagaatcttatattttccataggaaggtaaagaaatcattagcaagagtaggaattgaatcataaacaaattggctaatgaagaaatcttttctttcttgttcaattcatctagattataaccttaatgtgacacctgagacctttagacagttgaccctgaattaaatagtcacatggtaacaattatgcactgtgtaattttagtaatgtataacatgcaatgatgcactttaactgaagatagagactatgttagaaaattgaactaatttaattatttgattgttttaatcctaaagcataagttagtcttttcctgattcttaaaggtcatacttgaaatcctgccaattttccccaaagggaatatggaatttttttgactttcttttgagcaataaaataattgtcttgcca

SEQ ID NO: 290629 - DNA, 3047 bp, Homo sapiens
cagtttcattaggctctgaagccattacaaaggttgcttaacttctaattatttgatcactgaggaaaatccagaaagctacacaacactgaaggggtgaaataaaagtccagcgatccagcgaaagaaaagagaagtgacagaaacaactttacctggactgaagataaaagcacagacaagagaacaatgccctggacatggctccagagatccacatgacaggcccaatgtgcctcattgagaacactaatggggaactggtggcgaatccagaagctctgaaaatcctgtctgccattacacagcctgtggtggtggtggcaattgtgggcctctaccgcacaggaaaatcctacctgatgaacaagctagctgggaagaataagggcttctctctgggctccacagtgaaatctcacaccaaaggaatctggatgtggtgtgtgcctcaccccaaaaagccagaacacaccttagtcctgcttgacactgagggcctgggagatgtaaagaagggtgacaaccagaatgactcctggatcttcaccctggccgtcctcctgagcagcactctcgtgtacaatagcatgggaaccatcaaccagcaggctatggaccaactgtactatgtgacagagctgacacatcgaatccgatcaaaatcctcacctgatgagaatgagaatgaggattcagctgactttgtgagcttcttcccagattttgtgtggacactgagagatttctccctggacttggaagcagatggacaacccctcacaccagatgagtacctggagtattccctgaagctaacgcaaggtaccagtcaaaaagataaaaattttaatctgccccgactctgtatccggaagttcttcccaaagaaaaaatgttttgtcttcgatctgcccattcaccgcaggaagcttgcccagcttgagaaactacaagatgaagagctggaccctgaatttgtgcaacaagtagcagacttctgttcctacatctttagcaattccaaaactaaaactctttcaggaggcatcaaggtcaatgggcctcgtctagagagcctagtgctgacctatatcaatgctatcagcagaggggatctgccctgcatggagaacgcagtcctggccttggcccagatagagaactcagccgcagtgcaaaaggctattgcccactatgaccagcagatgggccagaaggtgcagctgcccgcagaaaccctccaggagctgctggacctgcacagggttagtgagagggaggccactgaagtctatatgaagaactctttcaaggatgtggaccatctgtttcaaaagaaattagcggcccagctagacaaaaagcgggatgacttttgtaaacagaatcaagaagcatcatcagatcgttgctcagctttacttcaggtcattttcagtcctctagaagaagaagtgaaggcgggaatttattcgaaaccagggggctattgtctctttattcagaagctacaagacctggagaaaaagtactatgaggaaccaaggaaggggatacaggctgaagagattctgcagacatacttgaaatccaaggagtctgtgaccgatgcaattctacagacagaccagattctcacagaaaaggaaaaggagattgaagtggaatgtgtaaaagctgaatctgcacaggcttcagcaaaaatggtggaggaaatgcaaataaagtatcagcagatgatggaagagaaagagaagagttatcaagaacatgtgaaacaattgactgagaagatggagagggagagggcccagttgctggaagagcaagagaagaccctcactagtaaacttcaggaacaggcccgagtactaaaggagagatgccaaggtgaaagtacccaacttcaaaatgagatacaaaagctacagaagaccctgaaaaaaaaaaccaagagatatatgtcgcataagctaaagatctaaacaacagagcttttctgtcatcctaacccaaggcataactgaaacaattttagaatttggaacaagtgtcactatatttgataataattagatcttgcatcataacactaaaagtttacaagaacatgcagttcaatgatcaaaatcatgttttttccttaaaaagattgtaaattgtgcaacaaagatgcatttacctctgtaccaacagaggagggatcatgagttgccaccactcagaagtttattcttccagacgaccagtggatactgaggaaagtcttaggtaaaaatcttgggacatatttgggcactggtttggccaagtgtacaatgggtcccaatatcagaaacaaccatcctagcttcctagggaagacagtgtacagttctccattatatcaaggctacaaggtctatgagcaataatgtgatttctggacattgcccatggataattctcactgatggatctcaagctaaagcaaaccatcttatacagagatctagaatcttatattttccataggaaggtaaagaaatcattagcaagagtaggaattgaatcataaacaaattggctaatgaagaaatcttttctttcttgttcaattcatctagattataaccttaatgtgacacctgagacctttagacagttgaccctgaattaaatagtcacatggtaacaattatgcactgtgtaattttagtaatgtataacatgcaatgatgcactttaactgaagatagagactatgttagaaaattgaactaatttaattatttgattgttttaatcctaaagcataagttagtcttttcctgattcttaaaggtcatacttgaaatcctgccaattttccccaaagggaatatggaatttttttgactttcttttgagcaataaaataattgtcttgccattacttagtatatgtagacttcatcccaattgtcaaacatcctaggtaagtggttgacatttcttacagcaattacagattatttttgaactagaaataaactaaactagaaataaaataagtttcactagtt

SEQ ID NO: 290630 - DNA, 3133 bp, Homo sapiens
cagtttcattaggctctgaagccattacaaaggttgcttaacttctaattatttgatcactgaggaaaatccagaaagctacacaacactgaaggggtgaaataaaagtccagcgatccagcgaaagaaaagagaagtgacagaaacaactttacctggactgaagataaaagcacagacaagagaacaatgccctggacatggctccagagatccacatgacaggcccaatgtgcctcattgagaacactaatggggaactggtggcgaatccagaagctctgaaaatcctgtctgccattacacagcctgtggtggtggtggcaattgtgggcctctaccgcacaggaaaatcctacctgatgaacaagctagctgggaagaataagggctggagtacagtggcaagatctcagctcaccacagtcttgacttcctgggctcaagcaatcctctcacctcagcctcctgagtaggcttctctctgggctccacagtgaaatctcacaccaaaggaatctggatgtggtgtgtgcctcaccccaaaaagccagaacacaccttagtcctgcttgacactgagggcctgggagatgtaaagaagggtgacaaccagaatgactcctggatcttcaccctggccgtcctcctgagcagcactctcgtgtacaatagcatgggaaccatcaaccagcaggctatggaccaactgtactatgtgacagagctgacacatcgaatccgatcaaaatcctcacctgatgagaatgagaatgaggattcagctgactttgtgagcttcttcccagattttgtgtggacactgagagatttctccctggacttggaagcagatggacaacccctcacaccagatgagtacctggagtattccctgaagctaacgcaaggtaccagtcaaaaagataaaaattttaatctgccccgactctgtatccggaagttcttcccaaagaaaaaatgttttgtcttcgatctgcccattcaccgcaggaagcttgcccagcttgagaaactacaagatgaagagctggaccctgaatttgtgcaacaagtagcagacttctgttcctacatctttagcaattccaaaactaaaactctttcaggaggcatcaaggtcaatgggcctcgtctagagagcctagtgctgacctatatcaatgctatcagcagaggggatctgccctgcatggagaacgcagtcctggccttggcccagatagagaactcagccgcagtgcaaaaggctattgcccactatgaccagcagatgggccagaaggtgcagctgcccgcagaaaccctccaggagctgctggacctgcacagggttagtgagagggaggccactgaagtctatatgaagaactctttcaaggatgtggaccatctgtttcaaaagaaattagcggcccagctagacaaaaagcgggatgacttttgtaaacagaatcaagaagcatcatcagatcgttgctcagctttacttcaggtcattttcagtcctctagaagaagaagtgaaggcgggaatttattcgaaaccagggggctattgtctctttattcagaagctacaagacctggagaaaaagtactatgaggaaccaaggaaggggatacaggctgaagagattctgcagacatacttgaaatccaaggagtctgtgaccgatgcaattctacagacagaccagattctcacagaaaaggaaaaggagattgaagtggaatgtgtaaaagctgaatctgcacaggcttcagcaaaaatggtggaggaaatgcaaataaagtatcagcagatgatggaagagaaagagaagagttatcaagaacatgtgaaacaattgactgagaagatggagagggagagggcccagttgctggaagagcaagagaagaccctcactagtaaacttcaggaacaggcccgagtactaaaggagagatgccaaggtgaaagtacccaacttcaaaatgagatacaaaagctacagaagaccctgaaaaaaaaaaccaagagatatatgtcgcataagctaaagatctaaacaacagagcttttctgtcatcctaacccaaggcataactgaaacaattttagaatttggaacaagtgtcactatatttgataataattagatcttgcatcataacactaaaagtttacaagaacatgcagttcaatgatcaaaatcatgttttttccttaaaaagattgtaaattgtgcaacaaagatgcatttacctctgtaccaacagaggagggatcatgagttgccaccactcagaagtttattcttccagacgaccagtggatactgaggaaagtcttaggtaaaaatcttgggacatatttgggcactggtttggccaagtgtacaatgggtcccaatatcagaaacaaccatcctagcttcctagggaagacagtgtacagttctccattatatcaaggctacaaggtctatgagcaataatgtgatttctggacattgcccatggataattctcactgatggatctcaagctaaagcaaaccatcttatacagagatctagaatcttatattttccataggaaggtaaagaaatcattagcaagagtaggaattgaatcataaacaaattggctaatgaagaaatcttttctttcttgttcaattcatctagattataaccttaatgtgacacctgagacctttagacagttgaccctgaattaaatagtcacatggtaacaattatgcactgtgtaattttagtaatgtataacatgcaatgatgcactttaactgaagatagagactatgttagaaaattgaactaatttaattatttgattgttttaatcctaaagcataagttagtcttttcctgattcttaaaggtcatacttgaaatcctgccaattttccccaaagggaatatggaatttttttgactttcttttgagcaataaaataattgtcttgccattacttagtatatgtagacttcatcccaattgtcaaacatcctaggtaagtggttgacatttcttacagcaattacagattatttttgaactagaaataaactaaactagaaataaaataagtttcactagtt

SEQ ID NO: 290631 - DNA, 2553 bp, Homo sapiens
cagtttcattaggctctgaagccattacaaaggttgcttaacttctaattatttgatcactgaggaaaatccagaaagctacacaacactgaaggggtgaaataaaagtccagcgatccagcgaaagaaaagagaagtgacagaaacaactttacctggactgaagataaaagcacagacaagagaacaatgccctggacatggctccagagatccacatgacaggcccaatgtgcctcattgagaacactaatggggaactggtggcgaatccagaagctctgaaaatcctgtctgccattacacagcctgtggtggtggtggcaattgtgggcctctaccgcacaggaaaatcctacctgatgaacaagctagctgggaagaataagggcttctctctgggctccacagtgaaatctcacaccaaaggaatctggatgtggtgtgtgcctcaccccaaaaagccagaacacaccttagtcctgcttgacactgagggcctgggagatgtaaagaagggtgacaaccagaatgactcctggatcttcaccctggccgtcctcctgagcagcactctcgtgtacaatagcatgggaaccatcaaccagcaggctatggaccaactgtactatgtgacagagctgacacatcgaatccgatcaaaatcctcacctgatgagaatgagaatgaggattcagctgactttgtgagcttcttcccagattttgtgtggacactgagagatttctccctggacttggaagcagatggacaacccctcacaccagatgagtacctggagtattccctgaagctaacgcaaggtaccagtcaaaaagataaaaattttaatctgccccgactctgtatccggaagttcttcccaaagaaaaaatgttttgtcttcgatctgcccattcaccgcaggaagcttgcccagcttgagaaactacaagatgaagagctggaccctgaatttgtgcaacaagtagcagacttctgttcctacatctttagcaattccaaaactaaaactctttcaggaggcatcaaggtcaatgggcctcgctgaagagattctgcagacatacttgaaatccaaggagtctgtgaccgatgcaattctacagacagaccagattctcacagaaaaggaaaaggagattgaagtggaatgtgtaaaagctgaatctgcacaggcttcagcaaaaatggtggaggaaatgcaaataaagtatcagcagatgatggaagagaaagagaagagttatcaagaacatgtgaaacaattgactgagaagatggagagggagagggcccagttgctggaagagcaagagaagaccctcactagtaaacttcaggaacaggcccgagtactaaaggagagatgccaaggtgaaagtacccaacttcaaaatgagatacaaaagctacagaagaccctgaaaaaaaaaaccaagagatatatgtcgcataagctaaagatctaaacaacagagcttttctgtcatcctaacccaaggcataactgaaacaattttagaatttggaacaagtgtcactatatttgataataattagatcttgcatcataacactaaaagtttacaagaacatgcagttcaatgatcaaaatcatgttttttccttaaaaagattgtaaattgtgcaacaaagatgcatttacctctgtaccaacagaggagggatcatgagttgccaccactcagaagtttattcttccagacgaccagtggatactgaggaaagtcttaggtaaaaatcttgggacatatttgggcactggtttggccaagtgtacaatgggtcccaatatcagaaacaaccatcctagcttcctagggaagacagtgtacagttctccattatatcaaggctacaaggtctatgagcaataatgtgatttctggacattgcccatggataattctcactgatggatctcaagctaaagcaaaccatcttatacagagatctagaatcttatattttccataggaaggtaaagaaatcattagcaagagtaggaattgaatcataaacaaattggctaatgaagaaatcttttctttcttgttcaattcatctagattataaccttaatgtgacacctgagacctttagacagttgaccctgaattaaatagtcacatggtaacaattatgcactgtgtaattttagtaatgtataacatgcaatgatgcactttaactgaagatagagactatgttagaaaattgaactaatttaattatttgattgttttaatcctaaagcataagttagtcttttcctgattcttaaaggtcatacttgaaatcctgccaattttccccaaagggaatatggaatttttttgactttcttttgagcaataaaataattgtcttgccattacttagtatatgtagacttcatcccaattgtcaaacatcctaggtaagtggttgacatttcttacagcaattacagattatttttgaactagaaataaactaaactagaaataaaataagtttcactagtt

SEQ ID NO: 290632 - DNA, 3001 bp, Homo sapiens
cagtttcattaggctctgaagccattacaaaggttgcttaacttctaattatttgatcactgaggaaaatccagaaagctacacaacactgaaggggtgaaataaaagtccagcgatccagcgaaagaaaagagaagtgacagaaacaactttacctggactgaagataaaagcacagacaagagaacaatgccctggacatggctccagagatccacatgacaggcccaatgtgcctcattgagaacactaatggggaactggtggcgaatccagaagctctgaaaatcctgtctgccattacacagcctgtggtggtggtggcaattgtgggcctctaccgcacaggaaaatcctacctgatgaacaagctagctgggaagaataagggcttctctctgggctccacagtgaaatctcacaccaaaggaatctggatgtggtgtgtgcctcaccccaaaaagccagaacacaccttagtcctgcttgacactgagggcctgggagatgtaaagaagggtgacaaccagaatgactcctggatcttcaccctggccgtcctcctgagcagcactctcgtgtacaatagcatgggaaccatcaaccagcaggctatggaccaactgtactatgtgacagagctgacacatcgaatccgatcaaaatcctcacctgatgagaatgagaatgaggattcagctgactttgtgagcttcttcccagattttgtgtggacactgagagatttctccctggacttggaagcagatggacaacccctcacaccagatgagtacctggagtattccctgaagctaacgcaaggtaccagtcaaaaagataaaaattttaatctgccccgactctgtatccggaagttcttcccaaagaaaaaatgttttgtcttcgatctgcccattcaccgcaggaagcttgcccagcttgagaaactacaagatgaagagctggaccctgaatttgtgcaacaagtagcagacttctgttcctacatctttagcaattccaaaactaaaactctttcaggaggcatcaaggtcaatgggcctcgtctagagagcctagtgctgacctatatcaatgctatcagcagaggggatctgccctgcatggagaacgcagtcctggccttggcccagatagagaactcagccgcagtgcaaaaggctattgcccactatgaccagcagatgggccagaaggtgcagctgcccgcagaaaccctccaggagctgctggacctgcacagggttagtgagagggaggccactgaagtctatatgaagaactctttcaaggatgtggaccatctgtttcaaaagaaattagcggcccagctagacaaaaagcgggatgacttttgtaaacagaatcaagaagcatcatcagatcgttgctcagctttacttcaggtcattttcagtcctctagaagaagaagtgaaggcgggaatttattcgaaaccagggggctattgtctctttattcagaagctacaagacctggagaaaaagtactatgaggaaccaaggaaggggatacaggctgaagagattctgcagacatacttgaaatccaaggagtctgtgaccgatgcaattctacagacagaccagattctcacagaaaaggaaaaggagattgaagtggaatgtgtaaaagctgaatctgcacaggcttcagcaaaaatggtaagagttatcaagaacatgtgaaacaattgactgagaagatggagagggagagggcccagttgctggaagagcaagagaagaccctcactagtaaacttcaggaacaggcccgagtactaaaggagagatgccaaggtgaaagtacccaacttcaaaatgagatacaaaagctacagaagaccctgaaaaaaaaaaccaagagatatatgtcgcataagctaaagatctaaacaacagagcttttctgtcatcctaacccaaggcataactgaaacaattttagaatttggaacaagtgtcactatatttgataataattagatcttgcatcataacactaaaagtttacaagaacatgcagttcaatgatcaaaatcatgttttttccttaaaaagattgtaaattgtgcaacaaagatgcatttacctctgtaccaacagaggagggatcatgagttgccaccactcagaagtttattcttccagacgaccagtggatactgaggaaagtcttaggtaaaaatcttgggacatatttgggcactggtttggccaagtgtacaatgggtcccaatatcagaaacaaccatcctagcttcctagggaagacagtgtacagttctccattatatcaaggctacaaggtctatgagcaataatgtgatttctggacattgcccatggataattctcactgatggatctcaagctaaagcaaaccatcttatacagagatctagaatcttatattttccataggaaggtaaagaaatcattagcaagagtaggaattgaatcataaacaaattggctaatgaagaaatcttttctttcttgttcaattcatctagattataaccttaatgtgacacctgagacctttagacagttgaccctgaattaaatagtcacatggtaacaattatgcactgtgtaattttagtaatgtataacatgcaatgatgcactttaactgaagatagagactatgttagaaaattgaactaatttaattatttgattgttttaatcctaaagcataagttagtcttttcctgattcttaaaggtcatacttgaaatcctgccaattttccccaaagggaatatggaatttttttgactttcttttgagcaataaaataattgtcttgccattacttagtatatgtagacttcatcccaattgtcaaacatcctaggtaagtggttgacatttcttacagcaattacagattatttttgaactagaaataaactaaactagaaataaaataagtttcactagtt

SEQ ID NO: 290633 - DNA, 2695 bp, Homo sapiens
cagtttcattaggctctgaagccattacaaaggttgcttaacttctaattatttgatcactgaggaaaatccagaaagctacacaacactgaaggggtgaaataaaagtccagcgatccagcgaaagaaaagagaagtgacagaaacaactttacctggactgaagataaaagcacagacaagagaacaatgccctggacatggctccagagatccacatgacaggcccaatgtgcctcattgagaacactaatggggaactggtggcgaatccagaagctctgaaaatcctgtctgccattacacagcctgtggtggtggtggcaattgtgggcctctaccgcacaggaaaatcctacctgatgaacaagctagctgggaagaataagggcttctctctgggctccacagtgaaatctcacaccaaaggaatctggatgtggtgtgtgcctcaccccaaaaagccagaacacaccttagtcctgcttgacactgagggcctgggagatgtaaagaagggtgacaaccagaatgactcctggatcttcaccctggccgtcctcctgagcagcactctcgtgtacaatagcatgggaaccatcaaccagcaggctatggaccaactgtagtatccttttgtgacccagaacagcaccaaggtcagaggggacacctgtattcataaaccagctgcctgactgtgaatcctgatgaatcaagctcaaaaggagaaaacaaaaaataatgcaagtacagaggagagatcccatctatgtgacagagctgacacatcgaatccgatcaaaatcctcacctgatgagaatgagaatgaggattcagctgactttgtgagcttcttcccagattttgtgtggacactgagagatttctccctggacttggaagcagatggacaacccctcacaccagatgagtacctggagtattccctgaagctaacgcaaggtaccagtcaaaaagataaaaattttaatctgccccgactctgtatccggaagttcttcccaaagaaaaaatgttttgtcttcgatctgcccattcaccgcaggaagcttgcccagcttgagaaactacaagatgaagagctggaccctgaatttgtgcaacaagtagcagacttctgttcctacatctttagcaattccaaaactaaaactctttcaggaggcatcaaggtcaatgggcctcgctgaagagattctgcagacatacttgaaatccaaggagtctgtgaccgatgcaattctacagacagaccagattctcacagaaaaggaaaaggagattgaagtggaatgtgtaaaagctgaatctgcacaggcttcagcaaaaatggtggaggaaatgcaaataaagtatcagcagatgatggaagagaaagagaagagttatcaagaacatgtgaaacaattgactgagaagatggagagggagagggcccagttgctggaagagcaagagaagaccctcactagtaaacttcaggaacaggcccgagtactaaaggagagatgccaaggtgaaagtacccaacttcaaaatgagatacaaaagctacagaagaccctgaaaaaaaaaaccaagagatatatgtcgcataagctaaagatctaaacaacagagcttttctgtcatcctaacccaaggcataactgaaacaattttagaatttggaacaagtgtcactatatttgataataattagatcttgcatcataacactaaaagtttacaagaacatgcagttcaatgatcaaaatcatgttttttccttaaaaagattgtaaattgtgcaacaaagatgcatttacctctgtaccaacagaggagggatcatgagttgccaccactcagaagtttattcttccagacgaccagtggatactgaggaaagtcttaggtaaaaatcttgggacatatttgggcactggtttggccaagtgtacaatgggtcccaatatcagaaacaaccatcctagcttcctagggaagacagtgtacagttctccattatatcaaggctacaaggtctatgagcaataatgtgatttctggacattgcccatggataattctcactgatggatctcaagctaaagcaaaccatcttatacagagatctagaatcttatattttccataggaaggtaaagaaatcattagcaagagtaggaattgaatcataaacaaattggctaatgaagaaatcttttctttcttgttcaattcatctagattataaccttaatgtgacacctgagacctttagacagttgaccctgaattaaatagtcacatggtaacaattatgcactgtgtaattttagtaatgtataacatgcaatgatgcactttaactgaagatagagactatgttagaaaattgaactaatttaattatttgattgttttaatcctaaagcataagttagtcttttcctgattcttaaaggtcatacttgaaatcctgccaattttccccaaagggaatatggaatttttttgactttcttttgagcaataaaataattgtcttgccattacttagtatatgtagacttcatcccaattgtcaaacatcctaggtaagtggttgacatttcttacagcaattacagattatttttgaactagaaataaactaaactagaaataaaataagtttcactagtt

SEQ ID NO: 290634 - DNA, 2649 bp, Homo sapiens
cagtttcattaggctctgaagccattacaaaggttgcttaacttctaattatttgatcactgaggaaaatccagaaagctacacaacactgaaggggtgaaataaaagtccagcgatccagcgaaagaaaagagaagtgacagaaacaactttacctggactgaagataaaagcacagacaagagaacaatgccctggacatggctccagagatccacatgacaggcccaatgtgcctcattgagaacactaatggggaactggtggcgaatccagaagctctgaaaatcctgtctgccattacacagcctgtggtggtggtggcaattgtgggcctctaccgcacaggaaaatcctacctgatgaacaagctagctgggaagaataagggcttctctctgggctccacagtgaaatctcacaccaaaggaatctggatgtggtgtgtgcctcaccccaaaaagccagaacacaccttagtcctgcttgacactgagggcctgggagatgtaaagaagggtgacaaccagaatgactcctggatcttcaccctggccgtcctcctgagcagcactctcgtgtacaatagcatgggaaccatcaaccagcaggctatggaccaactgtagtatccttttgtgacccagaacagcaccaaggtcagaggggacacctgtattcataaaccagctgcctgactgtgaatcctgatgaatcaagctcaaaaggagaaaacaaaaaataatgcaagtacagaggagagatcccatctatgtgacagagctgacacatcgaatccgatcaaaatcctcacctgatgagaatgagaatgaggattcagctgactttgtgagcttcttcccagattttgtgtggacactgagagatttctccctggacttggaagcagatggacaacccctcacaccagatgagtacctggagtattccctgaagctaacgcaaggtaccagtcaaaaagataaaaattttaatctgccccgactctgtatccggaagttcttcccaaagaaaaaatgttttgtcttcgatctgcccattcaccgcaggaagcttgcccagcttgagaaactacaagatgaagagctggaccctgaatttgtgcaacaagtagcagacttctgttcctacatctttagcaattccaaaactaaaactctttcaggaggcatcaaggtcaatgggcctcgctgaagagattctgcagacatacttgaaatccaaggagtctgtgaccgatgcaattctacagacagaccagattctcacagaaaaggaaaaggagattgaagggaggaaatgcaaataaagtatcagcagatgatggaagagaaagagaagagttatcaagaacatgtgaaacaattgactgagaagatggagagggagagggcccagttgctggaagagcaagagaagaccctcactagtaaacttcaggaacaggcccgagtactaaaggagagatgccaaggtgaaagtacccaacttcaaaatgagatacaaaagctacagaagaccctgaaaaaaaaaaccaagagatatatgtcgcataagctaaagatctaaacaacagagcttttctgtcatcctaacccaaggcataactgaaacaattttagaatttggaacaagtgtcactatatttgataataattagatcttgcatcataacactaaaagtttacaagaacatgcagttcaatgatcaaaatcatgttttttccttaaaaagattgtaaattgtgcaacaaagatgcatttacctctgtaccaacagaggagggatcatgagttgccaccactcagaagtttattcttccagacgaccagtggatactgaggaaagtcttaggtaaaaatcttgggacatatttgggcactggtttggccaagtgtacaatgggtcccaatatcagaaacaaccatcctagcttcctagggaagacagtgtacagttctccattatatcaaggctacaaggtctatgagcaataatgtgatttctggacattgcccatggataattctcactgatggatctcaagctaaagcaaaccatcttatacagagatctagaatcttatattttccataggaaggtaaagaaatcattagcaagagtaggaattgaatcataaacaaattggctaatgaagaaatcttttctttcttgttcaattcatctagattataaccttaatgtgacacctgagacctttagacagttgaccctgaattaaatagtcacatggtaacaattatgcactgtgtaattttagtaatgtataacatgcaatgatgcactttaactgaagatagagactatgttagaaaattgaactaatttaattatttgattgttttaatcctaaagcataagttagtcttttcctgattcttaaaggtcatacttgaaatcctgccaattttccccaaagggaatatggaatttttttgactttcttttgagcaataaaataattgtcttgccattacttagtatatgtagacttcatcccaattgtcaaacatcctaggtaagtggttgacatttcttacagcaattacagattatttttgaactagaaataaactaaactagaaataaaataagtttcactagtt

SEQ ID NO: 290635 - DNA, 1884 bp, Homo sapiens
ctctgcctgatatcctccctgcatccccacagttctctccctctcttcctccctctatctgaatcactctgatttgctctctcaaggagggcttcattctccagtcagctcagcccatatggaaccacagcatcaaatttagagccctcaatttgaaaaggacagggaatcttatttcccagtatctgtatcatcctcctaaataagactctgctaagtagggtcatctgattggccagcttggagcatgtatctggccctgtgatagggaatcttgaccaccaggcacaccagggccaagaggaagaattctcagaagaaaagatggtgggcagaagaacaggaaaacctgcttacagccatttcctacttctcactctgtgttctctgggtcctaaggctgaagagattctgcagacatacttgaaatccaaggagtctgtgaccgatgcaattctacagacagaccagattctcacagaaaaggaaaaggagattgaagtggaatgtgtaaaagctgaatctgcacaggcttcagcaaaaatggtggaggaaatgcaaataaagtatcagcagatgatggaagagaaagagaagagttatcaagaacatgtgaaacaattgactgagaagatggagagggagagggcccagttgctggaagagcaagagaagaccctcactagtaaacttcaggaacaggcccgagtactaaaggagagatgccaaggtgaaagtacccaacttcaaaatgagatacaaaagctacagaagaccctgaaaaaaaaaaccaagagatatatgtcgcataagctaaagatctaaacaacagagcttttctgtcatcctaacccaaggcataactgaaacaattttagaatttggaacaagtgtcactatatttgataataattagatcttgcatcataacactaaaagtttacaagaacatgcagttcaatgatcaaaatcatgttttttccttaaaaagattgtaaattgtgcaacaaagatgcatttacctctgtaccaacagaggagggatcatgagttgccaccactcagaagtttattcttccagacgaccagtggatactgaggaaagtcttaggtaaaaatcttgggacatatttgggcactggtttggccaagtgtacaatgggtcccaatatcagaaacaaccatcctagcttcctagggaagacagtgtacagttctccattatatcaaggctacaaggtctatgagcaataatgtgatttctggacattgcccatggataattctcactgatggatctcaagctaaagcaaaccatcttatacagagatctagaatcttatattttccataggaaggtaaagaaatcattagcaagagtaggaattgaatcataaacaaattggctaatgaagaaatcttttctttcttgttcaattcatctagattataaccttaatgtgacacctgagacctttagacagttgaccctgaattaaatagtcacatggtaacaattatgcactgtgtaattttagtaatgtataacatgcaatgatgcactttaactgaagatagagactatgttagaaaattgaactaatttaattatttgattgttttaatcctaaagcataagttagtcttttcctgattcttaaaggtcatacttgaaatcctgccaattttccccaaagggaatatggaatttttttgactttcttttgagcaataaaataattgtcttgccattacttagtatatgtagacttcatcccaattgtcaaacatcctaggtaagtggttgacatttcttacagcaattacagattatttttgaactagaaataaactaaactagaaataaaataagtttcactagtt

SEQ ID NO: 290636 - DNA, 1962 bp, Homo sapiens
cagtttcattaggctctgaagccattacaaaggttgcttaacttctaattatttgatcactgaggaaaatccagaaagctacacaacactgaaggggtgaaataaaagtccagcgatccagcgaaagaaaagagaagtgacagaaacaactttacctggactgaagataaaagcacagacaagagaacaatgccctggacatggctccagagatccacatgacaggcccaatgtgcctcattgagaacactaatggggaactggtggcgaatccagaagctctgaaaatcctgtctgccattacacagcctgtggtggtggtggcaattgtgggcctctaccgcacaggaaaatcctacctgatgaacaagctagctgggaagaataagggcttctctctgggctccacagtgaaatctcacaccaaaggaatctggatgtggtgtgtgcctcaccccaaaaagccagaacacaccttagtcctgcttgacactgagggcctgggagatgtaaagaagggtgacaaccagaatgactcctggatcttcaccctggccgtcctcctgagcagcactctcgtgtacaatagcatgggaaccatcaaccagcaggctatggaccaactgtactatgtgacagagctgacacatcgaatccgatcaaaatcctcacctgatgagaatgagaatgaggattcagctgactttgtgagcttcttcccagattttgtgtggacactgagagatttctccctggacttggaagcagatggacaacccctcacaccagatgagtacctggagtattccctgaagctaacgcaaggtaccagtcaaaaagataaaaattttaatctgccccgactctgtatccggaagttcttcccaaagaaaaaatgttttgtcttcgatctgcccattcaccgcaggaagcttgcccagcttgagaaactacaagatgaagagctggaccctgaatttgtgcaacaagtagcagacttctgttcctacatctttagcaattccaaaactaaaactctttcaggaggcatcaaggtcaatgggcctcgtctagagagcctagtgctgacctatatcaatgctatcagcagaggggatctgccctgcatggagaacgcagtcctggccttggcccagatagagaactcagccgcagtgcaaaaggctattgcccactatgaccagcagatgggccagaaggtgcagctgcccgcagaaaccctccaggagctgctggacctgcacagggttagtgagagggaggccactgaagtctatatgaagaactctttcaaggatgtggaccatctgtttcaaaagaaattagcggcccagctagacaaaaagcgggatgacttttgtaaacagaatcaagaagcatcatcagatcgttgctcagctttacttcaggtcattttcagtcctctagaagaagaagtgaaggcgggaatttattcgaaaccagggggctattgtctctttattcagaagctacaagacctggagaaaaagtactatgaggaaccaaggaaggggatacaggctgaagagattctgcagacatacttgaaatccaaggagtctgtgaccgatgcaattctacagacagaccagattctcacagaaaaggaaaaggagattgaagtggaatgtgtaaaagctgaatctgcacaggcttcagcaaaaatggtggaggaaatgcaaataaagtatcagcagatgatggaagagaaagagaagagttatcaagaacatgtgaaacaattgactgagaagatggagagggagagggcccagttgctggaagagcaagagaagaccctcactagtaaacttcaggtatccaaatgcatcaccttgtggttcgtttttctgttttctctctgttcttcctgatcacaaacttagtatggcagagcgaacataaagcccaggggaagga

SEQ ID NO: 290637 - DNA, 1922 bp, Homo sapiens
cagtttcattaggctctgaagccattacaaaggttgcttaacttctaattatttgatcactgaggaaaatccagaaagctacacaacactgaaggggtgaaataaaagtccagcgatccagcgaaagaaaagagaagtgacagaaacaactttacctggactgaagataaaagcacagacaagagaacaatgccctggacatggctccagagatccacatgacaggcccaatgtgcctcattgagaacactaatggggaactggtggcgaatccagaagctctgaaaatcctgtctgccattacacagcctgtggtggtggtggcaattgtgggcctctaccgcacaggaaaatcctacctgatgaacaagctagctgggaagaataagggcttctctctgggctccacagtgaaatctcacaccaaaggaatctggatgtggtgtgtgcctcaccccaaaaagccagaacacaccttagtcctgcttgacactgagggcctgggagatgtaaagaagggtgacaaccagaatgactcctggatcttcaccctggccgtcctcctgagcagcactctcgtgtacaatagcatgggaaccatcaaccagcaggctatggaccaactgtactatgtgacagagctgacacatcgaatccgatcaaaatcctcacctgatgagaatgagaatgaggattcagctgactttgtgagcttcttcccagattttgtgtggacactgagagatttctccctggacttggaagcagatggacaacccctcacaccagatgagtacctggagtattccctgaagctaacgcaaggtaccagtcaaaaagataaaaattttaatctgccccgactctgtatccggaagttcttcccaaagaaaaaatgttttgtcttcgatctgcccattcaccgcaggaagcttgcccagcttgagaaactacaagatgaagagctggaccctgaatttgtgcaacaagtagcagacttctgttcctacatctttagcaattccaaaactaaaactctttcaggaggcatcaaggtcaatgggcctcgtctagagagcctagtgctgacctatatcaatgctatcagcagaggggatctgccctgcatggagaacgcagtcctggccttggcccagatagagaactcagccgcagtgcaaaaggctattgcccactatgaccagcagatgggccagaaggtgcagctgcccgcagaaaccctccaggagctgctggacctgcacagggttagtgagagggaggccactgaagtctatatgaagaactctttcaaggatgtggaccatctgtttcaaaagaaattagcggcccagctagacaaaaagcgggatgacttttgtaaacagaatcaagaagcatcatcagatcgttgctcagctttacttcaggtcattttcagtcctctagaagaagaagtgaaggcgggaatttattcgaaaccagggggctattgtctctttattcagaagctacaagacctggagaaaaagtactatgaggaaccaaggaaggggatacaggctgaagagattctgcagacatacttgaaatccaaggagtctgtgaccgatgcaattctacagacagaccagattctcacagaaaaggaaaaggagattgaagtggaatgtgtaaaagctgaatctgcacaggcttcagcaaaaatggttggtggtatagctagctgataccaccaaatgtcagcattttaatccttaaagtcatctcttgattggtgtgttctttctttatttatttttaataaaaaattgtatttgcttagaagcattcagaatgtcaacaaaatggctacaactttttcttttcttttttttttattttttggcaataacaggggggtatagggtaccgagcccaaa

SEQ ID NO: 290638 - DNA, 1241 bp, Homo sapiens
cagtttcattaggctctgaagccattacaaaggttgcttaacttctaattatttgatcactgaggaaaatccagaaagctacacaacactgaaggggtgaaataaaagtccagcgatccagcgaaagaaaagagaagtgacagaaacaactttacctggactgaagataaaagcacagacaagagaacaatgccctggacatggctccagagatccacatgacaggcccaatgtgcctcattgagaacactaatggggaactggtggcgaatccagaagctctgaaaatcctgtctgccattacacagcctgtggtggtggtggcaattgtgggcctctaccgcacaggaaaatcctacctgatgaacaagctagctgggaagaataagggcttctctctgggctccacagtgaaatctcacaccaaaggaatctggatgtggtgtgtgcctcaccccaaaaagccagaacacaccttagtcctgcttgacactgagggcctgggagatgtaaagaagggtgacaaccagaatgactcctggatcttcaccctggccgtcctcctgagcagcactctcgtgtacaatagcatgggaaccatcaaccagcaggctatggaccaactgtactatgtgacagagctgacacatcgaatccgatcaaaatcctcacctgatgagaatgagaatgaggattcagctgactttgtgagcttcttcccagattttgtgtggacactgagagatttctccctggacttggaagcagatggacaacccctcacaccagatgagtacctggagtattccctgaagctaacgcaaggtaccagtcaaaaagataaaaattttaatctgccccgactctgtatccggaagttcttcccaaagaaaaaatgttttgtcttcgatctgcccattcaccgcaggaagcttgcccagcttgagaaactacaagatgaagagctggaccctgaatttgtgcaacaagtagcagacttctgttcctacatctttagcaattccaaaactaaaactctttcaggaggcatcaaggtcaatgggcctcgctgaagagattctgcagacatacttgaaatccaaggagtctgtgaccgatgcaattctacagacagaccagattctcacagaaaaggaaaaggagattgaagtggaacgtgtaaaagctgaatctgcacaggctttagccaagagtatcaagaacagtgaaacacttgactg

SEQ ID NO: 290639 - DNA, 360 bp, Homo sapiens
aaggtcagaggggacacctgtattcataaaccagctgcctgactgtgaatcctgatgaatcaagctcaaaaggagaaaacaaaaaataatgcaagtacagaggagagatcccatgtatccactttagaattgacacttaggttaggatcaaaggaaaatggaaggtttgggaatgtgttgaactaatatgggatgaggttcctgttcattttgtcacatttccttagttagctactcagctatgtgacagagctgacacatcgaatccgatcaaaatcctcacctgatgagaatgagaatgaggattcagctgactttgtgagcttcttcccagattttgtgtggacactgagagatttc

SEQ ID NO: 290640 - DNA, 327 bp, Homo sapiens
caaaatcctcacctgatgagaatgagaatgaggattcagctgactttgtgagcttcttcccagattttgtgtggacactgagagatttctccctggacttggaagcagatggacaacccctcacaccagatgagtacctggagtattccctgaagctaacgcaagtaacagagacgtaccattgataaatgaggacgacaaaacactagaaattatcattttttagtttactattgatagttttctcacatttacagttttctatatctctagcttgctattcttaagaattaatgcttgctattagcaatagaaaaggttttttga

SEQ ID NO: 290641 - DNA, 1600 bp, Homo sapiens
cttgacttcccggacagactgcgacctccttgaggatggaatcggtattttggttaaatttatttctgcatgggccttgcacataaaaaacgtttattgaacaaacgaatcctgtatgttcctccccccaggcaggaaacgctccctgggagggagggtagtctattggtgagctaggacgtttggactcagggttccgaggaaccaggagcgatccttagtgggccgagacttccgaatttgatcaaaggtaaagagggactggagagcggtccatctgacttctgtgggggatgggcaggagtcaggggcggacgcctgaatcttgtttctcagaagagccgagaggcctaggctcaagcttggggcgatccggtacttggaggttcgaagctcctagtttcgggttgagaccgatgtggagggcgatgacgcgcgggttccttgacatcgaggatcagtaacacccggagtgggtggggaacgaggggggcggcccctgagctcaggccccgcccctttccggggacgtttcaccggattggctgtccttccataacgacatgcggccccgccccggcgcgcgccccgccgcgtgcccagcccgggtagctgctgcagcctacgctgcctcggccactgcctgccgcgtgcggagccggagcccgagcctgagtggcgccgggcccgacgtggggctcctgggccgcggcggcgggcgggcgatgctccagaggcctgaccagccatggaggccgaggcaggcggcctggaggagctgacggacgaggagatggcggcgctaggcaaggaagagctagtgcggcgcctgcggcgggaggaggcggcgcgcctggcggcactggtgcagcgcggccgcctcatgcaggaggtgaatcggcagctgcagggccacctgggcgagatccgcgagctcaagcagctcaaccggcgtctgcaggcagagaaccgtgagctgcgcgacctctgctgcttcctggactcggagcgccagcgcgggcggcgcgccgcacgccagtggcagctcttcgggacccaagcatcccgggccgtgcgcgaggacctgggcggctgttggcagaagctggccgagctggagggccgccaggaggagctgctgcgggagaacctagcgcttaaggagctctgcctggcgctgggcgaagaatggggcccccgcggcggccccagcggcgccgggggatcaggagccgggccagcacccgagcttgccttgcccccgtgcgggccccgcgacctaggcgatggaagctccagcactggcagcgtgggcagtccggatcagttgcccctggcctgttcccccgatgattgaaggcactgcttcctccacgccgacgcccgcccggattgctccccgagccccgggaccgctgtggacctcgggacctggacgccgtcctggctgcgcaggaggggccgctggcatggactaagaaatcctgacaccaagaagggcccctcgctcttgctggcagggcagcagggggactgaaggctggagcggagggacttgctgggggttggattgggggtaataaacccggacggaagcgga

SEQ ID NO: 290642 - DNA, 2062 bp, Homo sapiens
cttgacttcccggacagactgcgacctccttgaggatggaatcggtattttggttaaatttatttctgcatgggccttgcacataaaaaacgtttattgaacaaacgaatcctgtatgttcctccccccaggcaggaaacgctccctgggagggagggtagtctattggtgagctaggacgtttggactcagggttccgaggaaccaggagcgatccttagtgggccgagacttccgaatttgatcaaaggtaaagagggactggagagcggtccatctgacttctgtgggggatgggcaggagtcaggggcggacgcctgaatcttgtttctcagaagagccgagaggcctaggctcaagcttggggcgatccggtacttggaggttcgaagctcctagtttcgggttgagaccgatgtggagggcgatgacgcgcgggttccttgacatcgaggatcagtaacacccggagtgggtggggaacgaggggggcggcccctgagctcaggccccgcccctttccggggacgtttcaccggattggctgtccttccataacgacatgcggccccgccccggcgcgcgccccgccgcgtgcccagcccgggtagctgctgcagcctacgctgcctcggccactgcctgccgcgtgcggagccggagcccgagcctgagtggcgccgggcccgacgtggggctcctgggccgcggcggcgggcgggcgatgctccagaggcctgaccagccatggaggccgaggcaggcggcctggaggagctgacggacgaggagatggcggcgctaggcaaggaagagctagtgcggcgcctgcggcgggaggaggcggcgcgcctggcggcactggtgcagcgcggccgcctcatgcaggaggtgaatcggcagctgcagggccacctgggcgagatccgcgagctcaagcagctcaaccggcgtctgcaggcagagaaccgtgagctgcgcgacctctgctgcttcctggactcggagcgccagcgcgggcggcgcgccgcacgccagtggcagctcttcgggacccaagcatcccgggccgtgcgcgaggacctgggcggctgttggcagaagctggccgagctggagggccgccaggaggagctgctgcgggagaacctagcgcttaaggagctctgcctggcgctgggcgaagaatggggcccccgcggcggccccagcggcgccgggggatcaggagccgggccagcacccgagcttgccttgcccccgtgcgggccccgcgacctaggcgatggaagctccagcactggcagcgtgggcagtccggatcagttgcccctggcctgttcccccgatgattgaaggcactgcttcctccacgccgacgcccgcccggattgctccccgagccccgggaccgctgtggacctcgggacctggacgccgtcctggctgcgcaggaggggccgctggcatggactaagaaatcctgacaccaagaagggcccctcgctcttgctggcagggcagcagggggactgaaggctggagcggagggacttgctgggggttggattgggggtaataaacccggacggaagcggagccacggcctgggcagcgtctgtttggtactcgccggggttggggcgagggtggggtgctgatacagggtacaattcccatccagaaggactgcagaactaatgattcccccattacttcgagcctggggtgggatgcggggcagtggtaaaccagacttcccccatcgggcgccgggaccggccttaatccagcccctgaagtggctccagctcccttcccggctccttcctgtccaagacaatggggcaggaagcaggtgctgggggcctagaaccactcggccgcctcctctgaggctggaagggggcataacagcgcccctccgtggcacacgcagcagcactgtgggcccccacggggagaggggcggtaagcctcttcgcttttaccccagaggactgtctcccctcagtcccggagatgaggccgagcggatgtagccccacttgtcagataaga

SEQ ID NO: 290643 - DNA, 1302 bp, Homo sapiens
cttgacttcccggacagactgcgacctccttgaggatggaatcggtattttggttaaatttatttctgcatgggccttgcacataaaaaacgtttattgaacaaacgaatcctgtatgttcctccccccaggcaggaaacgctccctgggagggagggtagtctattggtgagctaggacgtttggactcagggttccgaggaaccaggagcgatccttagtgggccgagacttccgaatttgatcaaaggtaaagagggactggagagcggtccatctgacttctgtgggggatgggcaggagtcaggggcggacgcctgaatcttgtttctcagaagagccgagaggcctaggctcaagcttggggcgatccggtacttggaggttcgaagctcctagtttcgggttgagaccgatgtggagggcgatgacgcgcgggttccttgacatcgaggatcagtaacacccggagtgggtggggaacgaggggggcggcccctgagctcaggccccgcccctttccggggacgtttcaccggattggctgtccttccataacgacatgcggccccgccccggcgcgcgccccgccgcgtgcccagcccgggtagctgctgcagcctacgctgcctcggccactgcctgccgcgtgcggagccggagcccgagcctgagtggcgccgggcccgacgtggggctcctgggccgcggcggcgggcgggcgatgctccagaggcctgaccagccatggaggccgaggcaggcggcctggaggagctgacggacgaggagatggcggcgctaggcaaggaagagctagtgcggcgcctgcggcgggaggaggggagaacctagcgcttaaggagctctgcctggcgctgggcgaagaatggggcccccgcggcggccccagcggcgccgggggatcaggagccgggccagcacccgagcttgccttgcccccgtgcgggccccgcgacctaggcgatggaagctccagcactggcagcgtgggcagtccggatcagttgcccctggcctgttcccccgatgattgaaggcactgcttcctccacgccgacgcccgcccggattgctccccgagccccgggaccgctgtggacctcgggacctggacgccgtcctggctgcgcaggaggggccgctggcatggactaagaaatcctgacaccaagaagggcccctcgctcttgctggcagggcagcagggggactgaaggctggagcggagggacttgctgggggttggattgggggtaataaacccggacggaagcgga

SEQ ID NO: 290644 - DNA, 1662 bp, Homo sapiens
cttgacttcccggacagactgcgacctccttgaggatggaatcggtattttggttaaatttatttctgcatgggccttgcacataaaaaacgtttattgaacaaacgaatcctgtatgttcctccccccaggcaggaaacgctccctgggagggagggtagtctattggtgagctaggacgtttggactcagggttccgaggaaccaggagcgatccttagtgggccgagacttccgaatttgatcaaaggtaaagagggactggagagcggtccatctgacttctgtgggggatgggcaggagtcaggggcggacgcctgaatcttgtttctcagaagagccgagaggcctaggctcaagcttggggcgatccggtacttggaggttcgaagctcctagtttcgggttgagaccgatgtggagggcgatgacgcgcgggttccttgacatcgaggatcagtaacacccggagtgggtggggaacgaggggggcggcccctgagctcaggccccgcccctttccggggacgtttcaccggattggctgtccttccataacgacatgcggccccgccccggcgcgcgccccgccgcgtgcccagcccgggtagctgctgcagcctacgctgcctcggccactgcctgccgcgtgcggagccggagcccgagcctgagtggcgccgggcccgacgtggggctcctgggccgcggcggcgggcgggcgatgctccagaggcctgaccagccatggaggccgaggcaggcggcctggaggagctgacggacgaggagatggcggcgctaggcaaggaagagctagtgcggcgcctgcggcgggaggaggcggcgcgcctggcggcactggtgcagcgcggccgcctcatgcaggaggtgaatcggcagctgcagggccacctgggcgagatccgcgagctcaagcagctcaaccggcgtctgcaggcagagaaccgtgagctgcgcgacctctgctgcttcctggactcggagcgccagcgcgggcggcgcgccgcacgccagtggcagctcttcgggacccaagcatcccgggccgtgcgcgaggacctgggcggctgttggcagaagctggccgagctggagggccgccaggaggagctgctgcgggagaacctagcgcttaaggagctctgcctggcgctgggcgaagaatggggcccccgcggcggccccagcggcgccgggggatcaggagccgggccagcacccgagcttgccttgcccccgtgcgggccccgcgacctaggcgatggaagctccagcactggcagcgtgggcagtccggatcagttgcccctggcctgttcccccgatgattgaaggcactgcttcctccacgccgacgcccgcccggattgctccccgagccccgggaccgctgtggacctcgggacctggacgccgtcctggctgcgcaggaggggccgctggcatggactaagaaatcctgacaccaagaagggcccctcgctcttgctggcagggcagcagggggactgaaggctggagcggaacatgattggggggttaggaatttggggggtaaaataaaacccgggaaccggaaaacctggggaacatatagataactatggtgctaatagcaagctatggacgagatataa

SEQ ID NO: 290645 - DNA, 1440 bp, Homo sapiens
cttgacttcccggacagactgcgacctccttgaggatggaatcggtattttggttaaatttatttctgcatgggccttgcacataaaaaacgtttattgaacaaacgaatcctgtatgttcctccccccaggcaggaaacgctccctgggagggagggtagtctattggtgagctaggacgtttggactcagggttccgaggaaccaggagcgatccttagtgggccgagacttccgaatttgatcaaaggtaaagagggactggagagcggtccatctgacttctgtgggggatgggcaggagtcaggggcggacgcctgaatcttgtttctcagaagagccgagaggcctaggctcaagcttggggcgatccggtacttggaggttcgaagctcctagtttcgggttgagaccgatgtggagggcgatgacgcgcgggttccttgacatcgaggatcagtaacacccggagtgggtggggaacgaggggggcggcccctgagctcaggccccgcccctttccggggacgtttcaccggattggctgtccttccataacgacatgcggccccgccccggcgcgcgccccgccgcgtgcccagcccgggtagctgctgcagcctacgctgcctcggccactgcctgccgcgtgcggagccggagcccgagcctgagtggcgccgggcccgacgtggggctcctgggccgcggcggcgggcgggcgatgctccagaggcctgaccagccatggaggccgaggcaggcggcctggaggagctgacggacgaggagatggcggcgctaggcaaggaagagctagtgcggcgcctgcggcgggaggaggcggcgcgcctggcggcactggtgcagcgcggccgcctcatgcaggaggtgaatcggcagctgcagggccacctgggcgagatccgcgagctcaagcagctcaaccggcgtctgcaggcagagaaccgtgagctgcgcgacctctgctgcttcctggactcggagcgccagcgcgggcggcgcgccgcacgccagtggcagctcttcgggacccaagcatcccgggccgtgcgcgaggacctgggcggctgttggcagaagctggccgagctggagggccgccaggaggagctgctgcgggagaacctagcgcttaaggagctctgcctggcgctgggcgaagaatggggcccccgcggcggccccagcggcgccgggggatcaggagccgggccagcacccgagcttgccttgcccccgtgcgggccccgcgacctaggcgatggaagctccagcactggcagcatggactaagaaatcctgacaccaagaagggcccctcgctcttgctggcagggcagcagggggactgaaggctggagcggagggacttgctgggggttggattgggggtaataaacccggacggaagcgga

SEQ ID NO: 290646 - DNA, 1331 bp, Homo sapiens
cttgacttcccggacagactgcgacctccttgaggatggaatcggtattttggttaaatttatttctgcatgggccttgcacataaaaaacgtttattgaacaaacgaatcctgtatgttcctccccccaggcaggaaacgctccctgggagggagggtagtctattggtgagctaggacgtttggactcagggttccgaggaaccaggagcgatccttagtgggccgagacttccgaatttgatcaaaggtaaagagggactggagagcggtccatctgacttctgtgggggatgggcaggagtcaggggcggacgcctgaatcttgtttctcagaagagccgagaggcctaggctcaagcttggggcgatccggtacttggaggttcgaagctcctagtttcgggttgagaccgatgtggagggcgatgacgcgcgggttccttgacatcgaggatcagtaacacccggagtgggtggggaacgaggggggcggcccctgagctcaggccccgcccctttccggggacgtttcaccggattggctgtccttccataacgacatgcggccccgccccggcgcgcgccccgccgcgtgcccagcccgggtagctgctgcagcctacgctgcctcggccactgcctgccgcgtgcggagccggagcccgagcctgagtggcgccgggcccgacgtggggctcctgggccgcggcggcgggcgggcgatgctccagaggcctgaccagccatggaggccgaggcaggcggcctggaggagctgacggacgaggagatggcggcgctaggcaaggaagagctagtgcggcgcctgcggcgggaggaggcggcgcgcctggcggcactggtgcagcgcggccgcctcatgcaggaggtgaatcggcagctgcagggccacctgggcgagatccgcgagctcaagcagctcaaccggcgtctgcaggcagagaaccgtgagctgcgcgacctctgctgcttcctggactcggagcgccagcgcgggcggcgcgccgcacgccagtggcagctcttcgggacccaagcatcccgggccgtgcgcgaggacctgggcggctgttggcagaagctggccgagctggagggccgccaggaggagctgctgcgggagaacctagcgcttaaggagctctgcctggcgctgggcgaagaatggggcccccgcggcggccccagcggcgccgggggatcaggagccgggccagcacccgagcttgccttgcccccgtgcgggccccgcgacctgggacttgctgggggttggattgggggtaataaacccggacggaagcgga

SEQ ID NO: 290647 - DNA, 1923 bp, Homo sapiens
cttgacttcccggacagactgcgacctccttgaggatggaatcggtattttggttaaatttatttctgcatgggccttgcacataaaaaacgtttattgaacaaacgaatcctgtatgttcctccccccaggcaggaaacgctccctgggagggagggtagtctattggtgagctaggacgtttggactcagggttccgaggaaccaggagcgatccttagtgggccgagacttccgaatttgatcaaaggtaaagagggactggagagcggtccatctgacttctgtgggggatgggcaggagtcaggggcggacgcctgaatcttgtttctcagaagagccgagaggcctaggctcaagcttggggcgatccggtacttggaggttcgaagctcctagtttcgggttgagaccgatgtggagggcgatgacgcgcgggttccttgacatcgaggatcagtaacacccggagtgggtggggaacgaggggggcggcccctgagctcaggccccgcccctttccggggacgtttcaccggattggctgtccttccataacgacatgcggccccgccccggcgcgcgccccgccgcgtgcccagcccgggtagctgctgcagcctacgctgcctcggccactgcctgccgcgtgcggagccggagcccgagcctgagtggcgccgggcccgacgtggggctcctgggccgcggcggcgggcgggcgatgctccagaggcctgaccagccatggaggccgaggcaggcggcctggaggagctgacggacgaggagatggcggcgctaggcaaggaagagctagtgcggcgcctgcggcgggaggaggcggcgcgcctggcggcactggtgcagcgcggccgcctcatgcaggaggtgaatcggcagctgcagggccacctgggcgagatccgcgagctcaagcagctcaaccggcgtctgcaggcagagaaccgtgagctgcgcgacctctgctgcttcctggactcggagcgccagcgcgggcggcgcgccgcacgccagtggcagctcttcgggacccaagcatcccgggccgtgcgcgaggacctgggcggctgttggcagaagctggccgagctggagggccgccaggaggagctgctgcaggcgatggaagctccagcactggcagcgtgggcagtccggatcagttgcccctggcctgttcccccgatgattgaaggcactgcttcctccacgccgacgcccgcccggattgctccccgagccccgggaccgctgtggacctcgggacctggacgccgtcctggctgcgcaggaggggccgctggcatggactaagaaatcctgacaccaagaagggcccctcgctcttgctggcagggcagcagggggactgaaggctggagcggagggacttgctgggggttggattgggggtaataaacccggacggaagcggagccacggcctgggcagcgtctgtttggtactcgccggggttggggcgagggtggggtgctgatacagggtacaattcccatccagaaggactgcagaactaatgattcccccattacttcgagcctggggtgggatgcggggcagtggtaaaccagacttcccccatcgggcgccgggaccggccttaatccagcccctgaagtggctccagctcccttcccggctccttcctgtccaagacaatggggcaggaagcaggtgctgggggcctagaaccactcggccgcctcctctgaggctggaagggggcataacagcgcccctccgtggcacacgcagcagcactgtgggcccccacggggagaggggcggtaagcctcttcgcttttaccccagaggactgtctcccctcagtcccggagatgaggccgagcggatgtagccccacttgtcagataaga

SEQ ID NO: 290648 - DNA, 744 bp, Homo sapiens
gctgggcccgccgcgttcgcaccaagcacgccaggcggccctggcctacctccctcccgcctcccagcagctggcacgagggaacctggccgtcaggtttcccctgggatcctgggacggtatcaggcggggaatctgtgcggccgcggcgaggtgatttatttggcataaaagtattctttcaaggatggcagaagctgttttgattgatctttttggtttgaaattgaactctcaaaaaaactgccatcagacattactgaagactttgaatgctgtccaataccaccatgctgccaaggccaagtttctctgtataatgtgttgcagtaacatcagctatgaaagggatggagaacaagataattgtgaaatagaaacaagcaatggattatcagctctcttggaagaatttgagattgttagctgtcccagcatggctgccactttgtataccattaaacagaaaattgatgaaaaaaatctgagcagcattaagatattttcatacatggatttactacaagaacaggtgggatatcttatataccaactcttagctcattcaatctcttcagtagttccaaacggagagatcccaaggtagtggttcaagataaagactcatcattccaatgacatctggattatgggaagaaaggagcctgactcttatgatggaataaccacaaatcagagaggagtcacaatagcagctcttggtgcagactgtataccgatagt

SEQ ID NO: 290649 - DNA, 940 bp, Homo sapiens
gctgggcccgccgcgttcgcaccaagcacgccaggcggccctggcctacctccctcccgcctcccagcagctggcacgagggaacctggccgtcaggtttcccctgggatcctgggacggtatcaggcggggaatctgtgcggccgcggcgaggtgatttatttggcataaaagtattctttcaaggatggcagaagctgttttgattgatctttttggtttgaaattgaactctcaaactgccaaggccaagtttctctgtataatgtgttgcagtaacatcagctatgaaagggatggagaacaagataattgtgaaatagaaacaagcaatggattatcagctctcttggaagaatttgagattgttagctgtcccagcatggctgccactttgtataccattaaacagaaaattgatgaaaaaaatctgagcagcattaaggtaattgtacccaggcacaggaagacattaatgaaagcttttattgatcaactcttcactgatgtttacaattttgaatttgaagatttgcaagtgacttttaggggagggctttttaaacagtccattgaaataaacgtaatcacagctcaagaactaagaggaattcagaatgaaatagaaacatttttgagaagtctgccagcactgagaggaaaattaactattatcacttcttctttgatcccagatattttcatacatggatttactacaagaacaggtgggatatcttatataccaactcttagctcattcaatctcttcagtagttccaaacggagagatcccaaggtagtggttcaagataaagactcatcattccaatgacatctggattatgggaagaaaggagcctgactcttatgatggaataaccacaaatcagagaggagtcacaatagcagctcttggtgcagactgtataccgatagt

SEQ ID NO: 290650 - DNA, 548 bp, Homo sapiens
ggtctggggaataaagaatgggatgaaatggtgagagtccagaggggttgagcaaagaactcactatcacacagcaaggcactaatttgaaatgcctgggagaagtagaagctgcatttgactctcatattcttattggaccaggaaggcaggaggagacaccagtgtgcaccagagaaggagaagtcagagatgacagtccctgcctgaggccatctctggtccaccagacaactcatcaccaacttcccaacagccactgctctaggccagacttggatctgctcttgaatctgcccctgcggaaagagggccgtttggacaggctgtgcctggagatttctggcctcataaaatcctcctggtctcttaggagagctggtgacactctccaggtccttggtggagcctgatgattgacatcttaagcaaattctctggagaagtcgatgctcctgatggaggctcacacattgataacccctggtttagagacactactaattgttccagctcatccagctaataaatgacagatctcagactta

SEQ ID NO: 290651 - DNA, 844 bp, Homo sapiens
ttaaggacccaggacagggcatctggacatggctgtgtgaatgtttggctcgctctgttccagcggctctcccagaagttgggaggggtgaagatccccttgggctgtccgctcttgggtccatggcttgaagaagaatccccttctgctcactatgaacatggcttatgacctcgcagagagcaaagataaggagacccagagccaggaaaaggtctcagcccccaggatcctctccaccttcccatcctccctcagctgaacatggtagcctcagaaggaaagggcttcactgaagatgatgatttgctcaaagaggaagacgcgcctctctcgacctcgggaagacagcagccctccagcctcaggctcggtgacccagaaagtgtcctggcccaagagcttcccctgagcagtcagtttgccctgaaaccaaaaggatagtggccttggaaaaagaacaagaaaaaggacaattctctgctcctcccttcctcgcctgacatgcccaaccaaccatggggtcagccccaggagaagacaactccccataaggacctcctgaatgctagggctggggcagaagagcatcgggcctccagtttcttgccctatctccgtacctcaaatccccgcaatctccccagcgtcatcatatcgttgcagcgcttgggcacaaagcacatgacctccacagcttgctgggacacagttcactcaggacatacctaggatgaaagcaggaggaggcccccacttcagcgtcggagctcatccttggttcagcccgttcctccctcctcccctttatcatcatagccaaccttggaggaaattccatcta

SEQ ID NO: 290652 - DNA, 680 bp, Homo sapiens
aagcagctgtaaggtttttggtagctgtcagtgctagcaaacagtgcttttctcacagaactactggaaagagtcctggctcggaaaacttgctcttgaaagtggcacggccagagcaggggtctctagagggtcgtgccacctctacctgccacaggttccattgtcggtcagcttctagaattcctctccagagctactctcaagttatatccaggggacaggcccctttggctccaacccacacgcctgaactttaaggatcattggactatcttctctgtggccagcgcagctctcttctgtgttcacagaatggccactgataggcatgcctcttttcccacccactggaaggctcacaggcaaggtgagagaggacacagaaggtgccaacactgtcgctacagtaaggacctgaagtgactttgagaaattcaccctcacaaaccttccttcaggagcaggcattggtagtgcagaggcacagattccgtcctttaccagctgcagaatcttgggcaagttacatagcctctgtgagcctcatcggtaaacagtgggggttatgaaacccacctcacagggttgttgtgaggatccaatgagttgatttaggtaagcacctagcacatgccgtggcaccaagtaagcactcaataaatcactcaactcctttc

SEQ ID NO: 290653 - DNA, 1722 bp, Homo sapiens
gaaagaggtttttaaattctccatgaagtgtactatgttccatcattccttcccaaagccaccggaagcattccttctaggaaaggtggagtcggtagtgagaagccggaggtgagaagacccctgagcggatggattcattcattttctgaatttcctatgtgaggacagtattagagcccagtgaggctttgagaggccccaaagatgagcgccaacagcagcagagtgggccagcttctcttgcagggttcagcgtgcattaggtggaagcaggatgtggaaggggctgtctaccacctagccaactgcctcttactcctgggcttcatggggggcagtggggtgtatggatgcttctatctttttggcttcctgagtgcaggttacctgtgctgcgtgctgtggggctggttcagtgcctgtggcctggacattgttctttggagcttcctgctggctgtggtctgcctgctccagctggcacacctggtataccgcctgcgtgaggacaccctccctgaggagtttgacctcctctacaagacgctgtgcctgcccttgcaggtgcccctacagacatacaaggagattgttcactgctgcgaggagcaggtcttaactctggccactgaacagacctatgctgtggagggtgagacacccatcaaccgcctgtccctgctgctctctggccgggttcgtgtgagccaggatgggcagtttctgcactacatctttccataccagttcatggactctcctgagtgggaatcactacagccttctgaggagggggtgttccaggtcactctgactgctgagacctcatgtagctacatttcctggccccggaaaagtctccatcttcttctgaccaaagagcgatacatctcctgcctcttctcggctctgctgggatatgacatctcggagaagctctacactctcaatgacaagctctttgctaagtttgggctgcgctttgacatccgccttcccagcctctaccatgtcctgggtcccactgctgcagatgctggaccagagtccgagaagggtgatgaggaagtctgtgagccagctgtgtcccctcctcaggccacacccacctctctccagcaaacacccccttgttctacccctccagctaccaccaactttcctgcacctcctacccgggccaggttgtccaggccagacagtggcatactggcttctagaattcctctccagagctactctcaagttatatccaggggacaggcccctttggctccaacccacacgcctgaactttaaggatcattggactatcttctctgtggccagcgcagctctcttctgtgttcacagaatggccactgataggcatgcctcttttcccacccactggaaggctcacaggcaaggtgagagaggacacagaaggtgccaacactgtcgctacagtaaggacctgaagtgactttgagaaattcaccctcacaaaccttccttcaggagcaggcattggtagtgcagaggcacagattccgtcctttaccagctgcagaatcttgggcaagttacatagcctctgtgagcctcatcggtaaacagtgggggttatgaaacccacctcacagggttgttgtgaggatccaatgagttgatttaggtaagcacctagcacatgccgtggcaccaagtaagcactcaataaatcactcaactcctttc

SEQ ID NO: 290654 - DNA, 616 bp, Homo sapiens
  misc_feature (26)..(26): n is a, c, g, or t
  misc_feature (30)..(30): n is a, c, g, or t
agaaatataggaacaagaaccagaantgtngcgcgcccgcggttttcgccctataccgtcccgcataggtgagatatcagcccggatgtattattatatactctaacagacttctagaattcctctccagagctactctcaagttatatccaggggacaggcccctttggctccaacccacacgcctgaactttaaggatcattggactatcttctctgtggccagcgcagctctcttctgtgttcacagaatggccactgataggcatgcctcttttcccacccactggaaggctcacaggcaaggtgagagaggacacagaaggtgccaacactgtcgctacagtaaggacctgaagtgactttgagaaattcaccctcacaaaccttccttcaggagcaggcattggtagtgcagaggcacagattccgtcctttaccagctgcagaatcttgggcaagttacatagcctctgtgagcctcatcggtaaacagtgggggttatgaaacccacctcacagggttgttgtgaggatccaatgagttgatttaggtaagcacctagcacatgccgtggcaccaagtaagcactcaataaatcactcaactcctttc

SEQ ID NO: 290655 - DNA, 586 bp, Homo sapiens
aattatagatgggcttttcccctttatttatctcctttattcttcttataatcattcaccacacacaatttcccctcatacttctagaattcctctccagagctactctcaagttatatccaggggacaggcccctttggctccaacccacacgcctgaactttaaggatcattggactatcttctctgtggccagcgcagctctcttctgtgttcacagaatggccactgataggcatgcctcttttcccacccactggaaggctcacaggcaaggtgagagaggacacagaaggtgccaacactgtcgctacagtaaggacctgaagtgactttgagaaattcaccctcacaaaccttccttcaggagcaggcattggtagtgcagaggcacagattccgtcctttaccagctgcagaatcttgggcaagttacatagcctctgtgagcctcatcggtaaacagtgggggttatgaaacccacctcacagggttgttgtgaggatccaatgagttgatttaggtaagcacctagcacatgccgtggcaccaagtaagcactcaataaatcactcaactcctttc

SEQ ID NO: 290656 - DNA, 1117 bp, Homo sapiens
tgcggacgaatcggcgtttgccgaggctggcatagatttggctgtctccgctcatagctgcttttggcgcgaaagatgccgggtctggttgactcaaaccctgccccgcctgagtctcaggagaagaagccgctgaagccctgctgcgcttgcccggagaccaagaaggcgcgcgatgcgtgtatcatcgagaaaggagaagaacactgtggacatctaattgaggcccacaaggaatgcatgagagccctaggatttaaaatatgaaatggtgagtataggtgcttggagaggataaggaaatcaccctgatccaatagctggtaacctgcgaggcatatcatatctcatgactatggtaacttcaagcattacatcgtcacgcaactattcaagcctggatgaaagcatgaaccagcatggacaagtaacaaacagtttgaagaccaggctgagttcatgaccacacttgttgactctggtgacttcataagatggcccccgcctgcctcgcctgcctcttgtctgctgctccttttgattcacctacaacaagctgttctctgttaccagaatatgccacgtattttgttttacttctgggactgactttacaatctgttctttcttcctggaatgccctcctctagctggggaaaacctactcatctttttagaccagattaaaagtcaccttccctgtgatgttttctcgtggaaaaaaatatttttttaagagacagtggtctcactatgttgcctaggctggtctcaaactcctgggcacaagtgatcctcccatctcagcctcccagaatactgggattgtagacataagccatcacgcccccaacctcatgaattttagttaggttatagcagtatagtaaaagtccctatggattgaattatttgctccctcataagtgttttttctttgaatcctaagtacacttattttattggattacagtttctgagtcagtatccgggatagactgaaagtttcttgaagtgataattgtcttattcatctttatatcccctgttcttggaacacatagtctgtcctgaataaatgcctattgaattgaatcagctcaacaaatgagaaaac

SEQ ID NO: 290657 - DNA, 901 bp, Homo sapiens
  misc_feature (26)..(26): n is a, c, g, or t
  misc_feature (764)..(764): n is a, c, g, or t
taagtgaatagttataaacaaacaanccccccgcccacgcccctctacttctagaattcctctccagagctactctcaagttatatccaggggacaggcccctttggctccaacccacacgcctgaactttaaggatcattggactatcttctctgtggccagcgcagctctcttctgtgttcacagaatggccactgataggcatgcctcttttcccacccactggaaggctcacaggcaaggtgagagaggacacagaaggtgccaacactgtcgctacagtaaggacctgaagtgactttgagaaattcaccctcacaaaccttccttcaggagcaggcattggtagtgcagaggcacagattccgtcctttaccagctgcagaatcttgggcaagttacatagcctctgtgagcctcatcggtaaacagtgggggttatgaaacccacctcacagggttgttgtgaggatccaatgagttgatttaggtaagcacctagcacatgccgtggcaccaagtaagcactcaataaatcactcaactcctttcaaaaacaaaaaatcggcctgcgatggccctcaacgatggaagctcttgcggccgctttccctttaatggaggggcttaattcatcgacccttcgctcacttgcactccctcgcacttccggtcgtatcagtgtggcggaaaagacgttttcaagcttcacttcaataggcaggtaataacgtgtcttttcaactaaattctcggggtgttnacctaatatgataaaaacatcgttagtccataaagggcccagtaaataaggcctgagaacccggaataatgcgcctgtgtgagattggaatttatattattatgcattcgctccccttgacgagattcacatataat

SEQ ID NO: 290658 - DNA, 494 bp, Homo sapiens
aagcagctgtaaggtttttggtagctgtcagtgctagcaaacagtgcttttctcacagaactactggaaagagtcctggctcggaaaacttgctcttgaaagtggcacggccagagcaggggtctctagagggtcgtgccacctctacctgccacaggttccattgtcggtcaggtaagttagaggcagcagttccccacctgccctctggataacagcagcctggggctgctcctgagtcatgtttccacttctgtcttacaggcctcattttcctacccatctttctgtaaaaatgaaagtcaggagtcttatgaaacttaccattattcaatacaggcttttggtttttttctttaaattagatagggttaggtaagaagtagagttctatagaacgttcataggaagcaatggcaccaaaagccaaaattgacaaatgggatctgattaactaagggcttctccacagcaaaagactccctcagggtgac

SEQ ID NO: 290659 - DNA, 1465 bp, Homo sapiens
tgcggacgaatcggcgtttgccgaggctggcatagatttggctgtctccgctcatagctgcttttggcgcgaaagatgccgggtctggttgactcaaaccctgccccgcctgagtctcaggagaagaagccgctgaagccctgctgcgcttgcccggagaccaagaaggcgcgcgatgcgtgtatcatcgagaaaggagaagaacactgtggacatctaattgaggcccacaaggaatgcatgagagccctaggatttaaaatatgaaatggtgagtataggtgcttggagaggataaggaaatcaccctgatccaatagctggtaacctgcgaggcatatcatatctcatgactatggtaacttcaagcattacatcgtcacgcaactattcaagcctggatgaaaggtcactctgactgctgagacctcatgtagctacatttcctggccccggaaaagtctccatcttcttctgaccaaagagcgatacatctcctgcctcttctcggctctgctgggatatgacatctcggagaagctctacactctcaatgacaagctctttgctaagtttgggctgcgctttgacatccgccttcccagcctctaccatgtcctgggtcccactgctgcagatgctggaccagagtccgagaagggtgatgaggaagtctgtgagccagctgtgtcccctcctcaggccacacccacctctctccagcaaacacccccttgttctacccctccagctaccaccaactttcctgcacctcctacccgggccaggttgtccaggccagacagtggcatactggggtgaggactccaccagtctggtgctggaggattttgaggaggtgtcaggatcagaatcgtttatggattataggagtgatggggagtacatgaggtgaagggagaactaacatgggcacagccaccggctcaggatcctatcttctagaattcctctccagagctactctcaagttatatccaggggacaggcccctttggctccaacccacacgcctgaactttaaggatcattggactatcttctctgtggccagcgcagctctcttctgtgttcacagaatggccactgataggcatgcctcttttcccacccactggaaggctcacaggcaaggtgagagaggacacagaaggtgccaacactgtcgctacagtaaggacctgaagtgactttgagaaattcaccctcacaaaccttccttcaggagcaggcattggtagtgcagaggcacagattccgtcctttaccagctgcagaatcttgggcaagttacatagcctctgtgagcctcatcggtaaacagtgggggttatgaaacccacctcacagggttgttgtgaggatccaatgagttgatttaggtaagcacctagcacatgccgtggcaccaagtaagcactcaataaatcactcaactcctttc

SEQ ID NO: 290660 - DNA, 1408 bp, Homo sapiens
gaaagaggtttttaaattctccatgaagtgtactatgttccatcattccttcccaaagccaccggaagcattccttctaggaaaggtggagtcggtagtgagaagccggaggtgcccctacagacatacaaggagattgttcactgctgcgaggagcaggtcttaactctggccactgaacagacctatgctgtggagggtgagacacccatcaaccgcctgtccctgctgctctctggccgggttcgtgtgagccaggatgggcagtttctgcactacatctttccataccagttcatggactctcctgagtgggaatcactacagccttctgaggagggggtgttccaggtcactctgactgctgagacctcatgtagctacatttcctggccccggaaaagtctccatcttcttctgaccaaagagcgatacatctcctgcctcttctcggctctgctgggatatgacatctcggagaagctctacactctcaatgacaagctctttgctaagtttgggctgcgctttgacatccgccttcccagcctctaccatgtcctgggtcccactgctgcagatgctggaccagagtccgagaagggtgatgaggaagtctgtgagccagctgtgtcccctcctcaggccacacccacctctctccagcaaacacccccttgttctacccctccagctaccaccaactttcctgcacctcctacccgggccaggttgtccaggccagacagtggcatactggggtgaggactccaccagtctggtgctggaggattttgaggaggtgtcaggatcagaatcgtttatggattataggagtgatggggagtacatgaggtgaagggagaactaacatgggcacagccaccggctcaggatcctatcttctagaattcctctccagagctactctcaagttatatccaggggacaggcccctttggctccaacccacacgcctgaactttaaggatcattggactatcttctctgtggccagcgcagctctcttctgtgttcacagaatggccactgataggcatgcctcttttcccacccactggaaggctcacaggcaaggtgagagaggacacagaaggtgccaacactgtcgctacagtaaggacctgaagtgactttgagaaattcaccctcacaaaccttccttcaggagcaggcattggtagtgcagaggcacagattccgtcctttaccagctgcagaatcttgggcaagttacatagcctctgtgagcctcatcggtaaacagtgggggttatgaaacccacctcacagggttgttgtgaggatccaatgagttgatttaggtaagcacctagcacatgccgtggcaccaagtaagcactcaataaatcactcaactcctttc

SEQ ID NO: 290661 - DNA, 1705 bp, Homo sapiens
tgcggacgaatcggcgtttgccgaggctggcatagatttggctgtctccgctcatagctgcttttggcgcgaaagatgccgggtctggttgactcaaaccctgccccgcctgagtctcaggagaagaagccgctgaagccctgctgcgcttgcccggagaccaagaaggcgcgcgatgcgtgtatcatcgagaaaggagaagaacactgtggacatctaattgaggcccacaaggaatgcatgagagccctaggatttaaaatatgaaatggtgagtataggtgcttggagaggataaggaaatcaccctgatccaatagctggtaacctgcgaggcatatcatatctcatgactatggtaacttcaagcattacatcgtcacgcaactattcaagcctggatgaaaggtgcccctacagacatacaaggagattgttcactgctgcgaggagcaggtcttaactctggccactgaacagacctatgctgtggagggtgagacacccatcaaccgcctgtccctgctgctctctggccgggttcgtgtgagccaggatgggcagtttctgcactacatctttccataccagttcatggactctcctgagtgggaatcactacagccttctgaggagggggtgttccaggtcactctgactgctgagacctcatgtagctacatttcctggccccggaaaagtctccatcttcttctgaccaaagagcgatacatctcctgcctcttctcggctctgctgggatatgacatctcggagaagctctacactctcaatgacaagctctttgctaagtttgggctgcgctttgacatccgccttcccagcctctaccatgtcctgggtcccactgctgcagatgctggaccagagtccgagaagggtgatgaggaagtctgtgagccagctgtgtcccctcctcaggccacacccacctctctccagcaaacacccccttgttctacccctccagctaccaccaactttcctgcacctcctacccgggccaggttgtccaggccagacagtggcatactggggtgaggactccaccagtctggtgctggaggattttgaggaggtgtcaggatcagaatcgtttatggattataggagtgatggggagtacatgaggtgaagggagaactaacatgggcacagccaccggctcaggatcctatcttctagaattcctctccagagctactctcaagttatatccaggggacaggcccctttggctccaacccacacgcctgaactttaaggatcattggactatcttctctgtggccagcgcagctctcttctgtgttcacagaatggccactgataggcatgcctcttttcccacccactggaaggctcacaggcaaggtgagagaggacacagaaggtgccaacactgtcgctacagtaaggacctgaagtgactttgagaaattcaccctcacaaaccttccttcaggagcaggcattggtagtgcagaggcacagattccgtcctttaccagctgcagaatcttgggcaagttacatagcctctgtgagcctcatcggtaaacagtgggggttatgaaacccacctcacagggttgttgtgaggatccaatgagttgatttaggtaagcacctagcacatgccgtggcaccaagtaagcactcaataaatcactcaactcctttc

SEQ ID NO: 290662 - DNA, 1755 bp, Homo sapiens
gaaagaggtttttaaattctccatgaagtgtactatgttccatcattccttcccaaagccaccggaagcattccttctaggaaaggtggagtcggtagtgagaagccggaggtgagaagacccctgagcggatggattcattcattttctgaatttcctatgtgaggacagtattagagcccagtgaggctttgagaggccccaaagatgagcgccaacagcagcagagtgggccagcttctcttgcagggttcagcgtgcattaggtggaagcaggatgtggaaggggctgtctaccacctagccaactgcctcttactcctgggcttcatggggggcagtggggtgtatggatgcttctatctttttggcttcctgagtgcaggttacctgtgctgcgtgctgtggggctggttcagtgcctgtggcctggacattgttctttggagcttcctgctggctgtggtctgcctgctccagctggcacacctggtataccgcctgcgtgaggacaccctccctgaggagtttgacctcctctacaagacgctgtgcctgcccttgcaggtgcccctacagacatacaaggagattgttcactgctgcgaggagcaggtcttaactctggccactgaacagacctatgctgtggagggtgagacacccatcaaccgcctgtccctgctgctctctggccggtcactctgactgctgagacctcatgtagctacatttcctggccccggaaaagtctccatcttcttctgaccaaagagcgatacatctcctgcctcttctcggctctgctgggatatgacatctcggagaagctctacactctcaatgacaagctctttgctaagtttgggctgcgctttgacatccgccttcccagcctctaccatgtcctgggtcccactgctgcagatgctggaccagagtccgagaagggtgatgaggaagtctgtgagccagctgtgtcccctcctcaggccacacccacctctctccagcaaacacccccttgttctacccctccagctaccaccaactttcctgcacctcctacccgggccaggttgtccaggccagacagtggcatactggggtgaggactccaccagtctggtgctggaggattttgaggaggtgtcaggatcagaatcgtttatggattataggagtgatggggagtacatgaggtgaagggagaactaacatgggcacagccaccggctcaggatcctatcttctagaattcctctccagagctactctcaagttatatccaggggacaggcccctttggctccaacccacacgcctgaactttaaggatcattggactatcttctctgtggccagcgcagctctcttctgtgttcacagaatggccactgataggcatgcctcttttcccacccactggaaggctcacaggcaaggtgagagaggacacagaaggtgccaacactgtcgctacagtaaggacctgaagtgactttgagaaattcaccctcacaaaccttccttcaggagcaggcattggtagtgcagaggcacagattccgtcctttaccagctgcagaatcttgggcaagttacatagcctctgtgagcctcatcggtaaacagtgggggttatgaaacccacctcacagggttgttgtgaggatccaatgagttgatttaggtaagcacctagcacatgccgtggcaccaagtaagcactcaataaatcactcaactcctttc

SEQ ID NO: 290663 - DNA, 1654 bp, Homo sapiens
gaaagaggtttttaaattctccatgaagtgtactatgttccatcattccttcccaaagccaccggaagcattccttctaggaaaggtggagtcggtagtgagaagccggaggtgagaagacccctgagcggatggattcattcattttctgaatttcctatgtgaggacagtattagagcccagtgaggctttgagaggccccaaagatgagcgccaacagcagcagagtgggccagcttctcttgcagggttcagcgtgcattaggtggaagcaggatgtggaaggggctgtctaccacctagccaactgcctcttactcctgggcttcatggggggcagtggggtgtatggatgcttctatctttttggcttcctgagtgcaggttacctgtgctgcgtgctgtggggctggttcagtgcctgtggcctggacattgttctttggagcttcctgctggctgtggtctgcctgctccagctggcacacctggtataccgcctgcgtgaggacaccctccctgaggagtttgacctcctctacaagacgctgtgcctgcccttgcaggtgcccctacagacatacaaggagattgttcactgctgcgaggagcaggtcttaactctggccactgaacagacctatgctgtggagggtgagacacccatcaaccgcctgtccctgctgctctctggccggtcactctgactgctgagacctcatgtagctacatttcctggccccggaaaagtctccatcttcttctgaccaaagagcgatacatctcctgcctctctctaccatgtcctgggtcccactgctgcagatgctggaccagagtccgagaagggtgatgaggaagtctgtgagccagctgtgtcccctcctcaggccacacccacctctctccagcaaacacccccttgttctacccctccagctaccaccaactttcctgcacctcctacccgggccaggttgtccaggccagacagtggcatactggggtgaggactccaccagtctggtgctggaggattttgaggaggtgtcaggatcagaatcgtttatggattataggagtgatggggagtacatgaggtgaagggagaactaacatgggcacagccaccggctcaggatcctatcttctagaattcctctccagagctactctcaagttatatccaggggacaggcccctttggctccaacccacacgcctgaactttaaggatcattggactatcttctctgtggccagcgcagctctcttctgtgttcacagaatggccactgataggcatgcctcttttcccacccactggaaggctcacaggcaaggtgagagaggacacagaaggtgccaacactgtcgctacagtaaggacctgaagtgactttgagaaattcaccctcacaaaccttccttcaggagcaggcattggtagtgcagaggcacagattccgtcctttaccagctgcagaatcttgggcaagttacatagcctctgtgagcctcatcggtaaacagtgggggttatgaaacccacctcacagggttgttgtgaggatccaatgagttgatttaggtaagcacctagcacatgccgtggcaccaagtaagcactcaataaatcactcaactcctttc

SEQ ID NO: 290664 - DNA, 1299 bp, Homo sapiens
gaaagaggtttttaaattctccatgaagtgtactatgttccatcattccttcccaaagccaccggaagcattccttctaggaaaggtggagtcggtagtgagaagccggaggtgcccctacagacatacaaggagattgttcactgctgcgaggagcaggtcttaactctggccactgaacagacctatgctgtggagggtgagacacccatcaaccgcctgtccctgctgctctctggccggtcactctgactgctgagacctcatgtagctacatttcctggccccggaaaagtctccatcttcttctgaccaaagagcgatacatctcctgcctcttctcggctctgctgggatatgacatctcggagaagctctacactctcaatgacaagctctttgctaagtttgggctgcgctttgacatccgccttcccagcctctaccatgtcctgggtcccactgctgcagatgctggaccagagtccgagaagggtgatgaggaagtctgtgagccagctgtgtcccctcctcaggccacacccacctctctccagcaaacacccccttgttctacccctccagctaccaccaactttcctgcacctcctacccgggccaggttgtccaggccagacagtggcatactggggtgaggactccaccagtctggtgctggaggattttgaggaggtgtcaggatcagaatcgtttatggattataggagtgatggggagtacatgaggtgaagggagaactaacatgggcacagccaccggctcaggatcctatcttctagaattcctctccagagctactctcaagttatatccaggggacaggcccctttggctccaacccacacgcctgaactttaaggatcattggactatcttctctgtggccagcgcagctctcttctgtgttcacagaatggccactgataggcatgcctcttttcccacccactggaaggctcacaggcaaggtgagagaggacacagaaggtgccaacactgtcgctacagtaaggacctgaagtgactttgagaaattcaccctcacaaaccttccttcaggagcaggcattggtagtgcagaggcacagattccgtcctttaccagctgcagaatcttgggcaagttacatagcctctgtgagcctcatcggtaaacagtgggggttatgaaacccacctcacagggttgttgtgaggatccaatgagttgatttaggtaagcacctagcacatgccgtggcaccaagtaagcactcaataaatcactcaactcctttc

SEQ ID NO: 290665 - DNA, 1333 bp, Homo sapiens
catgtcctgggtcccactgctgcagatgctggaccagagtcgagaagggtgatgaggaagtctgtgagccagctgtgtcccctcctcaggccacacccacctctctccagcaaacacccccttgttctacccctccagctaccaccaactttcctgctctctggccgggttcgtgtgagccaggatgggcagtttctgcactacatctttccataccagttcatggactctcctgagtgggaatcactacagccttctgaggagggggtgttccaggtcactctgactgctgagacctcatgtagctacatttcctggccccggaaaagtctccatcttcttctgaccaaagagcgatacatctcctgcctcttctcggctctgctgggatatgacatctcggagaagctctacactctcaatgacaagctctttgctaagtttgggctgcgctttgacatccgccttcccagcctctaccatgtcctgggtcccactgctgcagatgctggaccagagtccgagaagggtgatgaggaagtctgtgagccagctgtgtcccctcctcaggccacacccacctctctccagcaaacacccccttgttctacccctccagctaccaccaactttcctgcacctcctacccgggccaggttgtccaggccagacagtggcatactggggtgaggactccaccagtctggtgctggaggattttgaggaggtgtcaggatcagaatcgtttatggattataggagtgatggggagtacatgaggtgaagggagaactaacatgggcacagccaccggctcaggatcctatcttctagaattcctctccagagctactctcaagttatatccaggggacaggcccctttggctccaacccacacgcctgaactttaaggatcattggactatcttctctgtggccagcgcagctctcttctgtgttcacagaatggccactgataggcatgcctcttttcccacccactggaaggctcacaggcaaggtgagagaggacacagaaggtgccaacactgtcgctacagtaaggacctgaagtgactttgagaaattcaccctcacaaaccttccttcaggagcaggcattggtagtgcagaggcacagattccgtcctttaccagctgcagaatcttgggcaagttacatagcctctgtgagcctcatcggtaaacagtgggggttatgaaacccacctcacagggttgttgtgaggatccaatgagttgatttaggtaagcacctagcacatgccgtggcaccaagtaagcactcaataaatcactcaactcctttc

SEQ ID NO: 290666 - DNA, 1199 bp, Homo sapiens
atgtgtccagttaaaatctagcaccattaaggaagagaagaaagcagatactggagaacagactgccacactggatttcccagggttcgtgtgagccaggatgggcagtttctgcactacatctttccataccagttcatggactctcctgagtgggaatcactacagccttctgaggagggggtgttccaggtcactctgactgctgagacctcatgtagctacatttcctggccccgtctcggctctgctgggatatgacatctcggagaagctctacactctcaatgacaagctctttgctaagtttgggctgcgctttgacatccgccttcccagcctctaccatgtcctgggtcccactgctgcagatgctggaccagagtccgagaagggtgatgaggaagtctgtgagccagctgtgtcccctcctcaggccacacccacctctctccagcaaacacccccttgttctacccctccagctaccaccaactttcctgcacctcctacccgggccaggttgtccaggccagacagtggcatactggggtgaggactccaccagtctggtgctggaggattttgaggaggtgtcaggatcagaatcgtttatggattataggagtgatggggagtacatgaggtgaagggagaactaacatgggcacagccaccggctcaggatcctatcttctagaattcctctccagagctactctcaagttatatccaggggacaggcccctttggctccaacccacacgcctgaactttaaggatcattggactatcttctctgtggccagcgcagctctcttctgtgttcacagaatggccactgataggcatgcctcttttcccacccactggaaggctcacaggcaaggtgagagaggacacagaaggtgccaacactgtcgctacagtaaggacctgaagtgactttgagaaattcaccctcacaaaccttccttcaggagcaggcattggtagtgcagaggcacagattccgtcctttaccagctgcagaatcttgggcaagttacatagcctctgtgagcctcatcggtaaacagtgggggttatgaaacccacctcacagggttgttgtgaggatccaatgagttgatttaggtaagcacctagcacatgccgtggcaccaagtaagcactcaataaatcactcaactcctttc

SEQ ID NO: 290667 - DNA, 664 bp, Homo sapiens
ttcggatccgaaacgaattctggcaccgaggtcccctcctcaggccacacccacctctctccagcaaacacccccttgttctacccctccagctaccaccaactttcctgcacctcctacccgggccaggttgtccaggccagacagtggcatactggcttctagaattcctctccagagctactctcaagttatatccaggggacaggcccctttggctccaacccacacgcctgaactttaaggatcattggactatcttctctgtggccagcgcagctctcttctgtgttcacagaatggccactgataggcatgcctcttttcccacccactggaaggctcacaggcaaggtgagagaggacacagaaggtgccaacactgtcgctacagtaaggacctgaagtgactttgagaaattcaccctcacaaaccttccttcaggagcaggcattggtagtgcagaggcacagattccgtcctttaccagctgcagaatcttgggcaagttacatagcctctgtgagcctcatcggtaaacagtgggggttatgaaacccacctcacagggttgttgtgaggatccaatgagttgatttaggtaagcacctagcacatgccgtggcaccaagtaagcactcaataaatcactcaactcctttc

SEQ ID NO: 290668 - DNA, 754 bp, Homo sapiens
aaagttgatctcttggtctctacaataggagaggattgggctagataccttcaaagctgacttgccctaatattctagtatgaaatgattcgaaggtacacctgcccctatcatgtcaggcagtgagtacagttaaaacattgggaattggtaaaggaaagaaaaaaactgaaaagaaccctttgaagttagacaaactgtccagagacatagtgctaaaatcctccctctttttctttccacagcttcttctagaattcctctccagagctactctcaagttatatccaggggacaggcccctttggctccaacccacacgcctgaactttaaggatcattggactatcttctctgtggccagcgcagctctcttctgtgttcacagaatggccactgataggcatgcctcttttcccacccactggaaggctcacaggcaaggtgagagaggacacagaaggtgccaacactgtcgctacagtaaggacctgaagtgactttgagaaattcaccctcacaaaccttccttcaggagcaggcattggtagtgcagaggcacagattccgtcctttaccagctgcagaatcttgggcaagttacatagcctctgtgagcctcatcggtaaacagtgggggttatgaaacccacctcacagggttgttgtgaggatccaatgagttgatttaggtaagcacctagcacatgccgtggcaccaagtaagcactcaataaatcactcaactcctttc

SEQ ID NO: 290669 - DNA, 1583 bp, Homo sapiens
tgcggacgaatcggcgtttgccgaggctggcatagatttggctgtctccgctcatagctgcttttggcgcgaaagatgccgggtctggttgactcaaaccctgccccgcctgagtctcaggagaagaagccgctgaagccctgctgcgcttgcccggagaccaagaaggcgcgcgatgcgtgtatcatcgagaaaggagaagaacactgtggacatctaattgaggcccacaaggaatgcatgagagccctaggatttaaaatatgaaatggtgagtataggtgcttggagaggataaggaaatcaccctgatccaatagctggtaacctgcgaggcatatcatatctcatgactatggtaacttcaagcattacatcgtcacgcaactattcaagcctggatgaaaggtcactctgactgctgagacctcatgtagctacatttcctggccccggaaaagtctccatcttcttctgaccaaagagcgatacatctcctgcctcttctcggctctgctgggatatgacatctcggagaagctctacactctcaatgacaagctctttgctaagtttgggctgcgctttgacatccgccttcccagcctctaccatgtcctgggtcccactgctgcagatgctggaccagagtccgagaagggtgatgaggaagtctgtgagccagctgtgtcccctcctcaggccacacccacctctctccagcaaacacccccttgttctacccctccagctaccaccaactttcctgcacctcctacccgggccaggttgtccaggccagacagtggcatactggggtgaggactccaccagtctggtgctggaggattttgaggaggtgtcaggatcagaatcgtttatggattataggagtgatggggagtacatgaggtgaagggagaactaacatgggcacagccaccggctcaggatcctatcttctagaattcctctccagagctactctcaagttatatccaggggacaggcccctttggctccaacccacacgcctgaactttaaggatcattggactatcttctctgtggccagcgcagctctcttctgtgttcacagaatggccactgataggcatgcctcttttcccacccactggaaggctcacaggcaaggtgagagaggacacagaaggtgccaacactgtcgctacagtaaggacctgaagtgactttgagaaattcaccctcacaaaccttccttcaggagcaggcattggtagtgcagaggcacagattccgtcctttaccagctgcagaatcttgggcaagttacatagcctctgtgagcctcatcggtaaacagtgggggttatgaaacccacctcacagggttgttgtgaggatccaatgagttgatttaggtaagcacctagcacatgccgtggcaccaagtaagcactcaataaatcactcaactcctttcaaaaaagagagatcatatacccgatccatgcgtgtgaacgacgcgccaagtcagtaggtgaaatcgacccggaattcccagcagtacctgaggggatcacattccctatcagggtcgt

SEQ ID NO: 290670 - DNA, 1441 bp, Homo sapiens
tgcggacgaatcggcgtttgccgaggctggcatagatttggctgtctccgctcatagctgcttttggcgcgaaagatgccgggtctggttgactcaaaccctgccccgcctgagtctcaggagaagaagccgctgaagccctgctgcgcttgcccggagaccaagaaggcgcgcgatgcgtgtatcatcgagaaaggagaagaacactgtggacatctaattgaggcccacaaggaatgcatgagagccctaggatttaaaatatgaaatggtgagtataggtgcttggagaggataaggaaatcaccctgatccaatagctggtaacctgcgaggcatatcatatctcatgactatggtaacttcaagcattacatcgtcacgcaactattcaagcctggatgaaaggtcactctgactgctgagacctcatgtagctacatttcctggccccggaaaagtctccatcttcttctgaccaaagagcgatacatctcctgcctcttctcggctctgctgggatatgacatctcggagaagctctacactctcaatgacaagctctttgctaagtttgggctgcgctttgacatccgccttcccagcctctaccatgtcctgggtcccactgctgcagatgctggaccagagtccgagaagggtgatgaggaagtctgtgagccagctgtgtcccctcctcaggccacacccacctctctccagcaaacacccccttgttctacccctccagctaccaccaactttcctgcacctcctacccgggccaggttgtccaggccagacagtggcatactggcttctagaattcctctccagagctactctcaagttatatccaggggacaggcccctttggctccaacccacacgcctgaactttaaggatcattggactatcttctctgtggccagcgcagctctcttctgtgttcacagaatggccactgataggcatgcctcttttcccacccactggaaggctcacaggcaaggtgagagaggacacagaaggtgccaacactgtcgctacagtaaggacctgaagtgactttgagaaattcaccctcacaaaccttccttcaggagcaggcattggtagtgcagaggcacagattccgtcctttaccagctgcagaatcttgggcaagttacatagcctctgtgagcctcatcggtaaacagtgggggttatgaaacccacctcacagggttgttgtgaggatccaatgagttgatttaggtaagcacctagcacatgccgtggcaccaagtaagcactcaataaatcactcaactcctttcaaaaaagagagatcatatacccgatccatgcgtgtgaacgacgcgccaagtcagtaggtgaaatcgacccggaattcccagcagtacctgaggggatcacattccctatcagggtcgt

SEQ ID NO: 290671 - DNA, 1813 bp, Homo sapiens
  misc_feature (1676)..(1676): n is a, c, g, or t
tgcggacgaatcggcgtttgccgaggctggcatagatttggctgtctccgctcatagctgcttttggcgcgaaagatgccgggtctggttgactcaaaccctgccccgcctgagtctcaggagaagaagccgctgaagccctgctgcgcttgcccggagaccaagaaggcgcgcgatgcgtgtatcatcgagaaaggagaagaacactgtggacatctaattgaggcccacaaggaatgcatgagagccctaggatttaaaatatgaaatggtgagtataggtgcttggagaggataaggaaatcaccctgatccaatagctggtaacctgcgaggcatatcatatctcatgactatggtaacttcaagcattacatcgtcacgcaactattcaagcctggatgaaaggtcactctgactgctgagacctcatgtagctacatttcctggccccggaaaagtctccatcttcttctgaccaaagagcgatacatctcctgcctcttctcggctctgctgggatatgacatctcggagaagctctacactctcaatgacaagctctttgctaagtttgggctgcgctttgacatccgccttcccagcctctaccatgtcctgggtcccactgctgcagatgctggaccagagtccgagaagggtgatgaggaagtctgtgagccagctgtgtcccctcctcaggccacacccacctctctccagcaaacacccccttgttctacccctccagctaccaccaactttcctgcacctcctacccgggccaggttgtccaggccagacagtggcatactggggtgaggactccaccagtctggtgctggaggattttgaggaggtgtcaggatcagaatcgtttatggattataggagtgatggggagtacatgaggtgaagggagaactaacatgggcacagccaccggctcaggatcctatcttctagaattcctctccagagctactctcaagttatatccaggggacaggcccctttggctccaacccacacgcctgaactttaaggatcattggactatcttctctgtggccagcgcagctctcttctgtgttcacagaatggccactgataggcatgcctcttttcccacccactggaaggctcacaggcaaggtgagagaggacacagaaggtgccaacactgtcgctacagtaaggacctgaagtgactttgagaaattcaccctcacaaaccttccttcaggagcaggcattggtagtgcagaggcacagattccgtcctttaccagctgcagaatcttgggcaagttacatagcctctgtgagcctcatcggtaaacagtgggggttatgaaacccacctcacagggttgttgtgaggatccaatgagttgatttaggtaagcacctagcacatgccgtggcaccaagtaagcactcaataaatcactcaactcctttcaaaaacaaaaaatcggcctgcgatggccctcaacgatggaagctcttgcggccgctttccctttaatggaggggcttaattcatcgacccttcgctcacttgcactccctcgcacttccggtcgtatcagtgtggcggaaaagacgttttcaagcttcacttcaataggcaggtaataacgtgtcttttcaactaaattctcggggtgttnacctaatatgataaaaacatcgttagtccataaagggcccagtaaataaggcctgagaacccggaataatgcgcctgtgtgagattggaatttatattattatgcattcgctccccttgacgagattcacatataat

SEQ ID NO: 290672 - DNA, 1237 bp, Homo sapiens
tgcggacgaatcggcgtttgccgaggctggcatagatttggctgtctccgctcatagctgcttttggcgcgaaagatgccgggtctggttgactcaaaccctgccccgcctgagtctcaggagaagaagccgctgaagccctgctgcgcttgcccggagaccaagaaggcgcgcgatgcgtgtatcatcgagaaaggagaagaacactgtggacatctaattgaggcccacaaggaatgcatgagagccctaggatttaaaatatgaaatggtgagtataggtgcttggagaggataaggaaatcaccctgatccaatagctggtaacctgcgaggcatatcatatctcatgactatggtaacttcaagcattacatcgtcacgcaactattcaagcctggatgaaaggtcactctgactgctgagacctcatgtagctacatttcctggccccggaaaagtctccatcttcttctgaccaaagagcgatacatctcctgcctcttctcggctctgctgggatatgacatctcggagaagctctacactctcaatgacaagctctttgctaagtttgggctgcgctttgacatccgccttcccagcctctaccatgtcctgggtcccactgctgcagatgctggaccagagtccgagaagggtgatgaggaagtctgtgagccagctgtgtcccctcctcaggccacacccacctctctccagcaaacacccccttgttctacccctccagctaccaccaactttcctgcacctcctacccgggccaggttgtccaggccagacagtggcatactggcttctagaattcctctccagagctactctcaagttatatccaggggacaggcccctttggctccaacccacacgcctcttttcccacccactggaaggctcacaggcaaggtgagagaggacacagaaggtgccaacactgtcgctacagtaaggacctgaagtgactttgagaaattcaccctcacaaaccttccttcaggagcaggcattggtagtgcagaggcacagattccgtcctttaccagctgcagaatcttgggcaagttacatagcctctgtgagcctcatcggtaaacagtgggggttatgaaacccacctcacagggttgttgtgaggatccaatgagttgatttaggtaagcacctagcacatgccgtggcaccaagtaagcactcaataaatcactcaactcctttc

SEQ ID NO: 290673 - DNA, 1255 bp, Homo sapiens
tgcggacgaatcggcgtttgccgaggctggcatagatttggctgtctccgctcatagctgcttttggcgcgaaagatgccgggtctggttgactcaaaccctgccccgcctgagtctcaggagaagaagccgctgaagccctgctgcgcttgcccggagaccaagaaggcgcgcgatgcgtgtatcatcgagaaaggagaagaacactgtggacatctaattgaggcccacaaggaatgcatgagagccctaggatttaaaatatgaaatggtgagtataggtgcttggagaggataaggaaatcaccctgatccaatagctggtaacctgcgaggcatatcatatctcatgactatggtaacttcaagcattacatcgtcacgcaactattcaagcctggatgaaaggtcactctgactgctgagacctcatgtagctacatttcctggccccggaaaagtctccatcttcttctgaccaaagagcgatacatctcctgcctcttctcggctctgctgggatatgacatctcggagaagctctacactctcaatgacaagctctttgctaagtttgggctgcgctttgacatccgccttcccagcctctaccatgtcctgggtcccactgctgcagatgctggaccagagtccgagaagggtgatgaggaagtctgtgagccagctgtgtcccctcctcaggccacacccacctctctccagcaaacacccccttgttctacccctccagctaccaccaactttcctgcacctcctacccgggccaggttgtccaggccagacagtggcatactggggtgaggactccaccagtctggtgctggaggattttgaggaggtgtcaggatcagaatcgtttatggattataggagtgatggggagtacatgaggtgaagggagaactaacatgggcacagccaccggctcaggatcctatcttctagaattcctctccagagctactctcaagttatatccaggggacaggcccctttggctccaacccacacgcctgaactttaaggatcattggactatcttctctgtggccagcgcagctctcttctgtgttcacagaatggccactgataggcatgcctcatcggtaaacagtgggggttatgaaacccacctcacagggttgttgtgaggatccaatgagttgatttaggtaagcacctagcacatgccgtggcaccaagtaagcactcaataaatcactcaactcctttc

SEQ ID NO: 290674 - DNA, 344 bp, Homo sapiens
gttttagcccatttacgaatctcccctgcgcccgcagcaaacaactcacttctagaattcctctccagagctactctcaagttatatccaggggacaggcccctttggctccaacccacacgcctgaactttaaggatcattggactatcttctctgtggccagcgcagctctcttctgtgttcacagaatggccactgataggcatgcctcatcggtaaacagtgggggttatgaaacccacctcacagggttgttgtgaggatccaatgagttgatttaggtaagcacctagcacatgccgtggcaccaagtaagcactcaataaatcactcaactcctttc

SEQ ID NO: 290675 - DNA, 2149 bp, Homo sapiens
  misc_feature (1)..(2): n is a, c, g, or t
  misc_feature (4)..(4): n is a, c, g, or t
  misc_feature (6)..(9): n is a, c, g, or t
nncncnnnncttccccttcccctcccagcgcgcccgcgcgccccgcggccctcggcgagcagctcggctccccccagcgctccccgggcccaaagatatggcaatggtagttagcagctggcgagatccgcaggacgacgtggccgggggcaaccccggcggccccaaccccgcagcgcaggcggcccgcggcggcggcggcggcgccggcgagcagcagcagcaggcgggctcgggcgcgccgcacacgccgcagaccccgggccagcccggagcgcccgccacccccggcacggcgggggacaagggccagggcccgcccggttcgggccagagccagcagcacatcgagtgcgtggtgtgcggggacaagtcgagcggcaagcactacggccaattcacctgcgagggctgcaaaagtttcttcaagaggagcgtccgcaggaacttaacttacacatgccgtgccaacaggaactgtcccatcgaccagcaccaccgcaaccagtgccaatactgccgcctcaagaagtgcctcaaagtgggcatgaggcgggaagcggttcagcgaggaagaatgcctccaacccagcccaatccaggccagtacgcactcaccaacggggaccccctcaacggccactgctacctgtccggctacatctcgctgctgctgcgcgccgagccctaccccacgtcgcgctacggcagccagtgcatgcagcccaacaacattatgggcatcgagaacatctgcgagctggccgcgcgcctgctcttcagcgccgtcgagtgggcccgcaacatccccttcttcccggatctgcagatcaccgaccaggtgtccctgctacgcctcacctggagcgagctgttcgtgctcaacgcggcccagtgctctatgccgctgcacgtggcgccgttgctggccgccgccggcctgcatgcctcgcccatgtctgccgaccgcgtcgtggccttcatggaccacatccgcatcttccaggagcaggtggagaagctcaaggcgctacacgtcgactcagccgagtacagctgcctcaaagccatcgtgctgttcacgtcagacgcctgtggcctgtcggatgcggcccacatcgagagcctgcaggagaagtcgcagtgcgcactggaggagtacgtgaggagccagtaccccaaccagcccagccgttttggcaaactgctgctgcgactgccctcgctgcgcaccgtgtcctcctccgtcatcgagcagctcttcttcgtccgtttggtaggtaaaacccccatcgaaactctcatccgcgatatgttactgtctgggagcagcttcaactggccttacatgtccatccagtgctcctagaccttgggcgcttcccacctgccccgtccccctagagactcagaggacccacctgggccaaggactccaaagccgcggggacaccgggaagtgcagcgggccaggcaggctgggtgggagggaggagggccgagacaggagcagcccacccagcagaaatacaatccgagctacaaagcatgggaaaaagagactcttttaggatcagatctgtgagcacgttggcgaggaaaaacaaaacaaacaaaaaaaagaaccttgtgtctgtctggtgaaaaaaagaaaaacaaattggaagagaggaccatgagaattttaataaaacagaaggaaactaatggaccttccaggatttattgtggacggatgtggatatattctgtacaggaacaacacatatggaagtggactgaagcctatgtagaaacacacacacactgaacattgttattcattttgtaaaatactagtctttattttcattttttgtaaaatttaaacatcgtatgcgcataaagaaaaaggaaacaagaattaggggaaaataacattttccaaataattataaaaaattgtcctgtgtctatgtatctatatctgttttgtatttttttctggttccaaaccagatttcctgtgattctatactaataatttttgatataaccctttgcttcttataatgagtgcgatatatgttgtcgaggctgttcttcaagaattaaaattgaagtgaaaatttaaacaaaaataaaagaatttagcaaaacccatgtgtct

SEQ ID NO: 290676 - DNA, 1824 bp, Homo sapiens
taccaaatcagtctatagaaaagtgcatatgctttctgctgcacgtgttcggccactacgtgtcggccacgtggccggacacgtagtggcggaccgtacacgtcccatcgatgaattcgagctcgaatcaggtacgtgtccggccgtggccggacacgtatcgaccagcaccaccgcaaccagtgccaatactgccgcctcaagaagtgcctcaaagtgggcatgaggcgggaagcggttcagcgaggaagaatgcctccaacccagcccaatccaggccagtacgcactcaccaacggggaccccctcaacggccactgctacctgtccggctacatctcgctgctgctgcgcgccgagccctaccccacgtcgcgctacggcagccagtgcatgcagcccaacaacattatgggcatcgagaacatctgcgagctggccgcgcgcctgctcttcagcgccgtcgagtgggcccgcaacatccccttcttcccggatctgcagatcaccgaccaggtgtccctgctacgcctcacctggagcgagctgttcgtgctcaacgcggcccagtgctctatgccgctgcacgtggcgccgttgctggccgccgccggcctgcatgcctcgcccatgtctgccgaccgcgtcgtggccttcatggaccacatccgcatcttccaggagcaggtggagaagctcaaggcgctacacgtcgactcagccgagtacagctgcctcaaagccatcgtgctgttcacgtcagacgcctgtggcctgtcggatgcggcccacatcgagagcctgcaggagaagtcgcagtgcgcactggaggagtacgtgaggagccagtaccccaaccagcccagccgttttggcaaactgctgctgcgactgccctcgctgcgcaccgtgtcctcctccgtcatcgagcagctcttcttcgtccgtttggtaggtaaaacccccatcgaaactctcatccgcgatatgttactgtctgggagcagcttcaactggccttacatgtccatccagtgctcctagaccttgggcgcttcccacctgccccgtccccctagagactcagaggacccacctgggccaaggactccaaagccgcggggacaccgggaagtgcagcgggccaggcaggctgggtgggagggaggagggccgagacaggagcagcccacccagcagaaatacaatccgagctacaaagcatgggaaaaagagactcttttaggatcagatctgtgagcacgttggcgaggaaaaacaaaacaaacaaaaaaaagaaccttgtgtctgtctggtgaaaaaaagaaaaacaaattggaagagaggaccatgagaattttaataaaacagaaggaaactaatggaccttccaggatttattgtggacggatgtggatatattctgtacaggaacaacacatatggaagtggactgaagcctatgtagaaacacacacacactgaacattgttattcattttgtaaaatactagtctttattttcattttttgtaaaatttaaacatcgtatgcgcataaagaaaaaggaaacaagaattaggggaaaataacattttccaaataattataaaaaattgtcctgtgtctatgtatctatatctgttttgtatttttttctggttccaaaccagatttcctgtgattctatactaataatttttgatataaccctttgcttcttataatgagtgcgatatatgttgtcgaggctgttcttcaagaattaaaattgaagtgaaaatttaaacaaaaataaaagaatttagcaaaacccatgtgtct

SEQ ID NO: 290677 - DNA, 1947 bp, Homo sapiens
  misc_feature (1)..(2): n is a, c, g, or t
  misc_feature (4)..(4): n is a, c, g, or t
  misc_feature (6)..(9): n is a, c, g, or t
  misc_feature (1931)..(1931): n is a, c, g, or t
nncncnnnncttccccttcccctcccagcgcgcccgcgcgccccgcggccctcggcgagcagctcggctccccccagcgctccccgggcccaaagatatggcaatggtagttagcagctggcgagatccgcaggacgacgtggccgggggcaaccccggcggccccaaccccgcagcgcaggcggcccgcggcggcggcggcggcgccggcgagcagcagcagcaggcgggctcgggcgcgccgcacacgccgcagaccccgggccagcccggagcgcccgccacccccggcacggcgggggacaagggccagggcccgcccggttcgggccagagccagcagcacatcgagtgcgtggtgtgcggggacaagtcgagcggcaagcactacggccaattcacctgcgagggctgcaaaagtttcttcaagaggagcgtccgcaggaacttaacttacacatgccgtgccaacaggaactgtcccatcgaccagcaccaccgcaaccagtgccaatactgccgcctcaagaagtgcctcaaagtgggcatgaggcgggaagcggttcagcgaggaagaatgcctccaacccagcccaatccaggccagtacgcactcaccaacggggaccccctcaacggccactgctacctgtccggctacatctcgctgctgctgcgcgccgagccctaccccacgtcgcgctacggcagccagtgcatgcagcccaacaacattatgggcatcgagaacatctgcgagctggccgcgcgcctgctcttcagcgccgtcgagtgggcccgcaacatccccttcttcccggatctgcagatcaccgaccaggtgtccctgctacgcctcacctggagcgagctgttcgtgctcaacgcggcccagtgctctatgccgctgcacgtggcgccgttgctggccgccgccggcctgcatgcctcgcccatgtctgccgaccgcgtcgtggccttcatggaccacatccgcatcttccaggagcaggtggagaagctcaaggcgctacacgtcgactcagccgagtacagctgcctcaaagccatcgtgctgttcacgtcagacgcctgtggcctgtcggatgcggcccacatcgagagcctgcaggagaagtcgcagtgcgcactggaggagtacgtgaggagccagtaccccaaccagcccagccgttttggcaaactgctgctgcgactgccctcgctgcgcaccgtgtcctcctccgtcatcgagcagctcttcttcgtccgtttggtaggtaaaacccccatcgaaactctcatccgcgatatgttactgtctgggagcagcttcaactggccttacatgtccatccagtgctcctagaccttgggcgcttcccacctgccccgtccccctagagactcagaggacccacctgggccaaggactccaaagccgcggggacaccgggaagtgcagcgggccaggcaggctgggtgggagggaggagggccgagacaggagcagcccacccagcagaaatacaatccgagctacaaagcatgggaaaaagagactcttttaggatcagatctgtgagcacgttggcgaggaaaaacaaaacaaacaaaaaaaagaaccttgtgtctgtctggtgaaaaaaagaaaaacaaattggaagagaggaccatgagaattttataaccagagaaactatggcttcggattatgtgacggcggtggctttttcgtcggacaccctttggagtggcgagccttgttaacccccccggctggttcctcggcacctcgcttttccttcgggactactcctgcctgaaaggagcgttgggggcgcctcccgattaagcgcggggtatattggggtttgccccccgcgcgtaaagtgacccttaggagggggcggcaaaaaaagggggcccgncatggtgttgtgtgcg

SEQ ID NO: 290678 - DNA, 1899 bp, Homo sapiens
  misc_feature (1)..(2): n is a, c, g, or t
  misc_feature (4)..(4): n is a, c, g, or t
  misc_feature (6)..(9): n is a, c, g, or t
nncncnnnncttccccttcccctcccagcgcgcccgcgcgccccgcggccctcggcgagcagctcggctccccccagcgctccccgggcccaaagatatggcaatggtagttagcagctggcgagatccgcaggacgacgtggccgggggcaaccccggcggccccaaccccgcagcgcaggcggcccgcggcggcggcggcggcgccggcgagcagcagcagcaggcgggctcgggcgcgccgcacacgccgcagaccccgggccagcccggagcgcccgccacccccggcacggcgggggacaagggccagggcccgcccggttcgggccagagccagcagcacatcgagtgcgtggtgtgcggggacaagtcgagcggcaagcactacggccaattcacctgcgagggctgcaaaagtttcttcaagaggagcgtccgcaggaacttaacttacacatgccgtgccaacaggaactgtcccatcgaccagcaccaccgcaaccagtgccaatactgccgcctcaagaagtgcctcaaagtgggcatgaggcgggaagcggttcagcgaggaagaatgcctccaacccagcccaatccaggccagtacgcactcaccaacggggaccccctcaacggccactgctacctgtccggctacatctcgctgctgctgcgcgccgagccctaccccacgtcgcgctacggcagccagtgcatgcagcccaacaacattatgggcatcgagaacatctgcgagctggccgcgcgcctgctcttcagcgccgtcgagtgggcccgcaacatccccttcttcccggatctgcagatcaccgaccaggtgtccctgctacgcctcacctggagcgagctgttcgtgctcaacgcggcccatgcgcactggaggagtacgtgaggagccagtaccccaaccagcccagccgttttggcaaactgctgctgcgactgccctcgctgcgcaccgtgtcctcctccgtcatcgagcagctcttcttcgtccgtttggtaggtaaaacccccatcgaaactctcatccgcgatatgttactgtctgggagcagcttcaactggccttacatgtccatccagtgctcctagaccttgggcgcttcccacctgccccgtccccctagagactcagaggacccacctgggccaaggactccaaagccgcggggacaccgggaagtgcagcgggccaggcaggctgggtgggagggaggagggccgagacaggagcagcccacccagcagaaatacaatccgagctacaaagcatgggaaaaagagactcttttaggatcagatctgtgagcacgttggcgaggaaaaacaaaacaaacaaaaaaaagaaccttgtgtctgtctggtgaaaaaaagaaaaacaaattggaagagaggaccatgagaattttaataaaacagaaggaaactaatggaccttccaggatttattgtggacggatgtggatatattctgtacaggaacaacacatatggaagtggactgaagcctatgtagaaacacacacacactgaacattgttattcattttgtaaaatactagtctttattttcattttttgtaaaatttaaacatcgtatgcgcataaagaaaaaggaaacaagaattaggggaaaataacattttccaaataattataaaaaattgtcctgtgtctatgtatctatatctgttttgtatttttttctggttccaaaccagatttcctgtgattctatactaataatttttgatataaccctttgcttcttataatgagtgcgatatatgttgtcgaggctgttcttcaagaattaaaattgaagtgaaaatttaaacaaaaataaaagaatttagcaaaacccatgtgtct

SEQ ID NO: 290679 - DNA, 709 bp, Homo sapiens
agtttgttagtgggtttagaatagtagggccaggcaggctgggtgggagggaggagggccgagacaggagcagcccacccagcagaaatacaatccgagctacaaagcatgggaaaaagagactcttttaggatcagatctgtgagcacgttggcgaggaaaaacaaaacaaacaaaaaaaagaaccttgtgtctgtctggtgaaaaaaagaaaaacaaattggaagagaggaccatgagaattttaataaaacagaaggaaactaatggaccttccaggatttattgtggacggatgtggatatattctgtacaggaacaacacatatggaagtggactgaagcctatgtagaaacacacacacactgaacattgttattcattttgtaaaatactagtctttattttcattttttgtaaaatttaaacatcgtatgcgcataaagaaaaaggaaacaagaattaggggaaaataacattttccaaataattataaaaaattgtcctgtgtctatgtatctatatctgttttgtatttttttctggttccaaaccagatttcctgtgattctatactaataatttttgatataaccctttgcttcttataatgagtgcgatatatgttgtcgaggctgttcttcaagaattaaaattgaagtgaaaatttaaacaaaaataaaagaatttagcaaaacccatgtgtct

SEQ ID NO: 290680 - DNA, 774 bp, Homo sapiens
tgatatagtttaataaaaaccctagattgtgaatctagtaatagaaaattaaatattcttatctaccgaaaaaggttgcaagaactgctaactcatgcttccacacttaaaaatgtggctttttcaacttttaaagagcccacccagcagaaatacaatccgagctacaaagcatgggaaaaagagactcttttaggatcagatctgtgagcacgttggcgaggaaaaacaaaacaaacaaaaaaaagaaccttgtgtctgtctggtgaaaaaaagaaaaacaaattggaagagaggaccatgagaattttaataaaacagaaggaaactaatggaccttccaggatttattgtggacggatgtggatatattctgtacaggaacaacacatatggaagtggactgaagcctatgtagaaacacacacacactgaacattgttattcattttgtaaaatactagtctttattttcattttttgtaaaatttaaacatcgtatgcgcataaagaaaaaggaaacaagaattaggggaaaataacattttccaaataattataaaaaattgtcctgtgtctatgtatctatatctgttttgtatttttttctggttccaaaccagatttcctgtgattctatactaataatttttgatataaccctttgcttcttataatgagtgcgatatatgttgtcgaggctgttcttcaagaattaaaattgaagtgaaaatttaaacaaaaataaaagaatttagcaaaacccatgtgtct

SEQ ID NO: 290681 - DNA, 1700 bp, Homo sapiens
  misc_feature (1)..(2): n is a, c, g, or t
  misc_feature (4)..(4): n is a, c, g, or t
  misc_feature (6)..(9): n is a, c, g, or t
nncncnnnncttccccttcccctcccagcgcgcccgcgcgccccgcggccctcggcgagcagctcggctccccccagcgctccccgggcccaaagatatggcaatggtagttagcagctggcgagatccgcaggacgacgtggccgggggcaaccccggcggccccaaccccgcagcgcaggcggcccgcggcggcggcggcggcgccggcgagcagcagcagcaggcgggctcgggcgcgccgcacacgccgcagaccccgggccagcccggagcgcccgccacccccggcacggcgggggacaagggccagggcccgcccggttcgggccagagccagcagcacatcgagtgcgtggtgtgcggggacaagtcgagcggcaagcactacggccaattcacctgcgagggctgcaaaagtttcttcaagaggagcgtccgcaggaacttaacttacacatgccgtgccaacaggaactgtcccatcgaccagcaccaccgcaaccagtgccaatactgccgcctcaagaagtgcctcaaagtgggcatgaggcgggaagcggttcagcgaggaagaatgcctccaacccagcccaatccaggccagtacgcactcaccaacggggaccccctcaacggccactgctacctgtccggctacatctcgctgctgctgcgcgccgagccctaccccacgtcgcgctacggcagccagtgcatgcagcccaacaacattatgggcatcgagaacatctgcgagctggccgcgcgcctgctcttcagcgccgtcgagtgggcccgcaacatccccttcttcccggatctgcagatcaccgaccaggtgtccctgctacgcctcacctggagcgagctgttcgtgctcaacgcggcccagtgctctatgccgctgcacgtggcgccgttgctggccgccgccggcctgcatgcctcgcccatgtctgccgaccgcgtcgtggccttcatggaccacatccgcatcttccaggagcaggtggagaagctcaaggcgctacacgtcgactcagccgagtacagctgcctcaaagccatcgtgctgttcacgtcagacgcctgtggcctgtcggatgcggcccacatcgagagcctgcaggagaagtcgcagtgcgcactggaggagtacgtgaggagccagtaccccaaccagcccagccgttttggcaaactgctgctgcgactgccctcgctgcgcaccgtgtcctcctccgtcatcgagcagctcttcttcgtccgtttggtaggtaaaacccccatcgaaactctcatccgcgatatgttactgtctgggagcagcttcaactggccttacatgtccatccagtgctcctagaccttgggcgcttcccacctgccccgtccccctagagactcagaggacccacctgggccaaggactccaaagccgcggggacaccgggaagtgcagcgggccaggcaggctgggtgggagggaggagggccgagacaggagcagcccacccagcagaaatacaatccgagctacaaagcatgggaaaaagagactctggaacctacttgaaggtaaagtgtaggatgagggggaggagcagaaaaaataactattgggtattaggcttagcacttggtgatgaaataatctgtacaataaatccttgtgacatgggagtgagtaccgagct

SEQ ID NO: 290682 - DNA, 308 bp, Homo sapiens
  misc_feature (24)..(25): n is a, c, g, or t
cccccgggctgcaggaaatcggcnncgaggagagagagagagagagagagagagagagagaattaggggaaaataacattttccaaataattataaaaaattgtcctgtgtctatgtatctatatctgttttgtatttttttctggttccaaaccagatttcctgtgattctatactaataatttttgatataaccctttgcttcttataatgagtgcgatatatgttgtcgaggctgttcttcaagaattaaaattgaagtgaaaatttaaacaaaaataaaagaatttagcaaaacccatgtgtct

SEQ ID NO: 290683 - DNA, 1732 bp, Homo sapiens
agagctgttctagaggatcccaatgcagcggaatcggaacacatgccgtgccaacaggaactgtcccatcgaccagcaccaccgcaaccagtgccaatactgccgcctcaagaagtgcctcaaagtgggcatgaggcgggaagcggttcagcgaggaagaatgcctccaacccagcccaatccaggccagtacgcactcaccaacggggaccccctcaacggccactgctacctgtccggctacatctcgctgctgctgcgcgccgagccctaccccacgtcgcgctacggcagccagtgcatgcagcccaacaacattatgggcatcgagaacatctgcgagctggccgcgcgcctgctcttcagcgccgtcgagtgggcccgcaacatccccttcttcccggatctgcagatcaccgaccaggtgtccctgctacgcctcacctggagcgagctgttcgtgctcaacgcggcccagtgctctatgccgctgcacgtggcgccgttgctggccgccgccggcctgcatgcctcgcccatgtctgccgaccgcgtcgtggccttcatggaccacatccgcatcttccaggagcaggtggagaagctcaaggcgctacacgtcgactcagccgagtacagctgcctcaaagccatcgtgctgttcacgtcagacgcctgtggcctgtcggatgcggcccacatcgagagcctgcaggagaagtcgcagtgcgcactggaggagtacgtgaggagccagtaccccaaccagcccagccgttttggcaaactgctgctgcgactgccctcgctgcgcaccgtgtcctcctccgtcatcgagcagctcttcttcgtccgtttggtaggtaaaacccccatcgaaactctcatccgcgatatgttactgtctgggagcagcttcaactggccttacatgtccatccagtgctcctagaccttgggcgcttcccacctgccccgtccccctagagactcagaggacccacctgggccaaggactccaaagccgcggggacaccgggaagtgcagcgggccaggcaggctgggtgggagggaggagggccgagacaggagcagcccacccagcagaaatacaatccgagctacaaagcatgggaaaaagagactcttttaggatcagatctgtgagcacgttggcgaggaaaaacaaaacaaacaaaaaaaagaaccttgtgtctgtctggtgaaaaaaagaaaaacaaattggaagagaggaccatgagaattttaataaaacagaaggaaactaatggaccttccaggatttattgtggacggatgtggatatattctgtacaggaacaacacatatggaagtggactgaagcctatgtagaaacacacacacactgaacattgttattcattttgtaaaatactagtctttattttcattttttgtaaaatttaaacatcgtatgcgcataaagaaaaaggaaacaagaattaggggaaaataacattttccaaataattataaaaaattgtcctgtgtctatgtatctatatctgttttgtatttttttctggttccaaaccagatttcctgtgattctatactaataatttttgatataaccctttgcttcttataatgagtgcgatatatgttgtcgaggctgttcttcaagaattaaaattgaagtgaaaatttaaacaaaaataaaagaatttagcaaaacccatgtgtct

SEQ ID NO: 290684 - DNA, 1681 bp, Homo sapiens
cactgggcaaaagctggctgcaggttgcagtggcaccgcgcaggacagacattaattatatttcctacttttttcaataatgtttggctactcggttcagcgaggaagaatgcctccaacccagcccaatccaggccagtacgcactcaccaacggggaccccctcaacggccactgctacctgtccggctacatctcgctgctgctgcgcgccgagccctaccccacgtcgcgctacggcagccagtgcatgcagcccaacaacattatgggcatcgagaacatctgcgagctggccgcgcgcctgctcttcagcgccgtcgagtgggcccgcaacatccccttcttcccggatctgcagatcaccgaccaggtgtccctgctacgcctcacctggagcgagctgttcgtgctcaacgcggcccagtgctctatgccgctgcacgtggcgccgttgctggccgccgccggcctgcatgcctcgcccatgtctgccgaccgcgtcgtggccttcatggaccacatccgcatcttccaggagcaggtggagaagctcaaggcgctacacgtcgactcagccgagtacagctgcctcaaagccatcgtgctgttcacgtcagacgcctgtggcctgtcggatgcggcccacatcgagagcctgcaggagaagtcgcagtgcgcactggaggagtacgtgaggagccagtaccccaaccagcccagccgttttggcaaactgctgctgcgactgccctcgctgcgcaccgtgtcctcctccgtcatcgagcagctcttcttcgtccgtttggtaggtaaaacccccatcgaaactctcatccgcgatatgttactgtctgggagcagcttcaactggccttacatgtccatccagtgctcctagaccttgggcgcttcccacctgccccgtccccctagagactcagaggacccacctgggccaaggactccaaagccgcggggacaccgggaagtgcagcgggccaggcaggctgggtgggagggaggagggccgagacaggagcagcccacccagcagaaatacaatccgagctacaaagcatgggaaaaagagactcttttaggatcagatctgtgagcacgttggcgaggaaaaacaaaacaaacaaaaaaaagaaccttgtgtctgtctggtgaaaaaaagaaaaacaaattggaagagaggaccatgagaattttaataaaacagaaggaaactaatggaccttccaggatttattgtggacggatgtggatatattctgtacaggaacaacacatatggaagtggactgaagcctatgtagaaacacacacacactgaacattgttattcattttgtaaaatactagtctttattttcattttttgtaaaatttaaacatcgtatgcgcataaagaaaaaggaaacaagaattaggggaaaataacattttccaaataattataaaaaattgtcctgtgtctatgtatctatatctgttttgtatttttttctggttccaaaccagatttcctgtgattctatactaataatttttgatataaccctttgcttcttataatgagtgcgatatatgttgtcgaggctgttcttcaagaattaaaattgaagtgaaaatttaaacaaaaataaaagaatttagcaaaacccatgtgtct

SEQ ID NO: 290685 - DNA, 1227 bp, Homo sapiens
gggatggagaggtataggagggtgaatttttcttttctcttttacttcttttttattttccattttctccttaaaaaaaattgatggcttattttgcctttgctatttgtcagcctaaccgtgtgctccctttccctgtctctccctcctgtggctgcttgggcagacgcctgtggcctgtcggatgcggcccacatcgagagcctgcaggagaagtcgcagtgcgcactggaggagtacgtgaggagccagtaccccaaccagcccagccgttttggcaaactgctgctgcgactgccctcgctgcgcaccgtgtcctcctccgtcatcgagcagctcttcttcgtccgtttggtaggtaaaacccccatcgaaactctcatccgcgatatgttactgtctgggagcagcttcaactggccttacatgtccatccagtgctcctagaccttgggcgcttcccacctgccccgtccccctagagactcagaggacccacctgggccaaggactccaaagccgcggggacaccgggaagtgcagcgggccaggcaggctgggtgggagggaggagggccgagacaggagcagcccacccagcagaaatacaatccgagctacaaagcatgggaaaaagagactcttttaggatcagatctgtgagcacgttggcgaggaaaaacaaaacaaacaaaaaaaagaaccttgtgtctgtctggtgaaaaaaagaaaaacaaattggaagagaggaccatgagaattttaataaaacagaaggaaactaatggaccttccaggatttattgtggacggatgtggatatattctgtacaggaacaacacatatggaagtggactgaagcctatgtagaaacacacacacactgaacattgttattcattttgtaaaatactagtctttattttcattttttgtaaaatttaaacatcgtatgcgcataaagaaaaaggaaacaagaattaggggaaaataacattttccaaataattataaaaaattgtcctgtgtctatgtatctatatctgttttgtatttttttctggttccaaaccagatttcctgtgattctatactaataatttttgatataaccctttgcttcttataatgagtgcgatatatgttgtcgaggctgttcttcaagaattaaaattgaagtgaaaatttaaacaaaaataaaagaatttagcaaaacccatgtgtct

SEQ ID NO: 290686 - DNA, 616 bp, Homo sapiens
gtggaaacattttatcagcaaaacgctgcttgcttgcaaatgaggaggccgctaggcatttgcctagaaccacaacctttctccggtttcgcctttttttaaccctgattttttttttccattctggaggggtgagtggggtttcatttatctgtgtgttcccccgtggtggcttaggggttggatgacactttcttgaccttgccagggttggggccctggagtcaggcctagctccggcggggctgacgtggccaggggctcaggcagtggctggacacactgagctgtggagctggagggcctcaccccagatctcctagcggtgtggactgtgagagcgagccggagaagatgcgcggggcgcgtgtggctgcgggaagagcttctgcattgtgttgggtacgctgcggcgcggcaatgttcgcaagctccctggatgcacattgcctcttttctctctttctttttgtcagcggttcagcgaggaagaatgcctccaacccagcccaatccaggccagtacgcactcaccaacggggaccccctcaacggccactgctacctgtccggctacatctcgctgctgctgcgcgccgagccctaccccacgtcg

SEQ ID NO: 290687 - DNA, 2751 bp, Homo sapiens
tttttttttgaggcaaggtctagctttgttgcccaggctggggtgcagtagcgcgatcgcagttcactgcaacctccgcctccctgactcgagcgattctcccacctcagcctctggagtgctgcgaccccaggcgccgccacctaattaatagacgcgttgcctccgtttttcaaatgtccctttcaggacgccgtccccttcctggtacgcgaagcgctgggagcgaaagggacttccgggagatctaggaagtcgcttctttttctggtagaaggcggggttctcctcgtacgctgcggagtctctgcggggtgtagaccggaatcctgctgacgggcagagtggatcagggagggagggtcgagacacggtggctgcaggtctgagacaaggctgctccgaggtagtagctctcttgcctggaggtggccattcattcctggagtgctgctgaggagcgagggcccatctggggtctctggaagtcggtgcccaggcctgaaggatagccccccttgcgcttccctgggctgcggccggccttctcagaacgaagggcgtccttccaccccgcggcgcaggtgaccgctgccatggcttttccccatcggccggacgcccctgagctgcctgacttctccatgctgaagaggctggctcgagaccagctcatctatctgctggagcagcttcctggaaaaaaggatttattcattgaggcagatctcatgagccctttggatcgaattgccaatgtctccatcctgaagcaacacgaagtagacaagctatacaaggtggagaacaagccagccctcagctccaatgaacaattgtgcttcttggtcagaccccgcatcaagaatatgcgatacattgccagtcttgtcaatgctgacaaattggctggccgaactcgcaaatacaaagtgatcttcagccctcaaaagttctatgcgtgtgagatggtgcttgaggaagagggaatctatggagatgtgagctgtgatgaatgggccttctctttgctgcctcttgatgtggatctgctgagcatggaactaccagaatttttcagggattactttctggaaggagatcagcgttggatcaacactgtagctcaggccttacaccttctcagcactctctatggaccctttccaaactgctatggaattggcaggtgcgccaagatggcatatgaattgtggaggaacctggaggaggaggaggatggcgaaaccaagggccgaaggccagagattggacatatctttctcttggacagagatgtggactttgtgacagcactttgctcccaagtggtttatgagggcctagtagatgacaccttccgcatcaagtgtgggagtgtcgactttggcccagaagtcacatcctctgacaagagcctgaaggtgctactcaatgccgaggacaaggtgtttaatgagattcggaacgagcacttctccaatgtctttggcttcttgagccagaaggcccggaacttgcaggcccagtatgatcgccggagaggcatggacattaagcagatgaagaatttcgtgtcccaggagctcaagggcctgaaacaggagcaccgcctgctgagtctccatattggggcctgtgaatccatcatgaagaagaaaaccaagcaggatttccaggagctaatcaagactgagcatgcactgctagaggggttcaacatccgggagagcaccagctacattgaggaacacatagaccggcaggtgtcgcctatagaaagcctgcgcctcatgtgccttttgtccatcactgagaatggtttgatccccaaggattaccgatctctgaaaacacagtatctgcagagctatggccctgagcacctgctaaccttctccaatctgcgaagagctgggctcctaacggagcaggcccccggggacaccctcacagccgtggagagtaaagtgagcaagctggtgaccgacaaggctgcaggaaagattactgatgccttcagttctctggccaagaggagcaattttcgtgccatcagcaaaaagctgaatttgatcccacgtgtggacggcgagtatgatctgaaagtgccccgagacatggcttacgtcttcggtggtgcttatgtgcccctgagctgccgaatcattgagcaggtgctagagcggcgaagctggcagggccttgatgaggtggtacggctgctcaactgcagtgactttgcattcacagatatgactaaggaagacaaggcttccagtgagtccctgcgcctcatcttggtggtgttcttgggtggttgtacattctctgagatctcagccctccggttcctgggcagagagaaaggctacaggttcattttcctgacgacagcagtcacaaacagcgctcgccttatggaggccatgagtgaggtgaaagcctgatgtttttcccggccagtgttgacatcttccctgaacacattcctcagtgagatgcaggcatctggcacccagctgctataaccaagtgtccaccaactacctgctaagagccgggagcatggaacgtgttgggatttagagaacattatctgagaaaagagttcacttcctgctcccaggatatttctcttttctgtttatgaagtacaacccatgctgctaagatgcgagcaggaagaggcatcctttgctaaatcctgtttgaatgtcattgtaaataaagcctctgctctcagatgta

SEQ ID NO: 290688 - DNA, 957 bp, Homo sapiens
tgggcaacaatagcaaaactccatctcaagagaaaaaaaaaaaacacgcaaagtgtcctgcacaggaatatttttctcctggcctcagaatacaacttgccatagccttaactctgggctgccacagcagggagcccagttataccagtcatagaaagcagtggtgcccaagagcatggcactcacgtctctgtctataaactggtgctgtgatcccgtggggactgtggaactggagaggctctatgggttgccgttggggcctaagatctgtgctgtctcttctgctgctgcatttgactccttaggctacaggttcattttcctgacgacagcagtcacaaacagcgctcgccttatggaggccatgagtgaggtgaaagcctgatgtttttcccggccagtgttgacatcttccctgaacacattcctcagtgagatgcaggcatctggcacccagctgctataaccaagtgtccaccaactacctgctaagagccgggagcatggaacgtgttgggatttagagaacattatctgagaaaagagttcacttcctgctcccaggatatttctcttttctgtttatgaagtacaacccatgctgctaagatgcgagcaggaagaggcatcctttgctaaatcctgtttgaatgtcattgtaaataaagcctctgctctcagatgtaatacgttggtcgttctggacacgcacttccatctttattagtgaaagcccattggagcttgctacaggggcttcctgtgcttcttggcctggactttgtagtggctccaggcctggtctggttcttccctgtaaaaatcactctaccactctgtacctgagtttcctctaccataaaatgagggagatggctgaggtgaccagcaagcacgtttccagttctaaaatgttgtgattcattacatttttgagaaaatgaaattgttgtt

SEQ ID NO: 290689 - DNA, 689 bp, Homo sapiens
tgggcaacaatagcaaaactccatctcaagagaaaaaaaaaaaacacgcaaagtgtcctgcacaggaatatttttctcctggcctcagaatacaacttgccatagccttaactctgggctgccacagcagggagcccagttataccagtcatagaaagcagtggtgcccaagagcatggcactcacgtctctgtctataaactggtgctgtgatcccgtggggactgtggaactggagaggctctatgggttgccgttggggcctaagatctgtgctgtctcttctgctgctgcatttgactccttaggctacaggttcattttcctgacgacagcagtcacaaacagcgctcgccttatggaggccatgagtgaggtgaaagcctgatgtttttcccggccagtgttgacatcttccctgaacacattcctcagtgagatgcaggcatctggcacccagctgctataaccaagtgtccaccaactacctgctaagagccgggagcatggaacgtgttgggatttagagaacattatctgagaaaagagttcacttcctgctcccaggatatttctcttttctgtttatgaagtacaacccatgctgctaagatgcgagcaggaagaggcatcctttgctaaatcctgtttgaatgtcattgtaaataaagcctctgctctcagatgta

SEQ ID NO: 290690 - DNA, 634 bp, Homo sapiens
caaccatatcctgtgtcacttaagggcagggaaaggagaagccatccctccagcccctttacattattcaataatggcgcatgggaactcattccagagaactggcagttactgaacaaaaactgccatcttccgttatggattctcttttcagggctattgctggttctccctttagttgaaataagaattgttccttgggccatgccactttatctgaccctttaaagggttagggagctgagctgtcacttgcctaatgaagtccctttgtcttacagatcccacgtgtggacggcgagtatgatctgaaagtgccccgagacatggcttacgtcttcggtggtgcttatgtgcccctgagctgccgaatcattgagcaggtgctagagcggcgaagctggcagggccttgatgaggtggtacggctgctcaactgcagtgactttgcattcacagatatgactaaggaagacaaggcttccagtgagtccctgcgcctcatcttggtggtgttcttgggtggttgtacattctctgagatctcagccctccggttcctgggcagagagaaaggtaagagagagcagaaaggtgagaattggcctgcattgtatctgggtaacaaagtgtc

SEQ ID NO: 290691 - DNA, 546 bp, Homo sapiens
agacaaggtttccccatgttggccaggctggttgatctgtacattttagggtgcctctgccggcctctttctcatgcacctgtcttattttcttcactcttaggtttgatccccaaggattaccgatctctgaaaacacagtatctgcaggtaaggcctggagaatgtattcttgagggaacttgatggagggcagttattgggcatttttgaaagaggcaagagaagtggcccctttcctgcctccattaccctcctgtttccattcaggcctccctcttagagctactagggagagtcacctttcagcacgcctctctgccctctacccttgtttcaccccacacactgacggcgcatggccagtgctgagaatttaaacatttcagtgctggccccagtgtgagttctttctcctgggagtctccctcattttagcaccgtgtgaggcattgattcagctttccttcctggtacttctcaagtcttacttcatccaggaagcctttcccatacatccatgggtctctaaagtctcatgctgct

SEQ ID NO: 290692 - DNA, 3019 bp, Homo sapiens
tttttttttgaggcaaggtctagctttgttgcccaggctggggtgcagtagcgcgatcgcagttcactgcaacctccgcctccctgactcgagcgattctcccacctcagcctctggagtgctgcgaccccaggcgccgccacctaattaatagacgcgttgcctccgtttttcaaatgtccctttcaggacgccgtccccttcctggtacgcgaagcgctgggagcgaaagggacttccgggagatctaggaagtcgcttctttttctggtagaaggcggggttctcctcgtacgctgcggagtctctgcggggtgtagaccggaatcctgctgacgggcagagtggatcagggagggagggtcgagacacggtggctgcaggtctgagacaaggctgctccgaggtagtagctctcttgcctggaggtggccattcattcctggagtgctgctgaggagcgagggcccatctggggtctctggaagtcggtgcccaggcctgaaggatagccccccttgcgcttccctgggctgcggccggccttctcagaacgaagggcgtccttccaccccgcggcgcaggtgaccgctgccatggcttttccccatcggccggacgcccctgagctgcctgacttctccatgctgaagaggctggctcgagaccagctcatctatctgctggagcagcttcctggaaaaaaggatttattcattgaggcagatctcatgagccctttggatcgaattgccaatgtctccatcctgaagcaacacgaagtagacaagctatacaaggtggagaacaagccagccctcagctccaatgaacaattgtgcttcttggtcagaccccgcatcaagaatatgcgatacattgccagtcttgtcaatgctgacaaattggctggccgaactcgcaaatacaaagtgatcttcagccctcaaaagttctatgcgtgtgagatggtgcttgaggaagagggaatctatggagatgtgagctgtgatgaatgggccttctctttgctgcctcttgatgtggatctgctgagcatggaactaccagaatttttcagggattactttctggaaggagatcagcgttggatcaacactgtagctcaggccttacaccttctcagcactctctatggaccctttccaaactgctatggaattggcaggtgcgccaagatggcatatgaattgtggaggaacctggaggaggaggaggatggcgaaaccaagggccgaaggccagagattggacatatctttctcttggacagagatgtggactttgtgacagcactttgctcccaagtggtttatgagggcctagtagatgacaccttccgcatcaagtgtgggagtgtcgactttggcccagaagtcacatcctctgacaagagcctgaaggtgctactcaatgccgaggacaaggtgtttaatgagattcggaacgagcacttctccaatgtctttggcttcttgagccagaaggcccggaacttgcaggcccagtatgatcgccggagaggcatggacattaagcagatgaagaatttcgtgtcccaggagctcaagggcctgaaacaggagcaccgcctgctgagtctccatattggggcctgtgaatccatcatgaagaagaaaaccaagcaggatttccaggagctaatcaagactgagcatgcactgctagaggggttcaacatccgggagagcaccagctacattgaggaacacatagaccggcaggtgtcgcctatagaaagcctgcgcctcatgtgccttttgtccatcactgagaatggtttgatccccaaggattaccgatctctgaaaacacagtatctgcagagctatggccctgagcacctgctaaccttctccaatctgcgaagagctgggctcctaacggagcaggcccccggggacaccctcacagccgtggagagtaaagtgagcaagctggtgaccgacaaggctgcaggaaagattactgatgccttcagttctctggccaagaggagcaattttcgtgccatcagcaaaaagctgaatttgatcccacgtgtggacggcgagtatgatctgaaagtgccccgagacatggcttacgtcttcggtggtgcttatgtgcccctgagctgccgaatcattgagcaggtgctagagcggcgaagctggcagggccttgatgaggtggtacggctgctcaactgcagtgactttgcattcacagatatgactaaggaagacaaggcttccagtgagtccctgcgcctcatcttggtggtgttcttgggtggttgtacattctctgagatctcagccctccggttcctgggcagagagaaaggctacaggttcattttcctgacgacagcagtcacaaacagcgctcgccttatggaggccatgagtgaggtgaaagcctgatgtttttcccggccagtgttgacatcttccctgaacacattcctcagtgagatgcaggcatctggcacccagctgctataaccaagtgtccaccaactacctgctaagagccgggagcatggaacgtgttgggatttagagaacattatctgagaaaagagttcacttcctgctcccaggatatttctcttttctgtttatgaagtacaacccatgctgctaagatgcgagcaggaagaggcatcctttgctaaatcctgtttgaatgtcattgtaaataaagcctctgctctcagatgtaatacgttggtcgttctggacacgcacttccatctttattagtgaaagcccattggagcttgctacaggggcttcctgtgcttcttggcctggactttgtagtggctccaggcctggtctggttcttccctgtaaaaatcactctaccactctgtacctgagtttcctctaccataaaatgagggagatggctgaggtgaccagcaagcacgtttccagttctaaaatgttgtgattcattacatttttgagaaaatgaaattgttgtt

SEQ ID NO: 290693 - DNA, 2558 bp, Homo sapiens
tttttttttgaggcaaggtctagctttgttgcccaggctggggtgcagtagcgcgatcgcagttcactgcaacctccgcctccctgactcgagcgattctcccacctcagcctctggagtgctgcgaccccaggcgccgccacctaattaatagacgcgttgcctccgtttttcaaatgtccctttcaggacgccgtccccttcctggtacgcgaagcgctgggagcgaaagggacttccgggagatctaggaagtcgcttctttttctggtagaaggcggggttctcctcgtacgctgcggagtctctgcggggtgtagaccggaatcctgctgacgggcagagtggatcagggagggagggtcgagacacggtggctgcaggtctgagacaaggctgctccgaggtagtagctctcttgcctggaggtggccattcattcctggagtgctgctgaggagcgagggcccatctggggtctctggaagtcggtgcccaggcctgaaggatagccccccttgcgcttccctgggctgcggccggccttctcagaacgaagggcgtccttccaccccgcggcgcaggtgaccgctgccatggcttttccccatcggccggacgcccctgagctgcctgacttctccatgctgaagaggctggctcgagaccagctcatctatctgctggagcagcttcctggaaaaaaggatttattcattgaggcagatctcatgagccctttggatcgaattgccaatgtctccatcctgaagcaacacgaagtagacaagctatacaaggtggagaacaagccagccctcagctccaatgaacaattgtgcttcttggtcagaccccgcatcaagaatatgcgatacattgccagtcttgtcaatgctgacaaattggctggccgaactcgcaaatacaaagtgatcttcagccctcaaaagttctatgcgtgtgagatggtgcttgaggaagagggaatctatggagatgtgagctgtgatgaatgggccttctctttgctgcctcttgatgtggatctgctgagcatggaactaccagaatttttcagggattactttctggaaggagatcagcgttggatcaacactgtagctcaggccttacaccttctcagcactctctatggaccctttccaaactgctatggaattggcaggtgcgccaagatggcatatgaattgtggaggaacctggaggaggaggaggatggcgaaaccaagggccgaaggccagagattggacatatctttctcttggacagagatgtggactttgtgacagcactttgctcccaagtggtttatgagggcctagtagatgacaccttccgcatcaagtgtgggagtgtcgactttggcccagaagtcacatcctctgacaagagcctgaaggtgctactcaatgccgaggacaaggtgtttaatgagattcggaacgagcacttctccaatgtctttggcttcttgagccagaaggcccggaacttgcaggcccagtatgatcgccggagaggcatggacattaagcagatgaagaatttcgtgtcccaggagctcaagggcctgaaacaggagcaccgcctgctgagtctccatattggggcctgtgaatccatcatgaagaagaaaaccaagcaggatttccaggagctaatcaagactgagcatgcactgctagaggggttcaacatccgggagagcaccagctacattgaggaacacatagaccggcaggtgtcgcctatagaaagcctgcgcctcatgtgccttttgtccatcactgagaatggtttgatccccaaggattaccgatctctgaaaacacagtatctgcagagctatggccctgagcacctgctaaccttctccaatctgcgaagagctgggctcctaacggagcaggcccccggggacaccctcacagccgtggagagtaaagtgagcaagctggtgaccgacaaggctgcaggaaagattactgatgccttcagttctctggccaagaggagcaattttcgtgccatcagcaaaaagctgaatttgatcccacgtgtggacggcgagtatgatctgaaagtgccccgagacatggcttacgtcttcggtggtgcttatgtgcccctgagctgccgaatcattgagcaggctacaggttcattttcctgacgacagcagtcacaaacagcgctcgccttatggaggccatgagtgaggtgaaagcctgatgtttttcccggccagtgttgacatcttccctgaacacattcctcagtgagatgcaggcatctggcacccagctgctataaccaagtgtccaccaactacctgctaagagccgggagcatggaacgtgttgggatttagagaacattatctgagaaaagagttcacttcctgctcccaggatatttctcttttctgtttatgaagtacaacccatgctgctaagatgcgagcaggaagaggcatcctttgctaaatcctgtttgaatgtcattgtaaataaagcctctgctctcagatgta

SEQ ID NO: 290694 - DNA, 957 bp, Homo sapiens
caaccatatcctgtgtcacttaagggcagggaaaggagaagccatccctccagcccctttacattattcaataatggcgcatgggaactcattccagagaactggcagttactgaacaaaaactgccatcttccgttatggattctcttttcagggctattgctggttctccctttagttgaaataagaattgttccttgggccatgccactttatctgaccctttaaagggttagggagctgagctgtcacttgcctaatgaagtccctttgtcttacagatcccacgtgtggacggcgagtatgatctgaaagtgccccgagacatggcttacgtcttcggtggtgcttatgtgcccctgagctgccgaatcattgagcaggtgctagagcggcgaagctggcagggccttgatgaggtggtacggctgctcaactgcagtgactttgcattcacagatatgactaaggaagacaaggcttccagtgagtccctgcgcctcatcttggtggtgttcttgggtggttgtacattctctgagatctcagccctccggttcctgggcagagagaaaggctacaggttcattttcctgacgacagcagtcacaaacagcgctcgccttatggaggccatgagtgaggtgaaagcctgatgtttttcccggccagtgttgacatcttccctgaacacattcctcagtgagatgcaggcatctggcacccagctgctataaccaagtgtccaccaactacctgctaagagccgggagcatggaacgtgttgggatttagagaacattatctgagaaaagagttcacttcctgctcccaggatatttctcttttctgtttatgaagtacaacccatgctgctaagatgcgagcaggaagaggcatcctttgctaaatcctgtttgaatgtcattgtaaataaagcctctgctctcagatgta

SEQ ID NO: 290695 - DNA, 2549 bp, Homo sapiens
gaagggtaatggaaacctggtacagcctttagaagttggaagctatggtggtgtatctgtcatgaactgcacacaagggaatgcttaaacaccagctgagtcatatcaggtgccttgtacacacacataaagagtctggtgaattctgacagtgttctgtttgccactagagcaaatttaatagctggggtttcacagcaactgttttagaaaactatatgtgccaaaaatttacattgggcagcagtttatagtgttcttggccaatctgcataaaagccacttgaggaggtttgattaagaaaattgtgtttatctcctgtattacctctgtgtttgatttattctttagtctcaaatttattttctgagtggactgattttctatatgaactgaaatgatgttttaatagaataataggtatttttagaggaaaagtatttttttgtgtaatttgcttacacaactaggacatacttcctatgatactgaatcatcaaattgagtcatttaaagctgaaagaggtgttaggaatgtagtttcacattatttaaatacatgaacagttttctatatattttgtgaaaatcttgatgagacactagaatttctttatggaattgaactttacaagaattttaataaaagaggtggatttcttcagctttctttgtgcttcagtttcatagctgaaaatgctgcttccgtttattaatatggactttgtaaggaaacacaacaacacgttttcttaccttctgtaaattttgtgatagacacatgttatttgtatatatgattgattgtttgcctgttgcaccctaaagttattttcaaaccatgtttattgcaaagagagcctttgggcaagtggaaaatgccctgatgctagaatgaggtagttccataagctagttaggagcttgctacctcttcttggtacctgaaatattctgaaaggatatcggagaggtcctatgcacccctgtctttcaaaacccacctccagcacttcaaagtagtgtctctggagagtttaaaataaaagaatgaatgctattcagtggattccctcattgaggctcccatctttcctgccaggtgcagctttttctggttggaatcatctcttctttacggattgccgcattgtctctttgtgaatgaggcaggctgaactgtagagcatgaaactcattagaagtttataaagtaaagacctgtaaagcatgtgggtggaatgtttccatgctcttgaggtgaatattaaatttaaattctggcctttgggaactctttgcttgtgagctgaagaaggaaagaaggagttgggggtgtatatctaactgtgtttttctatatggaaatatatgagcatcaagtgataacttcaataaggcctcaggattgtatttaaaatacctgttttgtgggacagcatgcctttgttttctttgcctgttggctttggtggctccaaacattttcattttaggctagctttcctgtcacccaggttgtgtgcattttttttttcatttgaactattgtttatcattattaatgatgttatctccaaatcccaaagccaaggaaatagccagtatgcaggacttgcagtagatataagcattggtgttaacataggttaagttttgttagtgttcccagaaatatactgaattgagggataatgtagctttaaagaaattatgtttctttttaacatttggagaagccacctgtcctgggtccctattcttgagaaattcatcttttcatgcaaataacattgatgggggacaagactggatgattgacttctatcagtcagtagacaaggaagtataataattgccaaaggtgagggtaattttgccttacaagtatgtaggtcattctgtggtgggatttcccatcacatctagtaaaaaacaaccttttcatttccctcctttctaatccaagatcatatttttaaaaagtaggtttctgatgtgccatgaaatatttctgtgaatctgtgtttttgaccaaggaaacagctgagatattaaaccatgtggttgttccacggttcatctggctaccgttctgggtcccctctgaccacctcaaaaagaaaatgaaattgggagattaaatcaagcttgacctcctcttttaatgaggaactttcacgttgacttcctatctcaggatattcttcagtttcatactgctgaggagaaaggaacaagctgcagacactgtaactggtctccagatgtgtgtatatgcgtgtaaaacttcacaccgtgtgtgttgtgttcaatgttgtgtcaatctacaaactgactcaaacaacagtttaacgatagagaagacagtgataatggcaaaaaaaacacccaaccacctttttccgtcaaagtgcttgctatggctttcatagctgggacaagtaacattaagtattcaggagcaaagtgttcttgaaagaaaatggtgtgttgatctcataagaaaatgtacaaccaataaaagacattttaaaaagaaaaatga

SEQ ID NO: 290696 - DNA, 541 bp, Homo sapiens
cttcctttaaccttaaaaacaaagtcacatttataatattgaatatttcttcattgctcctccagttgtttgtaattgctaattttcatattgccttcagctcatctaatctatttgagactctactttaaatttcttattgttaagaaagtaaaatattaatatgatttagaaatggaatatcagggtaaaggaagaagcaagatagttcagtcttctgaatacccagaatccataattttgtaggtctgcctagtactgtgttaactactgtgaggtatgaaaaattaacatagtagggtatagtagcagagataaaacttgaattttaatcaatataaaaataaagttaacaagaaattgttaaatcctggccatacattttattaagcttcacttatcagaaacaaaatgaaataaaacaatagtaaaaagcttgtagcgtgcctggctcatgaagaaaattcagtgtagctgactgctttaacatcttgccttgttatttcaagaaaaaggtgacttgtatcaagttaatcaatgt

SEQ ID NO: 290697 - DNA, 609 bp, Homo sapiens
caggaacaaagctatacactatttcgaattttaatacggactcactaaagggaatttgccctcaagggcaaagaattggccacaaggaaagtgaaaaaaaaaaaaaaaacgtctagatcacctttgaggatgtgaaagatgctgtctaggcaaacttctggatcaagaatcctgtccagactagtcttcctgatctttagatgcttatgtgtcagcacctccaataggcaatagtattttctattgatataaagttcaaacctcagctagaatttttgtttctcttattcaaattcttaactttcaagaccttaactgtgaagtttaagcttaaacagcaattcttaatgtttttaagagtttaagaaaagttaccatgcccagtacaaactgtagcaaactacgatgcaaatatggctcatggtaattttatggtacagtataatttcaggcaattaaattcaaagcttagaaatggaatagatgtgggagattaccagttgtgaactgaaggagaccacagaatcaacagtgttagtgtaagcatttattattactactaatgacaatactcactgataagtccagtttgtgaacatttaaaaaaaa

SEQ ID NO: 290698 - DNA, 465 bp, Homo sapiens
taagttccaaccccgctggctcagagagggatctcctggccacttcctcctcctgcccagccccattctgctcaccttctcagaccttctgagaaaggccaccctgttttccaaaccccagatgagcacacgagatctgatgtgttctagtactccctgagtgttgaagtcttgtatcagaaaaattttgcaaaatcagattaccttttgtaggtgctttaacccattgcctttatggcaaaggatgaaattatagtgaaatcgggagctgatgtgatgctggcaggagccaagggagctgtattgatatggtttcgtttctctttcagtagaatattgggattagaattgatatgaatattattgtaattgattatgatttgagaggtttctaattggttgcattaacttcagaggctctgtaactttccgttttccttcatcaaaagtttctttccctcttct

SEQ ID NO: 290699 - DNA, 642 bp, Homo sapiens
gctgaagtgaaaacgagaccaaggtctagctctactgttggtacttatgagatccagtcctggcaacatggagaggattgtcatctgtctgatggtcatcttcttggggacactggtccacaaatcaagctcccaaggtcaagatcgccacatgattagaatgcgtcaacttatagatattgttgatcagctgaaaaattatgtgaatgacttggtccctgaatttctgccagctccagaagatgtagagacaaactgtgagtggtcagctttttcctgttttcagaaggcccaactaaagtcagcaaatacaggaaacaatgaaaggataatcaatgtatcaattaaaaagctgaagaggaaaccaccttccacaaatgcagggagaagacagaaacacagactaacatgcccttcatgtgattcttatgagaaaaaaccacccaaagaattcctagaaagattcaaatcacttctccaaaagatgattcatcagcatctgtcctctagaacacacggaagtgaagattcctgaggatctaacttgcagttggacactatgttacatactctaatatagtagtgaaagtcatttctttgtattccaagtggaggagccctattaaattatataaagaaata

SEQ ID NO: 290700 - DNA, 3787 bp, Homo sapiens
gttggcagtaatgctgccctgttattctttactccgctgagatgttgggtggagagaaacataaatctggcctacgtgcacgtccaggcatactaccttcccttgaacttaatgatgatatagattgctttgctcatatgttttttggtgtgaccttctctttattatcactcctgctctccgtactacattcctttatgctgaaataattgaaaatcatatatcaattataagatgaagtggaactcacgatggccgtgatgccggtgcgtggtccttgggtgtagctgagtgccggtcccctggtactccactattgtgtctccctcaaagattatataaaaaaatacaacaatacttaaacaaaatgaatgtacctcacaaatacaattcacaggagtgtatccagaagaaggtaccaaagaagctagagagcctgagaggataaacatgacagatcatataagagtgccatgcagagggcataccaaagcctcagcttggctggttgaagaatggaattgatattacaccaaagctttccaaacaactcacgcttcaagcaaatggcagtgaggttcacataagcaatgtgcgctatgaagatactggagcatacacttgtatcgcaaagaatgaagcaggagtggatgaagacatctcttctctttttgtggaagactctgctagaaagaccctagctaacatattatggagagaagaaggtctgggaattgggaacatgttctatgttttttatgaagatggaatcaaagtgatacaacccatagaatgtgaatttcagaggcacattaagcctagtgaaaagctccttggatttcaggatgaagtctgtcccaaagctgagggagatgaagttcagaggtgtgtgtgggcatcagctgttaatgtcaaagacaagttcatttatgttgcacagccaactttggacagagtccttattgttgatgtgcagtcccaaaaagttgttcaggcagtgagcacagaccctgtcccagttaaattacactatgacaaatcacatgatcaggtctgggtgctaagctggggtaccttggagaagacatcaccaacactacaggtaattaccctggccagtgggaatgtgcctcaccacacgatccacacccaaccagtgggaaagcaatttgacagagtggatgattttttcattcccaccacaacactcattatcacccatatgaggtttggatttattcttcataaagatgaagctgcactacaaaaaattgatcttgaaaccatgtcatacatcaagacaattaacttgaaggactataagtgcgttcctcagtcattggcatatacacacttgggaggctactacttcattggctgcaaacctgacagcaccggagcagtttccccacaggtcatggtggacggtgtaactgactcagtcattgggttcaatagtgatgtgacgggcactccatatgtctctccagatggccactaccttgtcagcattaatgatgtgaaaggtcttgtaagggttcagtacattaccatcagaggagaaatacaggaggcttttgatatttacacaaatctgcacatatctgatctggcatttcaaccatcctttactgaagcccaccaatataacatctacggtagttcaagcacacaaactgatgtgctctttgtggagctctcttctgggaaggtcaagatgataaagagtctcaaggaaccactcaaggcagaagaatggccttggaaccggaaaaacaggcaaatccaggacagtggcttgtttggtcaatacctgatgacaccttccaaggactctctcttcatcctagatggacgactcaataaattaaactgtgagatcactgaagttgaaaaaggaaatacagtcatttgggttggagatgcctaaaaaccctacgatacaattattgaatgaagcgttttacaatacattgcacttaatccattgtttaaatttacaacttaactttccaagtttatatcctagtcaaacaaaatttacttggttggtccaaataaaataaattgtttttgactaagtgactaagacatacacaattaattatattggttaattagaaatactcagcacaatatttaatgagaaatcacatcagtcacaagaatcaaatatgtaaattatgctttaaacaataaagtaggatttaaatcatttaaaaaactaaactgcagggaatttcagatgacataaagcattatttcattttgagggtagtttattttttttctctgtccttttggtatgattaaacaagaaataaaaggtgttgtggaaacttaaaattcttaattcaaaatattcggtcctgtccactgtttataatattttgtgccttgaagggaatgtcacaggaggaaaaggaagactaaagcctgcatactaaatgctctcataactataaatctcttgttgttaaaaaacatctcttgcaccaaatcctgtcttcagtcttttgtttaaccctcaatgaactaccaattgaaggcataagttggtcttaggttgtatacaggtgtcaaactccacttgacatttactgtataatctgcagcatgctatagaaagtggggaggaagggaggaaaaataattacagtcaaaatatttgcaatctatctactcattttgctttcaatcactagagtgcattatgtttttaatgcaagtttgtctgggatgtcaactgcctacagatgtttattactagcagaatagattatttattaatagattgtttcttttcatatagtccaatgtttcatcatcaggaactttcggttttaaaaaagaaacattacttttgtctgctaaagtaaaccatatatagggaaattaacacctaggaaaagaaaactggcaagagaattgatgaggtattagtggcttagaagaattagtaatataagttgggaataaaggggtagcccgacagtggtaagtaaaaatgtagtactccattgtttttgctatttaaatataatgtatcaaaaacctttattctaaaatttccacaaatgattccttttatccatcttcttgtaatcctaaaagcatcttctcactatgtgctgtagtttgaaacctaacgaatcctcctacttgagacactgtagaaaagtaaaaattgttgcttctgttttgttttaagaggaaatgagaaggccagcagaagtagattaaaactagagagctggtttattaaaataagcagataattatccaggcttaaagtaatagcttacatgttttgaaaatccttgtacttatttttgtttttattgttgcaaaaaaatgttaatgggctgttgaaatgacctccatttacttaaggtaatccaataaggtcttttttaaatatacaaattttactcaagtttaaattgtataaaactgcttagaaacctgaaattttatagtgtgtaatatcttatgtgtatatagcatcctgagctgtgtgatacagtagatttcttcttagcagaaacatgcgaggtagatttaataaacaacaaaaatcagcttatgtttctacttattgaatctgctttactttttagcaattttcttccttgtgaacatgaaccatataaagtgtctgtgacttaatgatttcatgtaagtctgtcgcatacatccttcttttgtagcttacaccatgtggatgctctgtctgtagacactgcttgataaaaggagaataaacctcttacattttaacccttga

SEQ ID NO: 290701 - DNA, 2248 bp, Homo sapiens
agctcctgcctagggaggaggagcgagaatcagcctggttcagtgactgagacaaactggaggtgaaaggagctggtactgtccactgtgctgtcggtgctgaacctgagacgcgagcggaccagttgctccagcacctgaaggcaacgccctcttgcaccctctgtgccctgtgggacccgcttcaccaacaggacccatatcaacttgacaaaggagtgtggtatcggacgtgggagagagtcctctgtttgccacctgggcgctcattcaggcgtgactttggagatttctatagttttagaccaaactatttttttttccccagctaagacgatcttttgagagttttttttttttattgtgatttatatttccacagcgtttaggaatctttctgggggacttttgtgactgttaaaataaggtgaaaagcaataaggatgtttaagtgctggtcagttgtcttggttctcggattcatttttctggagtcggaaggaaggccaaccaaagaaggaggatatggccttaaatcctatcagcctctaatgagattgcgacataagcaggaaaaaaatcaagaaagttcaagagtcaaaggatttatgattcaggatggcccttttggatcttgtgaaaataagtactgtggtttgggaagacactgtgttaccagcagagagacagggcaagcagaatgtgcctgtatggacctttgcaaacgtcactacaaacctgtgtgtggatctgacggagaattctatgaaaaccactgtgaagtgcacagagctgcttgcctgaaaaaacaaaagattaccattgttcacaatgaagactgcttctttaaaggagataagtgcaagactactgaatacagcaagatgaaaaatatgctattagatttacaaaatcaaaaatatattatgcaagaaaatgaaaatcctaatggcgacgacatatctcggaagaagctattggtggatcaaatgtttaaatattttgatgcagacagtaatggacttgtagatattaatgaactaactcaggtgataaaacaggaagaacttggcaaggatctctttgattgtactttgtatgttctattgaaatatgatgattttaatgctgacaagcacctggctcttgaagaattttatagagcattccaagtgatccagttgagtctgccagaagatcagaaactaagcatcactgcagcaactgtgggacaaagtgctgttctgagctgtgccattcaaggaaccctgagacctcccattatctggaaaaggaacaatattattctaaataatttagatttggaagacatcaatgactttggagatgatgggtccttgtatattactaaggttaccacaactcacgttggcaattacacctgctatgcagatggctatgaacaagtctatcagactcacatcttccaagtgaatgttcctccagtcatccgggtgtatccagagagtcaggctagagagcctggggtaactgccagtcttaggtgccatgcagagggcataccaaagcctcagcttggctggttgaagaatggaattgatattacaccaaagctttccaaacaactcacgcttcaagcaaatggcagtgaggttcacataagcaatgtgcgctatgaagatactggagcatacacttgtatcgcaaagaatgaagcaggagtggatgaagacatctcttctctttttgtggaagactctgctagaaagaccctagctaacatattatggagagaagaaggtctgggaattgggaacatgttctatgttttttatgaagatggaatcaaagtgatacaacccatagaatgtgaatttcagaggcacattaagcctagtgaaaagctccttggatttcagttgtacacatgatttcatcttgtcacctggagtatgaacttcaagcaaatagaattctatttcagacttatggattcagaagtcaaactgaaaaggagtttggaaaaatgtttaaaattacaggctcaaaaacaagctttcccaagattaccaactttgtcactcttctggttttctactactgttccatccttatctatcactcttttattctttgatacttttacattcagccaccttctttgcttgttatagatctagctgctgcttttcacatatgccatggtattacttattatttaatgggtcctaaaataactttaaagaaaaccacgtgtcttattatg

SEQ ID NO: 290702 - DNA, 474 bp, Homo sapiens
gagataagtgcaagactactgaatacagcaagatgaaaaatatgctattagatttacaaaatcaaaaatatattatgcaagaaaatgaaaatcctaatggcgacgacatatctcggaagaagctattggtggatcaaatgtttaaatattttgatgcagacagtaatggacttgtagatattaatgaactaactcaggtatgattagtgactatattaacaaacttactgaaatatagcatgcacaatatatttactttttctaaatttactctataatgaaaaaatgtatatttgatccatattattgaaaagtatatgaataacaacatttttgtagcaaacttgactacatcatcagcaatattaatttcaagtaacatttatatggtgtttgacagtttaaaaagagatatctacttctgatagatatctatatcttaaatacctaaaggaattacaagttctttatctt

SEQ ID NO: 290703 - DNA, 4844 bp, Homo sapiens
agctcctgcctagggaggaggagcgagaatcagcctggttcagtgactgagacaaactggaggtgaaaggagctggtactgtccactgtgctgtcggtgctgaacctgagacgcgagcggaccagttgctccagcacctgaaggcaacgccctcttgcaccctctgtgccctgtgggacccgcttcaccaacaggacccatatcaacttgacaaaggagtgtggtatcggacgtgggagagagtcctctgtttgccacctgggcgctcattcaggcgtgactttggagatttctatagttttagaccaaactatttttttttccccagctaagacgatcttttgagagttttttttttttattgtgatttatatttccacagcgtttaggaatctttctgggggacttttgtgactgttaaaataaggtgaaaagcaataaggatgtttaagtgctggtcagttgtcttggttctcggattcatttttctggagtcggaaggaaggccaaccaaagaaggaggatatggccttaaatcctatcagcctctaatgagattgcgacataagcaggaaaaaaatcaagaaagttcaagagtcaaaggatttatgattcaggatggcccttttggatcttgtgaaaataagtactgtggtttgggaagacactgtgttaccagcagagagacagggcaagcagaatgtgcctgtatggacctttgcaaacgtcactacaaacctgtgtgtggatctgacggagaattctatgaaaaccactgtgaagtgcacagagctgcttgcctgaaaaaacaaaagattaccattgttcacaatgaagactgcttctttaaaggagataagtgcaagactactgaatacagcaagatgaaaaatatgctattagatttacaaaatcaaaaatatattatgcaagaaaatgaaaatcctaatggcgacgacatatctcggaagaagctattggtggatcaaatgtttaaatattttgatgcagacagtaatggacttgtagatattaatgaactaactcaggtgataaaacaggaagaacttggcaaggatctctttgattgtactttgtatgttctattgaaatatgatgattttaatgctgacaagcacctggctcttgaagaattttatagagcattccaagtgatccagttgagtctgccagaagatcagaaactaagcatcactgcagcaactgtgggacaaagtgctgttctgagctgtgccattcaaggaaccctgagacctcccattatctggaaaaggaacaatattattctaaataatttagatttggaagacatcaatgactttggagatgatgggtccttgtatattactaaggttaccacaactcacgttggcaattacacctgctatgcagatggctatgaacaagtctatcagactcacatcttccaagtgaatgttcctccagtcatccgggtgtatccagagagtcaggctagagagcctggggtaactgccagtcttaggtgccatgcagagggcataccaaagcctcagcttggctggttgaagaatggaattgatattacaccaaagctttccaaacaactcacgcttcaagcaaatggcagtgaggttcacataagcaatgtgcgctatgaagatactggagcatacacttgtatcgcaaagaatgaagcaggagtggatgaagacatctcttctctttttgtggaagactctgctagaaagaccctagctaacatattatggagagaagaaggtctgggaattgggaacatgttctatgttttttatgaagatggaatcaaagtgatacaacccatagaatgtgaatttcagaggcacattaagcctagtgaaaagctccttggatttcaggatgaagtctgtcccaaagctgagggagatgaagttcagaggtgtgtgtgggcatcagctgttaatgtcaaagacaagttcatttatgttgcacagccaactttggacagagtccttattgttgatgtgcagtcccaaaaagttgttcaggcagtgagcacagaccctgtcccagttaaattacactatgacaaatcacatgatcaggtctgggtgctaagctggggtaccttggagaagacatcaccaacactacaggtaattaccctggccagtgggaatgtgcctcaccacacgatccacacccaaccagtgggaaagcaatttgacagagtggatgattttttcattcccaccacaacactcattatcacccatatgaggtttggatttattcttcataaagatgaagctgcactacaaaaaattgatcttgaaaccatgtcatacatcaagacaattaacttgaaggactataagtgcgttcctcagtcattggcatatacacacttgggaggctactacttcattggctgcaaacctgacagcaccggagcagtttccccacaggtcatggtggacggtgtaactgactcagtcattgggttcaatagtgatgtgacgggcactccatatgtctctccagatggccactaccttgtcagcattaatgatgtgaaaggtcttgtaagggttcagtacattaccatcagaggagaaatacaggaggcttttgatatttacacaaatctgcacatatctgatctggcatttcaaccatcctttactgaagcccaccaatataacatctacggtagttcaagcacacaaactgatgtgctctttgtggagctctcttctgggaaggtcaagatgataaagagtctcaaggaaccactcaaggcagaagaatggccttggaaccggaaaaacaggcaaatccaggacagtggcttgtttggtcaatacctgatgacaccttccaaggactctctcttcatcctagatggacgactcaataaattaaactgtgagatcactgaagttgaaaaaggaaatacagtcatttgggttggagatgcctaaaaaccctacgatacaattattgaatgaagcgttttacaatacattgcacttaatccattgtttaaatttacaacttaactttccaagtttatatcctagtcaaacaaaatttacttggttggtccaaataaaataaattgtttttgactaagtgactaagacatacacaattaattatattggttaattagaaatactcagcacaatatttaatgagaaatcacatcagtcacaagaatcaaatatgtaaattatgctttaaacaataaagtaggatttaaatcatttaaaaaactaaactgcagggaatttcagatgacataaagcattatttcattttgagggtagtttattttttttctctgtccttttggtatgattaaacaagaaataaaaggtgttgtggaaacttaaaattcttaattcaaaatattcggtcctgtccactgtttataatattttgtgccttgaagggaatgtcacaggaggaaaaggaagactaaagcctgcatactaaatgctctcataactataaatctcttgttgttaaaaaacatctcttgcaccaaatcctgtcttcagtcttttgtttaaccctcaatgaactaccaattgaaggcataagttggtcttaggttgtatacaggtgtcaaactccacttgacatttactgtataatctgcagcatgctatagaaagtggggaggaagggaggaaaaataattacagtcaaaatatttgcaatctatctactcattttgctttcaatcactagagtgcattatgtttttaatgcaagtttgtctgggatgtcaactgcctacagatgtttattactagcagaatagattatttattaatagattgtttcttttcatatagtccaatgtttcatcatcaggaactttcggttttaaaaaagaaacattacttttgtctgctaaagtaaaccatatatagggaaattaacacctaggaaaagaaaactggcaagagaattgatgaggtattagtggcttagaagaattagtaatataagttgggaataaaggggtagcccgacagtggtaagtaaaaatgtagtactccattgtttttgctatttaaatataatgtatcaaaaacctttattctaaaatttccacaaatgattccttttatccatcttcttgtaatcctaaaagcatcttctcactatgtgctgtagtttgaaacctaacgaatcctcctacttgagacactgtagaaaagtaaaaattgttgcttctgttttgttttaagaggaaatgagaaggccagcagaagtagattaaaactagagagctggtttattaaaataagcagataattatccaggcttaaagtaatagcttacatgttttgaaaatccttgtacttatttttgtttttattgttgcaaaaaaatgttaatgggctgttgaaatgacctccatttacttaaggtaatccaataaggtcttttttaaatatacaaattttactcaagtttaaattgtataaaactgcttagaaacctgaaattttatagtgtgtaatatcttatgtgtatatagcatcctgagctgtgtgatacagtagatttcttcttagcagaaacatgcgaggtagatttaataaacaacaaaaatcagcttatgtttctacttattgaatctgctttactttttagcaattttcttccttgtgaacatgaaccatataaagtgtctgtgacttaatgatttcatgtaagtctgtcgcatacatccttcttttgtagcttacaccatgtggatgctctgtctgtagacactgcttgataaaaggagaataaacctcttacattttaacccttga

SEQ ID NO: 290704 - DNA, 2617 bp, Homo sapiens
agagcgatgtagactaaaaaagttcataaatataatgaataaaaacgcaaaatttaggtttggatttattcttcataaagatgaagctgcactacaaaaaattgatcttgaaaccatgtcatacatcaagacaattaacttgaaggactataagtgcgttcctcagtcattggcatatacacacttgggaggctactacttcattggctgcaaacctgacagcaccggagcagtttccccacaggtcatggtggacggtgtaactgactcagtcattgggttcaatagtgatgtgacgggcactccatatgtctctccagatggccactaccttgtcagcattaatgatgtgaaaggtcttgtaagggttcagtacattaccatcagaggagaaatacaggaggcttttgatatttacacaaatctgcacatatctgatctggcatttcaaccatcctttactgaagcccaccaatataacatctacggtagttcaagcacacaaactgatgtgctctttgtggagctctcttctgggaaggtcaagatgataaagagtctcaaggaaccactcaaggcagaagaatggccttggaaccggaaaaacaggcaaatccaggacagtggcttgtttggtcaatacctgatgacaccttccaaggactctctcttcatcctagatggacgactcaataaattaaactgtgagatcactgaagttgaaaaaggaaatacagtcatttgggttggagatgcctaaaaaccctacgatacaattattgaatgaagcgttttacaatacattgcacttaatccattgtttaaatttacaacttaactttccaagtttatatcctagtcaaacaaaatttacttggttggtccaaataaaataaattgtttttgactaagtgactaagacatacacaattaattatattggttaattagaaatactcagcacaatatttaatgagaaatcacatcagtcacaagaatcaaatatgtaaattatgctttaaacaataaagtaggatttaaatcatttaaaaaactaaactgcagggaatttcagatgacataaagcattatttcattttgagggtagtttattttttttctctgtccttttggtatgattaaacaagaaataaaaggtgttgtggaaacttaaaattcttaattcaaaatattcggtcctgtccactgtttataatattttgtgccttgaagggaatgtcacaggaggaaaaggaagactaaagcctgcatactaaatgctctcataactataaatctcttgttgttaaaaaacatctcttgcaccaaatcctgtcttcagtcttttgtttaaccctcaatgaactaccaattgaaggcataagttggtcttaggttgtatacaggtgtcaaactccacttgacatttactgtataatctgcagcatgctatagaaagtggggaggaagggaggaaaaataattacagtcaaaatatttgcaatctatctactcattttgctttcaatcactagagtgcattatgtttttaatgcaagtttgtctgggatgtcaactgcctacagatgtttattactagcagaatagattatttattaatagattgtttcttttcatatagtccaatgtttcatcatcaggaactttcggttttaaaaaagaaacattacttttgtctgctaaagtaaaccatatatagggaaattaacacctaggaaaagaaaactggcaagagaattgatgaggtattagtggcttagaagaattagtaatataagttgggaataaaggggtagcccgacagtggtaagtaaaaatgtagtactccattgtttttgctatttaaatataatgtatcaaaaacctttattctaaaatttccacaaatgattccttttatccatcttcttgtaatcctaaaagcatcttctcactatgtgctgtagtttgaaacctaacgaatcctcctacttgagacactgtagaaaagtaaaaattgttgcttctgttttgttttaagaggaaatgagaaggccagcagaagtagattaaaactagagagctggtttattaaaataagcagataattatccaggcttaaagtaatagcttacatgttttgaaaatccttgtacttatttttgtttttattgttgcaaaaaaatgttaatgggctgttgaaatgacctccatttacttaaggtaatccaataaggtcttttttaaatatacaaattttactcaagtttaaattgtataaaactgcttagaaacctgaaattttatagtgtgtaatatcttatgtgtatatagcatcctgagctgtgtgatacagtagatttcttcttagcagaaacatgcgaggtagatttaataaacaacaaaaatcagcttatgtttctacttattgaatctgctttactttttagcaattttcttccttgtgaacatgaaccatataaagtgtctgtgacttaatgatttcatgtaagtctgtcgcatacatccttcttttgtagcttacaccatgtggatgctctgtctgtagacactgcttgataaaaggagaataaacctcttacattttaacccttga

SEQ ID NO: 290705 - DNA, 3803 bp, Homo sapiens
agtcccaattagatgcgacggcttcagcctggtcaaggtgaaggaaagttgcttccgcgcctaggaagtgggtttgcctgataagagaaggaggaggggactcggctgggaagagctcccctcccctccgcggaagaccactgggtcccctctttccccaacctcctccctctcttctactccacccctccgttttcccactccccactgactcggatgcctggatgttctgccaccgggcagtggtccagcgtgcagccgggagggggcaggggcagggggcactgtgacaggaagctgcgcgcacaagttggccatttcgagggcaaaataagttctcccttggatttggaaaggacaaagccagtaagctacctcttttgtgtcggatgaggaggaccaaccatgagccagagcccgggtgcaggctcaccgccgccgctgccaccgcggtcagctccagttcctgccaggagttgtcggtgcgaggaattttgtgacaggctctgttagtctgttcctcccttatttgaaggacaggccaaagatccagtttggaaatgagagaggactagcatgacacattggctccaccattgatatctcccagaggtacagaaacaggattcatgaagatgttgacaagactgcaagttcttaccttagctttgttttcaaagggatttttactctctttaggggaccataactttctaaggagagagattaaaatagaaggtgaccttgttttagggggcctgtttcctattaacgaaaaaggcactggaactgaagaatgtgggcgaatcaatgaagaccgagggattcaacgcctggaagccatgttgtttgctattgatgaaatcaacaaagatgattacttgctaccaggagtgaagttgggtgttcacattttggatacatgttcaagggatacctatgcattggagcaatcactggagtttgtcagggcatctttgacaaaagtggatgaagctgagtatatgtgtcctgatggatcctatgccattcaagaaaacatcccacttctcattgcaggggtcattggtggctcttatagcagtgtttccatacaggtggcaaacctgctgcggctcttccagatccctcagatcagctacgcatccaccagcgccaaactcagtgataagtcgcgctatgattactttgccaggaccgtgccccccgacttctaccaggccaaagccatggctgagatcttgcgcttcttcaactggacctacgtgtccacagtagcctccgagggtgattacggggagacagggatcgaggccttcgagcaggaagcccgcctgcgcaacatctgcatcgctacggcggagaaggtgggccgctccaacatccgcaagtcctacgacagcgtgatccgagaactgttgcagaagcccaacgcgcgcgtcgtggtcctcttcatgcgcagcgacgactcgcgggagctcattgcagccgccagccgcgccaatgcctccttcacctgggtggccagcgacggctggggcgcgcaggagagcatcatcaagggcagcgagcatgtggcctacggcgccatcaccctggagctggcctcccagcctgtccgccagttcgaccgctacttccagagcctcaacccctacaacaaccaccgcaacccctggttccgggacttctgggagcaaaagtttcagtgcagcctccagaacaaacgcaaccacaggcgcgtctgcgacaagcacctggccatcgacagcagcaactacgagcaagagtccaagatcatgtttgtggtgaacgcggtgtatgccatggcccacgctttgcacaaaatgcagcgcaccctctgtcccaacactaccaagctttgtgatgctatgaagatcctggatgggaagaagttgtacaaggattacttgctgaaaatcaacttcacggctccattcaacccaaataaagatgcagatagcatagtcaagtttgacacttttggagatggaatggggcgatacaacgtgttcaatttccaaaatgtaggtggaaagtattcctacttgaaagttggtcactgggcagaaaccttatcgctagatgtcaactctatccactggtcccggaactcagtccccacttcccagtgcagcgacccctgtgcccccaatgaaatgaagaatatgcaaccaggggatgtctgctgctggatttgcatcccctgtgaaccctacgaatacctggctgatgagtttacctgtatggattgtgggtctggacagtggcccactgcagacctaactggatgctatgaccttcctgaggactacatcaggtgggaagacgcctgggccattggcccagtcaccattgcctgtctgggttttatgtgtacatgcatggttgtaactgtttttatcaagcacaacaacacacccttggtcaaagcatcgggccgagaactctgctacatcttattgtttggggttggcctgtcatactgcatgacattcttcttcattgccaagccatcaccagtcatctgtgcattgcgccgactcgggctggggagttccttcgctatctgttactcagccctgctgaccaagacaaactgcattgcccgcatcttcgatggggtcaagaatggcgctcagaggccaaaattcatcagccccagttctcaggttttcatctgcctgggtctgatcctggtgcaaattgtgatggtgtctgtgtggctcatcctggaggccccaggcaccaggaggtatacccttgcagagaagcgggaaacagtcatcctaaaatgcaatgtcaaagattccagcatgttgatctctcttacctacgatgtgatcctggtgatcttatgcactgtgtacgccttcaaaacgcggaagtgcccagaaaatttcaacgaagctaagttcataggttttaccatgtacaccacgtgcatcatctggttggccttcctccctatattttatgtgacatcaagtgactacagagtgcagacgacaaccatgtgcatctctgtcagcctgagtggctttgtggtcttgggctgtttgtttgcacccaaggttcacatcatcctgtttcaaccccagaagaatgttgtcacacacagactgcacctcaacaggttcagtgtcagtggaactgggaccacatactctcagtcctctgcaagcacgtatgtgccaacggtgtgcaatgggcgggaagtcctcgactccaccacctcatctctgtgattgtgaattgcagttcagttcttgtgtttttagactgttagacaaaagtgctcacgtgcagctccagaatatggaaacagagcaaaagaacaaccctagtacctttttttagaaacagtacgataaattatttttgaggactgtatatagtgatgtgctagaactttctaggctgagtctagtgcccctattattaacaattcccccagaacatggaaataaccattgtttacagagctgagcattggtgacagggtctgacatggtcagtctactaaaaaacaaaaaaaaaaaacaaaaaaaaaaaaacaaaagaaaaaaataaaaatacggtggcaatattatgtaaccttttttcctatgaagttttttgtaggtccttgttgtaactaatttaggatgagtttctatgttgtatattaaagttacattatgtgtaacagattgattttctcagcacaaaataaaaagcatctgtattaatgtaaagatactgagaataaaaccttcaaggttttccagcatggtggataa

SEQ ID NO: 290706 - DNA, 1129 bp, Homo sapiens
ttccgcttcggggaaggggcggagcctgagggacccggcggctggtgagcgcccgctggaggctggagcttccgggccctggaaaggggtccccgcgcgccccgggtcggaggcagacccctgggtttgggggacatgggcatttggggcgcctgaacccaagacctctggatgagctgccccgttcagaccatggatcctgaggtgaccttgctgctgcagtgccctggcgggggcctgccccaggagcagatacaggccgagctgagccccgcccatgaccgtcgcccactgccaggtggggacgaggccatcactgccatctgggagacccggctaaaggcccaaccctggctcttcgacgcccccaagttccgcctgcactcagccaccctggcgcctattggctctcgggggccacagctgctcctgcgcctgggccttacttcctaccgagacttcctgggcaccaactggtccagctcagctgcctggctgcgacagcagggtgccaccgactggggtgacacgcaggcctatctggcggacccactgggggtgggcgctgcactagccacagccgatgacttccttgtcttcctgcgccgctcccggcaggtggctgaggcccctgggctggtggacgtacctggtgggcaccctgagcctcaggccctgtgccctggtggcagcccccagcaccaggacctcgctgggcagctggtggtacatgaactcttttccagtgtccttcaggagatctgtgatgaggtgaacctgccgctgctcaccctgagccagcccctgctgttgggcatcgcccgaaatgagaccagtgctggccgagccagtgccgagttctatgtccagtgcagcctgacttctgagcaggtgaggaagcactacctgagtgggggacccgaggcccacgagtctacaggaatcttctttgtggagacacagaacgtgcggagattgcccgagacggagatgtgggctgaactctgcccctcggccaaaggcgccatcatcctctacaaccgggttcagggaagtcccactggagcggccctagggtccccagccctactcccgccgctctgaaaataataaacgactttattcttgg

SEQ ID NO: 290707 - DNA, 851 bp, Homo sapiens
attcggcaccaggggagggacccggcggctgagctgccccgttcagaccatggatcctgaggtgaccttgctgctgcagtgccctggcgggggcctgccccaggagcagatacaggccgagctgagccccgcccatgaccgtcgcccactgccaggtggggacgaggccatcactgccatctgggagacccggctaaaggcccaaccctggctcttcgacgcccccaagttccgcctgcactcagccaccctggcgcctattggctctcgggggccacagctgctcctgcgcctgggccttacttcctaccgagacttcctgggcaccaactggtccagctcagctgcctggctgcgacagcagggtgccaccgactggggtgacacgcaggcctatctggcggacccactgggggtgggcgctgcactagccacagccgatgacttccttgtcttcctgcgccgctcccggcaggtggctgaggcccctgggctggtggacgtacctggtgggcaccctgagcctcaggtgcagcctgacttctgagcaggtgaggaagcactacctgagtgggggacccgaggcccacgagtctacaggaatcttctttgtggagacacagagaggctccggggcggaagcagctccgtaagatatacctcgctgcagaggggagcaacagcggaacggagacacggtggccgggccgaaaacgtcacaaagccgcagagagcgggctctgtcccgcccgctccccaggtggacgtggtcttggcatccacgccaatgagaatgtgagggcggggcctgaatagacgcaggaaatggcgacggccgcgggtctgtgagc

SEQ ID NO: 290708 - DNA, 1158 bp, Homo sapiens
ttccgcttcggggaaggggcggagcctgagggacccggcggctggtgagcgcccgctggaggctggagcttccgggccctggaaaggggtccccgcgcgccccgggtcggaggcagacccctgggtttgggggacatgggcatttggggcgcctgaacccaagacctctggatgagctgccccgttcagaccatggatcctgaggtgaccttgctgctgcagtgccctggcgggggcctgccccaggagcagatacaggccgagctgagccccgcccatgaccgtcgcccactgccaggtggggacgaggccatcactgccatctgggagacccggctaaaggcccaaccctggctcttcgacgcccccaagttccgcctgcactcagccaccctggcgcctattggctctcgggggccacagctgctcctgcgcctgggccttacttcctaccgagacttcctgggcaccaactggtccagctcagctgcctggctgcgacagcagggtgccaccgactggggtgacacgcaggcctatctggcggacccactgggggtgggcgctgcactagccacagccgatgacttccttgtcttcctgcgccgctcccggcaggtggctgaggcccctgggctggtggacgtacctggtgggcaccctgagcctcaggccctgtgccctggtggcagcccccagcaccaggacctcgctgggcagctggtggtacatgaactcttttccagtgtccttcaggagatctgtgatgaggtgaacctgccgctgctcaccctgagccagcccctgctgttgggcatcgcccgaaatgagaccagtgctggccgagccagtgccgagttctatgtccagtgcagcctgacttctgagcaggtgaggaagcactacctgagtgggggacccgaggcccacgagtctacaggaatcttctttgtggagacacagaacgtgcggagattgcccgagacggagatgtgggctgaactctgcccctcggccaaaggcgccatcatcctctacaaccgggttcagggaagtcccactggagcggccctagggtccccagccctactcccgccgctctgaaaataataaacgactttattcttggaaagacacgtcggcatctgctatttctgt

SEQ ID NO: 290709 - DNA, 1080 bp, Homo sapiens
  misc_feature (26)..(27): n is a, c, g, or t
ctgctggtacggccccgcggattttnnggatggaaaggggtccccgcgcgccccgggtcggaggcagacccctgggtttgggggacatgggcatttggggcgcctgaacccaagacctctggatgagctgccccgttcagaccatggatcctgaggtgaccttgctgctgcagtgccctggcgggggcctgccccaggagcagatacaggccgagctgagccccgcccatgaccgtcgcccactgccaggtggggacgaggccatcactgccatctgggagacccggctaaaggcccaaccctggctcttcgacgcccccaagttccgcctgcactcagccaccctggcgcctattggctctcgggggccacagctgctcctgcgcctgggccttacttcctaccgagacttcctgggcaccaactggtccagctcagctgcctggctgcgacagcagggtgccaccgactggggtgacacgcaggcctatctggcggacccactgggggtgggcgctgcactagccacagccgatgacttccttgtcttcctgcgccgctcccggcaggtggctgaggcccctgggctggtggacgtacctggtgggcaccctgagcctcaggccctgtgccctggtggcagcccccagcaccaggacctcgctgggcagctggtggtacatgaactcttttccagtgtccttcaggagatctgtgatgaggtgaacctgccgctgctcaccctgagccagcccctgctgttgggcatcgcccgaaatgagaccagtgctggccgagccagtgccgagttctatgtccagtgcagcctgacttctgagcaggtgaggaagcactacctgagtgggggacccgaggcccacgagtctacaggaatcttctttgtggagacacagaacgtgcggagattgcccgagacggagatgtgggctgaactctgcccctcggccaaaggcgccatcatcctctacaaccgggttcagggaagtcccactggagcggccctagggtccccagccctactcccgccgctctgaaaataataaacgactttattcttgg

SEQ ID NO: 290710 - DNA, 986 bp, Homo sapiens
attcggcaccaggggagggacccggcggctgagctgccccgttcagaccatggatcctgaggtgaccttgctgctgcagtgccctggcgggggcctgccccaggagcagatacaggccgagctgagccccgcccatgaccgtcgcccactgccaggtggggacgaggccatcactgccatctgggagacccggctaaaggcccaaccctggctcttcgacgcccccaagttccgcctgcactcagccaccctggcgcctattggctctcgggggccacagctgctcctgcgcctgggccttacttcctaccgagacttcctgggcaccaactggtccagctcagctgcctggctgcgacagcagggtgccaccgactggggtgacacgcaggcctatctggcggacccactgggggtgggcgctgcactagccacagccgatgacttccttgtcttcctgcgccgctcccggcaggtggctgaggcccctgggctggtggacgtacctggtgggcaccctgagcctcaggccctgtgccctggtggcagcccccagcaccaggacctcgctgggcagctggtggtacatgaactcttttccagtgtccttcaggagatctgtgatgaggtgaacctgccgctgctcaccctgagccagcccctgctgttgggcatcgcccgaaatgagaccagtgctggccgagccagtgccgagttctatgtccagtgcagcctgacttctgagcaggtgaggaagcactacctgagtgggggacccgaggcccacgagtctacaggaatcttctttgtggagacacagaacgtgcggagattgcccgagacggagatgtgggctgaactctgcccctcggccaaaggcgccatcatcctctacaaccgggttcagggaagtcccactggagcggccctagggtccccagccctactcccgccgctctgaaaataataaacgactttattcttgg

SEQ ID NO: 290711 - DNA, 974 bp, Homo sapiens
acgtatctgctcctggggcaggcccccgccagggcactgcagcagcaaggtcacctcaggatccatggtctgaacggggcagctgccccaggagcagatacaggccgagctgagccccgcccatgaccgtcgcccactgccaggtggggacgaggccatcactgccatctgggagacccggctaaaggcccaaccctggctcttcgacgcccccaagttccgcctgcactcagccaccctggcgcctattggctctcgggggccacagctgctcctgcgcctgggccttacttcctaccgagacttcctgggcaccaactggtccagctcagctgcctggctgcgacagcagggtgccaccgactggggtgacacgcaggcctatctggcggacccactgggggtgggcgctgcactagccacagccgatgacttccttgtcttcctgcgccgctcccggcaggtggctgaggcccctgggctggtggacgtacctggtgggcaccctgagcctcaggccctgtgccctggtggcagcccccagcaccaggacctcgctgggcagctggtggtacatgaactcttttccagtgtccttcaggagatctgtgatgaggtgaacctgccgctgctcaccctgagccagcccctgctgttgggcatcgcccgaaatgagaccagtgctggccgagccagtgccgagttctatgtccagtgcagcctgacttctgagcaggtgaggaagcactacctgagtgggggacccgaggcccacgagtctacaggaatcttctttgtggagacacagaacgtgcggagattgcccgagacggagatgtgggctgaactctgcccctcggccaaaggcgccatcatcctctacaaccgggttcagggaagtcccactggagcggccctagggtccccagccctactcccgccgctctgaaaataataaacgactttattcttgg

SEQ ID NO: 290712 - DNA, 1081 bp, Homo sapiens
gtggtaccggccgagtcttaggatcggcggctgagctgccccgttcagaccatggatcctgaggtgaccttgctgctgcagtgccctggcgggggcctgccccaggagcagatacaggccgagctgagccccgcccatgaccgtcgcccactgccaggtggggacgaggccatcactgccatctgggagacccggctaaaggcccaaccctggctcttcgacgcccccaagttccgcctgcactcagccaccctggcgcctattggctctcgggggccacagctgctcctgcgcctgggccttacttcctaccgagacttcctgggcaccaactggtccagctcagctgcctggctgcgacagcagggtgccaccgactggggtgacacgcaggcctatctggcggacccactgggggtgggcgctgcactagccacagccgatgacttccttgtcttcctgcgccgctcccggcaggtggctgaggcccctgggctggtggacgtacctggtgggcaccctgagcctcagctggacctctggttgtctgtcagggaaaggacaccagactcaggatcactaactctcttacactgtgccacatcagaccctcaaggccagcaggccctgtgccctggtggcagcccccagcaccaggacctcgctgggcagctggtggtacatgaactcttttccagtgtccttcaggagatctgtgatgaggtgaacctgccgctgctcaccctgagccagcccctgctgttgggcatcgcccgaaatgagaccagtgctggccgagccagtgccgagttctatgtccagtgcagcctgacttctgagcaggtgaggaagcactacctgagtgggggacccgaggcccacgagtctacaggaatcttctttgtggagacacagaacgtgcggagattgcccgagacggagatgtgggctgaactctgcccctcggccaaaggcgccatcatcctctacaaccgggttcagggaagtcccactggagcggccctagggtccccagccctactcccgccgctctgaaaataataaacgactttattcttgg

SEQ ID NO: 290713 - DNA, 1237 bp, Homo sapiens
ttccgcttcggggaaggggcggagcctgagggacccggcggctggtgagcgcccgctggaggctggagcttccgggccctggaaaggggtccccgcgcgccccgggtcggaggcagacccctgggtttgggggacatgggcatttggggcgcctgaacccaagacctctggatggtagggatgcccgggcgtcctggataccctgcgggactcggggctcctgcggggaagatggcacgttttactgcccaaggagtggtcaggggggtggagaagcgctgcggataccctcaggaggtctgcgacagagggggctagctgcgcagcccaggagtggtagtggcccccctggatgacaggcctggccgtatcctcccccagagctgccccgttcagaccatggatcctgaggtgaccttgctgctgcagtgccctggcgggggcctgccccaggagcagatacaggccgagctgagccccgcccatgaccgtcgcccactgccaggtggggacgaggccatcactgccatctgggagacccggctaaaggcccaaccctggctcttcgacgcccccaagttccgcctgcactcagccaccctggcgcctattggctctcgggggccacagctgctcctgcgcctgggccttacttcctaccgagacttcctgggcaccaactggtccagctcagctgcctggctgcgacagcagggtgccaccgactggggtgacacgcaggcctatctggcggacccactgggggtgggcgctgcactagccacagccgatgacttccttgtcttcctgcgccgctcccggcaggtggctgaggcccctgggctggtggacgtacctggtgggcaccctgagcctcaggtgaacctgccgctgctcaccctgagccagcccctgctgttgggcatcgcccgaaatgagaccagtgctggccgagccagtgccgagttctatgtccagtgcagcctgacttctgagcaggtgaggaagcactacctgagtgggggacccgaggcccacgagtctacaggaatcttctttgtggagacacagaacgtgcggagattgcccgagacggagatgtgggctgaactctgcccctcggccaaaggcgccatcatcctctacaaccgggttcagggaagtcccactggagcggccctagggtccccagccctactcccgccgctctgaaaataataaacgactttattcttgg

SEQ ID NO: 290714 - DNA, 1098 bp, Homo sapiens
ttccgcttcggggaaggggcggagcctgagggacccggcggctggtgagcgcccgctggaggctggagcttccgggccctggaaaggggtccccgcgcgccccgggtcggaggcagacccctgggtttgggggacatgggcatttggggcgcctgaacccaagacctctggatggtagggatgcccgggcgtcctggataccctgcgggactcggggctcctgcggggaagatggcacgttttactgcccaaggagtggtcaggggggtggagaagcgctgcggataccctcaggaggtctgcgacagagggggctagctgcgcagcccaggagtggtagtggcccccctggatgacaggcctggccgtatcctcccccagagctgccccgttcagaccatggatcctgaggtgaccttgctgctgcagtgccctggcgggggcctgccccaggagcagatacaggccgagctgagccccgcccatgaccgtcgcccactgccaggtggggacgaggccatcactgccatctgggagacccggctaaaggcccaaccctggctcttcgacgcccccaagttccgcctgcactcagccaccctgggctggtggacgtacctggtgggcaccctgagcctcaggccctgtgccctggtggcagcccccagcaccaggacctcgctgggcagctggtggtacatgaactcttttccagtgtccttcaggagatctgtgatgaggtgaacctgccgctgctcaccctgagccagcccctgctgttgggcatcgcccgaaatgagaccagtgctggccgagccagtgccgagttctatgtccagtgcagcctgacttctgagcaggtgaggaagcactacctgagtgggggacccgaggcccacgagtctacaggaatcttctttgtggagacacagaacgtgcggagattgcccgagacggagatgtgggctgaactctgcccctcggccaaaggcgccatcatcctctacaaccgggttcagggaagtcccactggagcggccctagggtccccagccctactcccgccgctctgaaaataataaacgactttattcttgg

SEQ ID NO: 290715 - DNA, 1047 bp, Homo sapiens
ttccgcttcggggaaggggcggagcctgagggacccggcggctggtgagcgcccgctggaggctggagcttccgggccctggaaaggggtccccgcgcgccccgggtcggaggcagacccctgggtttgggggacatgggcatttggggcgcctgaacccaagacctctggatggtagggatgcccgggcgtcctggataccctgcgggactcggggctcctgcggggaagatggcacgttttactgcccaaggagtggtcaggggggtggagaagcgctgcggataccctcaggaggtctgcgacagagggggctagctgcgcagcccaggagtggtagtggcccccctggatgacaggcctggccgtatcctcccccagagctgccccgttcagaccatggatcctgaggtgaccttgctgctgcagtgccctggcgggggcctgccccaggagcagatacaggccgagctgagccccgcccatgaccgtcgcccactgccaggtggggacgaggccatcactgccatctgggagacccggctaaaggcccaaccctggctcttcgacgcccccaagttccgcctgcactcagccaccctggcgcctattggctctcgggggccacagctgctcctgcgcctgggccttacttcctaccgagacttcctgggcaccaactggtccagctcagctgcctggctgcgacagcagggtgccaccgactggggtgacacgcaggcctatctggcggacccactgggggtgggcgctgcactagccacaggtgcagcctgacttctgagcaggtgaggaagcactacctgagtgggggacccgaggcccacgagtctacaggaatcttctttgtggagacacagaacgtgcggagattgcccgagacggagatgtgggctgaactctgcccctcggccaaaggcgccatcatcctctacaaccgggttcagggaagtcccactggagcggccctagggtccccagccctactcccgccgctctgaaaataataaacgactttattcttgg

SEQ ID NO: 290716 - DNA, 925 bp, Homo sapiens
ttccgcttcggggaaggggcggagcctgagggacccggcggctggtgagcgcccgctggaggctggagcttccgggccctggaaaggggtccccgcgcgccccgggtcggaggcagacccctgggtttgggggacatgggcatttggggcgcctgaacccaagacctctggatggtagggatgcccgggcgtcctggataccctgcgggactcggggctcctgcggggaagatggcacgttttactgcccaaggagtggtcaggggggtggagaagcgctgcggataccctcaggaggtctgcgacagagggggctagctgcgcagcccaggagtggtagtggcccccctggatgacaggcctggccgtatcctcccccagagctgccccgttcagaccatggatcctgaggtgaccttgctgctgcagtgccctggcgggggcctgccccaggagcagatacaggccgagctgagccccgcccatgaccgtcgcccactgccaggtggggacgaggccatcactgccatctgggagacccggctaaaggcccaaccctggctcttcgacgcccccaagttccgcctgcactcagccaccctggcgcctattggctctcgggggccacagctgctcctgcgcctgggccttacttcctaccgagagtgcagcctgacttctgagcaggtgaggaagcactacctgagtgggggacccgaggcccacgagtctacaggaatcttctttgtggagacacagaacgtgcggagattgcccgagacggagatgtgggctgaactctgcccctcggccaaaggcgccatcatcctctacaaccgggttcagggaagtcccactggagcggccctagggtccccagccctactcccgccgctctgaaaataataaacgactttattcttgg

SEQ ID NO: 290717 - DNA, 644 bp, Homo sapiens
tgcccatcatctgacattctgtaatgctgggtccttgatctacaagctataaaatgctgtacacaggtaacaggcggtttttcattgagacgggcagggatgtgggcagtggcattgataggtgggacctccccccaccccaccctccaccgcagtgaacctgccgctgctcaccctgagccagcccctgctgttgggcatcgcccgaaatgagaccagtgctggccgagccagtgccgagttctatgtccagtgagtaggctcgggtacatgatcctgggtcttgggaaggtgggtggtgaggagtgggctgaggcagctgtggctccacaggtaccccgcaggggctggtcacccactaagccacccttgtgttcttgtccagtgcagcctgacttctgagcaggtgaggaagcactacctgagtgggggacccgaggcccacgagtctacaggaatcttctttgtggagacacagaacgtgcggagattgcccgagacggagatgtgggctgaactctgcccctcggccaaaggcgccatcatcctctacaaccgggttcagggaagtcccactggagcggccctagggtccccagccctactcccgccgctctgaaaataataaacgactttattcttgg

SEQ ID NO: 290718 - DNA, 336 bp, Homo sapiens
tatgtccagtgagtaggctcgggtacatgatcctgggtcttgggaaggtgggtggtgaggagtgggctgaggcagctgtggctccacaggtaccccgcaggggctggtcacccactaagccacccttgtgttcttgtccagtgcagcctgacttctgagcaggtgaggaagcactacctgagtgggggacccgaggcccacgagtctacaggaatcttctttgtggagacacaggtgcagagtgacaaaccatcttgcttggaggccagggctggggcctgcagaggcctggcaatgcatatcttgtaggggaggtgttggctgggtcacaattcc

SEQ ID NO: 290719 - DNA, 512 bp, Homo sapiens
tgcccatcatctgacattctgtaatgctgggtccttgatctacaagctataaaatgctgtacacaggtaacaggcggtttttcattgagacgggcagggatgtgggcagtggcattgataggtgggacctccccccaccccaccctccaccgcagtgaacctgccgctgctcaccctgagccagcccctgctgttgggcatcgcccgaaatgagaccagtgctggccgagccagtgccgagttctatgtccagtgcagcctgacttctgagcaggtgaggaagcactacctgagtgggggacccgaggcccacgagtctacaggaatcttctttgtggagacacagaacgtgcggagattgcccgagacggagatgtgggctgaactctgcccctcggccaaaggcgccatcatcctctacaaccgggttcagggaagtcccactggagcggccctagggtccccagccctactcccgccgctctgaaaataataaacgactttattcttgg

SEQ ID NO: 290720 - DNA, 445 bp, Homo sapiens
tttcctggcccgctcggcaggccccaactggccccccccactgcctcgtgcgcacgaggcagtgatggggggtggagaagcgctgcggataccctcaggaggtctgcgacagagggggctagctgcgcagcccaggagtggtagtggcccccctggatgacaggcctggccgtatcctcccccagagctgccccgttcagaccatggatcctgaggtgaccttgctgctgcagtgccctggcgggggcctgccccaggagcagatacaggccgagctgagccccgcccatgaccgtcgcccactgccaggtggggacgaggccatcactgccatctgggagacccggctaaaggcccaaccctggctcttcgacgcccccaagttccgcctgcactcagccacattgattctgtataggtataggcactgttgaatctggaccga

SEQ ID NO: 290721 - DNA, 1336 bp, Homo sapiens
ttccgcttcggggaaggggcggagcctgagggacccggcggctggtgagcgcccgctggaggctggagcttccgggccctggaaaggggtccccgcgcgccccgggtcggaggcagacccctgggtttgggggacatgggcatttggggcgcctgaacccaagacctctggatggtagggatgcccgggcgtcctggataccctgcgggactcggggctcctgcggggaagatggcacgttttactgcccaaggagtggtcaggggggtggagaagcgctgcggataccctcaggaggtctgcgacagagggggctagctgcgcagcccaggagtggtagtggcccccctggatgacaggcctggccgtatcctcccccagagctgccccgttcagaccatggatcctgaggtgaccttgctgctgcagtgccctggcgggggcctgccccaggagcagatacaggccgagctgagccccgcccatgaccgtcgcccactgccaggtggggacgaggccatcactgccatctgggagacccggctaaaggcccaaccctggctcttcgacgcccccaagttccgcctgcactcagccaccctggcgcctattggctctcgggggccacagctgctcctgcgcctgggccttacttcctaccgagacttcctgggcaccaactggtccagctcagctgcctggctgcgacagcagggtgccaccgactggggtgacacgcaggcctatctggcggacccactgggggtgggcgctgcactagccacagccgatgacttccttgtcttcctgcgccgctcccggcaggtggctgaggcccctgggctggtggacgtacctggtgggcaccctgagcctcaggccctgtgccctggtggcagcccccagcaccaggacctcgctgggcagctggtggtacatgaactcttttccagtgtccttcaggagatctgtgatgaggtgaacctgccgctgctcaccctgagccagcccctgctgttgggcatcgcccgaaatgagaccagtgctggccgagccagtgccgagttctatgtccagtgcagcctgacttctgagcaggtgaggaagcactacctgagtgggggacccgaggcccacgagtctacaggaatcttctttgtggagacacagaacgtgcggagattgcccgagacggagatgtgggctgaactctgcccctcggccaaaggcgccatcatcctctacaaccgggttcagggaagtcccactggagcggccctagggtccccagccctactcccgccgctctgaaaataataaacgactttattcttgg

SEQ ID NO: 290722 - DNA, 999 bp, Homo sapiens
ttccgcttcggggaaggggcggagcctgagggacccggcggctgagctgccccgttcagaccatggatcctgaggtgaccttgctgctgcagtgccctggcgggggcctgccccaggagcagatacaggccgagctgagccccgcccatgaccgtcgcccactgccaggtggggacgaggccatcactgccatctgggagacccggctaaaggcccaaccctggctcttcgacgcccccaagttccgcctgcactcagccaccctggcgcctattggctctcgggggccacagctgctcctgcgcctgggccttacttcctaccgagacttcctgggcaccaactggtccagctcagctgcctggctgcgacagcagggtgccaccgactggggtgacacgcaggcctatctggcggacccactgggggtgggcgctgcactagccacagccgatgacttccttgtcttcctgcgccgctcccggcaggtggctgaggcccctgggctggtggacgtacctggtgggcaccctgagcctcaggccctgtgccctggtggcagcccccagcaccaggacctcgctgggcagctggtggtacatgaactcttttccagtgtccttcaggagatctgtgatgaggtgaacctgccgctgctcaccctgagccagcccctgctgttgggcatcgcccgaaatgagaccagtgctggccgagccagtgccgagttctatgtccagtgcagcctgacttctgagcaggtgaggaagcactacctgagtgggggacccgaggcccacgagtctacaggaatcttctttgtggagacacagaacgtgcggagattgcccgagacggagatgtgggctgaactctgcccctcggccaaaggcgccatcatcctctacaaccgggttcagggaagtcccactggagcggccctagggtccccagccctactcccgccgctctgaaaataataaacgactttattcttgg

SEQ ID NO: 290723 - DNA, 1429 bp, Homo sapiens
ttccgcttcggggaaggggcggagcctgagggacccggcggctggtgagcgcccgctggaggctggagcttccgggccctggaaaggggtccccgcgcgccccgggtcggaggcagacccctgggtttgggggacatgggcatttggggcgcctgaacccaagacctctggatggtagggatgcccgggcgtcctggataccctgcgggactcggggctcctgcggggaagatggcacgttttactgcccaaggagtggtcaggggggtggagaagcgctgcggataccctcaggaggtctgcgacagagggggctagctgcgcagcccaggagtggtagtggcccccctggatgacaggcctggccgtatcctcccccagagctgccccgttcagaccatggatcctgaggtgaccttgctgctgcagtgccctggcgggggcctgccccaggagcagatacaggccgagctgagccccgcccatgaccgtcgcccactgccaggtggggacgaggccatcactgccatctgggagacccggctaaaggcccaaccctggctcttcgacgcccccaagttccgcctgcactcagccaccctggcgcctattggctctcgggggccacagctgctcctgcgcctgggccttacttcctaccgagacttcctgggcaccaactggtccagctcagctgcctggctgcgacagcagggtgccaccgactggggtgacacgcaggcctatctggcggacccactgggggtgggcgctgcactagccacagccgatgacttccttgtcttcctgcgccgctcccggcaggtggctgaggcccctgggctggtggacgtacctggtgggcaccctgagcctcagctggacctctggttgtctgtcagggaaaggacaccagactcaggatcactaactctcttacactgtgccacatcagaccctcaaggccagcaggccctgtgccctggtggcagcccccagcaccaggacctcgctgggcagctggtggtacatgaactcttttccagtgtccttcaggagatctgtgatgaggtgaacctgccgctgctcaccctgagccagcccctgctgttgggcatcgcccgaaatgagaccagtgctggccgagccagtgccgagttctatgtccagtgcagcctgacttctgagcaggtgaggaagcactacctgagtgggggacccgaggcccacgagtctacaggaatcttctttgtggagacacagaacgtgcggagattgcccgagacggagatgtgggctgaactctgcccctcggccaaaggcgccatcatcctctacaaccgggttcagggaagtcccactggagcggccctagggtccccagccctactcccgccgctctgaaaataataaacgactttattcttgg

SEQ ID NO: 290724 - DNA, 1261 bp, Homo sapiens
ttccgcttcggggaaggggcggagcctgagggacccggcggctggtgagcgcccgctggaggctggagcttccgggccctggaaaggggtccccgcgcgccccgggtcggaggcagacccctgggtttgggggacatgggcatttggggcgcctgaacccaagacctctggatgagctgccccgttcagaccatggatcctgaggtgaccttgctgctgcagtgccctggcgggggcctgccccaggagcagatacaggccgagctgagccccgcccatgaccgtcgcccactgccaggtggggacgaggccatcactgccatctgggagacccggctaaaggcccaaccctggctcttcgacgcccccaagttccgcctgcactcagccaccctggcgcctattggctctcgggggccacagctgctcctgcgcctgggccttacttcctaccgagacttcctgggcaccaactggtccagctcagctgcctggctgcgacagcagggtgccaccgactggggtgacacgcaggcctatctggcggacccactgggggtgggcgctgcactagccacagccgatgacttccttgtcttcctgcgccgctcccggcaggtggctgaggcccctgggctggtggacgtacctggtgggcaccctgagcctcaggccctgtgccctggtggcagcccccagcaccaggacctcgctgggcagctggtggtacatgaactcttttccagtgtccttcaggagatctgtgatgaggtgaacctgccgctgctcaccctgagccagcccctgctgttgggcatcgcccgaaatgagaccagtgctggccgagccagtgccgagttctatgtccagtgagtaggctcgggtacatgatcctgggtcttgggaaggtgggtggtgaggagtgggctgaggcagctgtggctccacaggtaccccgcaggggctggtcacccactaagccacccttgtgttcttgtccagtgcagcctgacttctgagcaggtgaggaagcactacctgagtgggggacccgaggcccacgagtctacaggaatcttctttgtggagacacagaacgtgcggagattgcccgagacggagatgtgggctgaactctgcccctcggccaaaggcgccatcatcctctacaaccgggttcagggaagtcccactggagcggccctagggtccccagccctactcccgccgctctgaaaataataaacgactttattcttgg

SEQ ID NO: 290725 - DNA, 981 bp, Homo sapiens
  misc_feature (26)..(27): n is a, c, g, or t
ctgctggtacggccccgcggattttnnggatggaaaggggtccccgcgcgccccgggtcggaggcagacccctgggtttgggggacatgggcatttggggcgcctgaacccaagacctctggatgagctgccccgttcagaccatggatcctgaggtgaccttgctgctgcagtgccctggcgggggcctgccccaggagcagatacaggccgagctgagccccgcccatgaccgtcgcccactgccaggtggggacgaggccatcactgccatctgggagacccggctaaaggcccaaccctggctcttcgacgcccccaagttccgcctgcactcagccaccctggcgcctattggctctcgggggccacagctgctcctgcgcctgggccttacttcctaccgagacttcctgggcaccaactggtccagctcagctgcctggctgcgacagcagggtgccaccgactggggtgacacgcaggcctatctggcggacccactgggggtgggcgctgcactagccacagccgatgacttccttgtcttcctgcgccgctcccggcaggtggctgaggcccctgggctggtggacgtacctggtgggcaccctgagcctcaggtgaacctgccgctgctcaccctgagccagcccctgctgttgggcatcgcccgaaatgagaccagtgctggccgagccagtgccgagttctatgtccagtgcagcctgacttctgagcaggtgaggaagcactacctgagtgggggacccgaggcccacgagtctacaggaatcttctttgtggagacacagaacgtgcggagattgcccgagacggagatgtgggctgaactctgcccctcggccaaaggcgccatcatcctctacaaccgggttcagggaagtcccactggagcggccctagggtccccagccctactcccgccgctctgaaaataataaacgactttattcttgg

SEQ ID NO: 290726 - DNA, 532 bp, Homo sapiens
ttccgcttcggggaaggggcggagcctgagggacccggcggctggtgagcgcccgctggaggctggagcttccgggccctggaaaggggtccccgcgcgccccgggtcggaggcagacccctgggtttgggggacatgggcatttggggcgcctgaacccaagacctctggatggtgaacctgccgctgctcaccctgagccagcccctgctgttgggcatcgcccgaaatgagaccagtgctggccgagccagtgccgagttctatgtccagtgcagcctgacttctgagcaggtgaggaagcactacctgagtgggggacccgaggcccacgagtctacaggaatcttctttgtggagacacagaacgtgcggagattgcccgagacggagatgtgggctgaactctgcccctcggccaaaggcgccatcatcctctacaaccgggttcagggaagtcccactggagcggccctagggtccccagccctactcccgccgctctgaaaataataaacgactttattcttgg

SEQ ID NO: 290727 - DNA, 935 bp, Homo sapiens
agagcggcaggtagaaggcgcctacggtggagaacacggcgtaggaaggctcgcggcttacctggcactcctcgctgccctcagagtacgtctctccccagccaaaaagcagcggggccagagagatgacagcggagagtgcccaggtgagcgcgatcatgacgttggagacgcacttgcgggtgcggagcgtgtattccatgtggcgcgtgatggaccagtagcggtccagggctatggccgtcacgttccagatgctggccgtgcagcaaagcacgtcgcacgcgatccaaagctggcacagcctccgacctagctgccagcggcgcccggacagctcgtgcaccaggctcagcggcatgaccagcgcggccaccaggacatccgagacggccatggatgccaccaggttgtggggcacgcggtggaaggtgcgtacacggaggatggtcgccagcaccagcaggttccaggcgaacgtcgccgccaccagaaagcccagcaagagtaaaacaagtatcaggagaatgcactgagaaaagagaaagtcctccactggaacctagaggacgggacaacatcattaaataccggattattcacagggctgtttcaaacaccacttaaaaacagctgatggtgactgcctgcatgcagagcaactgtgcatggccccaatctggaagcaagcttgtgcttctttaaggcaaatcaccttcttgaggtcatggaactaatgggaatgagatgtaaactatgaatcctcttctttggaacaagttctgcatctagtctcagggcctgttatctggaggaatggatgaactgtgttgcccacaggcgggcctcaatggatctctatgaatcttgaaaggcattatgggcttgtgattatattccctactgattccccaggccacagctgtctgtattga

SEQ ID NO: 290728 - DNA, 455 bp, Homo sapiens
gtcagaccctgtctcatggaaaaaaaaagacgtttgcatgaatattttaaattcctttttttccccttaatcacacagcattggcatcaacaaaagtcagaattcccgggaacttgaacagaggctgctaaattcccagtaattgctcctttggccttctagggactgacttcaaagaaggaaggaaagaatcaggcaggtaaagctttccgtgtcttgttcttactgccaggccatctatctcggtccccacgggcagcaccagggagtgaggctggcaacagagcaggggaagggccctgtctggacctgaagccatgggggcacaatggagagttttctttctgtgagaaacgctgtttactgatctggacactgggtgcttgttctcaacaatatgcctttgagttccagcttcacttaacccagcttacctcacccgtggtaccgactgt

SEQ ID NO: 290729 - DNA, 2630 bp, Homo sapiens
  misc_feature (2308)..(2308): n is a, c, g, or t
  misc_feature (2323)..(2323): n is a, c, g, or t
tgcatcatcgccgctgactgcatcaacgccgcgctttgttctgtccccggtgtgtgggtctgtgacagggtccaacagggcctggtccgtgtccggtcccccaaatctgtcgtccctgcccccaggcattggcatcaacaaaagtcagaattcccgggaacttgaacagaggctgctaaattcccagtaattgctcctttggccttctagggactgacttcaaagaaggaaggaaagaatcaggcagtgcttcctcattctcttttaaaacccgcttcccgctgagtctgcacccaggagaccagagagcaccttgcccttccatggaaactcaggctgatctcgtatctcaggaacctcaggccctgcttgacagtgctcttccttcaaaagttcctgccttttccgacaaggacagcctgggggatgagatgttggcggctgcgctcctaaaggccaagtcccaggagctggtaacctttgaggatgtagctgtgtacttcatccggaaggagtggaagcgtttggaacctgctcagagggacctctatagagatgtgatgctggagaattacgggaatgtgttctcactggatcgtgagaccaggactgaaaatgatcaagaaatttctgaagacacaagatcacatggggtcctactgggaagatttcaaaaggatatttctcagggtctcaagtttaaagaagcctatgaacgagaagtcagtctgaaaaggccgctggggaactcccctggagaaagactgaacaggaaaatgccagattttggtcaagtgacagttgaggagaagctaacccccaggggagagagaagcgagaaatataatgattttgggaacagcttcactgtgaattccaaccttatctcacatcagagactccccgtgggagacagaccccataagtgtgatgaatgtagcaagagctttaatcgaacttcagaccttattcaacatcagagaatccacactggggaaaagccctatgaatgtaatgagtgtgggaaggccttcagccagagctcacaccttattcagcatcagagaatccacactggggaaaaaccttatgaatgtagtgattgtgggaaaaccttcagctgtagctctgccctcattctgcatcggaggatccacacgggggagaaaccctatgaatgtaatgagtgtgggaagaccttcagctggagctccaccctcacccaccatcagagaatccacactggtgagaaaccctacgcctgcaatgaatgtgggaaggccttcagcaggagctcaacccttattcaccatcagagaatccacactggagaaaaaccctatgaatgtaatgaatgtgggaaagccttcagccagagctcacacctctatcagcaccagagaatccacactggagagaagccctacgaatgtatggaatgtggaggaaagtttacctacagttcaggccttattcagcatcaaagaatccacaccggggagaacccctatgaatgtagtgagtgtgggaaagccttcaggtacagctcggctcttgttcgccatcagagaattcacactggagagaagcctttgaatgggatcggcatgagcaaaagctccctcagagttacgaccgagttaaatatcagagagtccacgtgaaagagccacacacccattttcctcactttccctgagtctcaagagctcttgccttaccctataaatctcaacagcttaggatgtgtccctttcaactcagacttttcattttagagaatggggcagatggggcaaatcgttgaattttcccagaaatcacaccagccttagaaagcgtcaaggcaagtggatggcgtgctgggaatagaaagcagctctgggaccagttaccccatttaggaaaggagtttgcactaaactgtttttctcacagcagaggaacctttccaaggtggggatggaagcacagtcgggacagaattcgatggattcctttagttggagtccgcgtagtcagcacagacagcagtggaaaggacgctctgggtcctgttatttgctagggagggtaaagggagactatttcaaagctactgttcctagtccagctttaagtttcggtaagaaacatgctgttttgtttcatgatttcgttaattatggaaatttggcattgagggattattttattgagggtagaagagattccagaatcatcatctgtgatgatggtgtcctttagggctcttggagcagccagaccatgtttccaagagaaacctggtgatattgccagcagaccncctgccatccccccnagttgtcctggggctgaatgggcaaatctgtccaaacagctagtaaccggctgtgagggagagggtcagaagcacttagcgttggcctctgattgctgtcctctcttgtcctcttcccactccaatgatgaaaatgattttctctaaatgcctgggtaaggatgctttcaaggagctcacttggcctgcttgccctgccctctcacctctgacacccagccccaggagccagaccactcctgcctccacctctgactcttcagcagctgaagattaatgcagagaaagagcaaagcccaaaagggag

SEQ ID NO: 290730 - DNA, 2539 bp, Homo sapiens
  misc_feature (2161)..(2161): n is a, c, g, or t
  misc_feature (2170)..(2170): n is a, c, g, or t
  misc_feature (2173)..(2174): n is a, c, g, or t
  misc_feature (2189)..(2189): n is a, c, g, or t
  misc_feature (2191)..(2191): n is a, c, g, or t
tgcatcatcgccgctgactgcatcaacgccgcgctttgttctgtccccggtgtgtgggtctgtgacagggtccaacagggcctggtccgtgtccggtcccccaaatctgtcgtccctgcccccaggcattggcatcaacaaaagtcagaattcccgggaacttgaacagaggctgctaaattcccagtaattgctcctttggccttctagggactgacttcaaagaaggaaggaaagaatcaggcagtgcttcctcattctcttttaaaacccgcttcccgctgagtctgcacccaggagaccagagagcaccttgcccttccatggaaactcaggctgatctcgtatctcaggaacctcaggccctgcttgacagtgctcttccttcaaaagttcctgccttttccgacaaggacagcctgggggatgagatgttggcggctgcgctcctaaaggccaagtcccaggagctggtaacctttgaggatgtagctgtgtacttcatccggaaggagtggaagcgtttggaacctgctcagagggacctctatagagatgtgatgctggagaattacgggaatgtgttctcactggatcgtgagaccaggactgaaaatgatcaagaaatttctgaagacacaagatcacatggggtcctactgggaagatttcaaaaggatatttctcagggtctcaagtttaaagaagcctatgaacgagaagtcagtctgaaaaggccgctggggaactcccctggagaaagactgaacaggaaaatgccagattttggtcaagtgacagttgaggagaagctaacccccaggggagagagaagcgagaaatataatgattttgggaacagcttcactgtgaattccaaccttatctcacatcagagactccccgtgggagacagaccccataagtgtgatgaatgtagcaagagctttaatcgaacttcagaccttattcaacatcagagaatccacactggggaaaagccctatgaatgtaatgagtgtgggaaggccttcagccagagctcacaccttattcagcatcagagaatccacactggggaaaaaccttatgaatgtagtgattgtgggaaaaccttcagctgtagctctgccctcattctgcatcggaggatccacacgggggagaaaccctatgaatgtaatgagtgtgggaagaccttcagctggagctccaccctcacccaccatcagagaatccacactggtgagaaaccctacgcctgcaatgaatgtgggaaggccttcagcaggagctcaacccttattcaccatcagagaatccacactgaagctcttcccacattcgttacactgataaggcttctccccagtgtggatccgatagtgacgaatgaggctgcctttcccgctgaaagccttgccacaatctttgcactgatatggcgcctcttctgtgtgcattctctgatgtttaagaaggtctgagctctgcccaaaagcttttccacacttacagtcatagggccggtccaccaagtgtgttctgtagtggagggtgaggtttgagctgtggctgaaagctttcccacacttggtgcacacgtaaggtttctccccagtgtgtgttctcctgtgtttggtgagatttgagctattactaaaggctttgccacattcagcacatatataacgtctctctcctggggtaggtttagtaggaactgattctctacctttcttggagcctgcctcttgaagagggggttttgttcctttttcattttcaaggtttacgcactgcctctctaagctggcctcaggtttattggcgataatcacagaaattatatcccctttgagcccctctgcttcagaacctttctgctcatctgctgattcctcgtgctgggtactcaatctgcaatctgaaacaataagcagattaaggatacttcagttgtttcttgttctgaggaagaaactgttaccagagagatagaaccatcaggtgagactgatggtttctgaagggtgactaaacagagctcatgatagcgcatagatacaagtaaatcagcatccaatctagtttacaatactgcacttctttttttttttgagatggagtctcgctgtcagcaggctggaatgcagtgagntgagatgcnccnntgcactccagcctgngngacagagtgaaattccgtcttaagaaaaataaagaaaatttaaaaataccgggcgcggtggctcacgcctgtaatcccagctctcagggaggcaacaggtgggaggatagcttgagcccaggagttccagacctgcctgggcaatatagcgagaccctgttctccacaaaaaggaaaaaaaaaaaattaaaaaataaaagacaataaaagactagtcccagttgccacatttcttctcactgtacctgggtactcactgaaatactagctcccatctttctgtctacaggaggttttttcgaattatctttgaaccttgaacttttgcttctgcagtgcttccggtcg

SEQ ID NO: 290731 - DNA, 2434 bp, Homo sapiens
tgcatcatcgccgctgactgcatcaacgccgcgctttgttctgtccccggtgtgtgggtctgtgacagggtccaacagggcctggtccgtgtccggtcccccaaatctgtcgtccctgcccccaggcattggcatcaacaaaagtcagaattcccgggaacttgaacagaggctgctaaattcccagtaattgctcctttggccttctagggactgacttcaaagaaggaaggaaagaatcaggcagtgcttcctcattctcttttaaaacccgcttcccgctgagtctgcacccaggagaccagagagcaccttgcccttccatggaaactcaggctgatctcgtatctcaggaacctcaggccctgcttgacagtgctcttccttcaaaagttcctgccttttccgacaaggacagcctgggggatgagatgttggcggctgcgctcctaaaggccaagtcccaggagctggtaacctttgaggatgtagctgtgtacttcatccggaaggagtggaagcgtttggaacctgctcagagggacctctatagagatgtgatgctggagaattacgggaatgtgttctcactggatcgtgagaccaggactgaaaatgatcaagaaatttctgaagacacaagatcacatggggtcctactgggaagatttcaaaaggatatttctcagggtctcaagtttaaagaagcctatgaacgagaagtcagtctgaaaaggccgctggggaactcccctggagaaagactgaacaggaaaatgccagattttggtcaagtgacagttgaggagaagctaacccccaggggagagagaagcgagaaatataatgattttgggaacagcttcactgtgaattccaaccttatctcacatcagagactccccgtgggagacagaccccataagtgtgatgaatgtagcaagagctttaatcgaacttcagaccttattcaacatcagagaatccacactggggaaaagccctatgaatgtaatgagtgtgggaaggccttcagccagagctcacaccttattcagcatcagagaatccacactggggaaaaaccttatgaatgtagtgattgtgggaaaaccttcagctgtagctctgccctcattctgcatcggaggatccacacgggggagaaaccctatgaatgtaatgagtgtgggaagaccttcagctggagctccaccctcacccaccatcagagaatccacactggtgagaaaccctacgcctgcaatgaatgtgggaaggccttcagcaggagctcaacccttattcaccatcagagaatccacactgaagctcttcccacattcgttacactgataaggcttctccccagtgtggatccgatagtgacgaatgaggctgcctttcccgctgaaagccttgccacaatctttgcactgatatggcgcctcttctgtgtgcattctctgatgtttaagaaggtctgagctctgcccaaaagcttttccacacttacagtcatagggccggtccaccaagtgtgttctgtagtggagggtgaggtttgagctgtggctgaaagctttcccacacttggtgcacacgtaaggtttctccccagtgtgtgttctcctgtgtttggtgagatttgagctattactaaaggctttgccacattcagcacatatataacgtctctctcctggggtaggtttagtaggaactgattctctacctttcttggagcctgcctcttgaagagggggttttgttcctttttcattttcaaggtttacgcactgcctctctaagctggcctcaggtttattggcgataatcacagaaattatatcccctttgagcccctctgcttcagaacctttctgctcatctgctgattcctcgtgctgggtactcaatctgcaatctgaaacaataagcagattaaggatacttcagttgtttcttgttctgaggaagaaactgttaccagagagatagaaccatcaggtgagactgatggtttctgaagggtgactaaacagagctcatgatagcgcatagatacaagtaaatcagcatccaatctagtttacaatactgcacttctttttttttttgagatggagtctcgctgtcagcaggctggaatgcaggtgacctcagctcactgcaacctccaactccctgattcaagcgattctcctgcctcagcctccagagtagctggaattacaggcacgtgccaccacacccagctattttttgtatttttttttagtagagatggggtttcaacatgctggccaggatggtcttgatctcctgacctcaggtgatccgcctgcctcagcctcccagagtgctgggattataggcatgagccaccaggcctggcctccataccacactttcacacaattccccacccgaa

SEQ ID NO: 290732 - DNA, 2502 bp, Homo sapiens
  misc_feature (2124)..(2124): n is a, c, g, or t
  misc_feature (2133)..(2133): n is a, c, g, or t
  misc_feature (2136)..(2137): n is a, c, g, or t
  misc_feature (2152)..(2152): n is a, c, g, or t
  misc_feature (2154)..(2154): n is a, c, g, or t
cggtatgatattcaccaccgcgtcgggtctggagcctcagaatgctggtccgtgtccggtcccccaaatctgtcgtccctgcccccaggcattggcatcaacaaaagtcagaattcccgggaacttgaacagaggctgctaaattcccagtaattgctcctttggccttctagggactgacttcaaagaaggaaggaaagaatcaggcagtgcttcctcattctcttttaaaacccgcttcccgctgagtctgcacccaggagaccagagagcaccttgcccttccatggaaactcaggctgatctcgtatctcaggaacctcaggccctgcttgacagtgctcttccttcaaaagttcctgccttttccgacaaggacagcctgggggatgagatgttggcggctgcgctcctaaaggccaagtcccaggagctggtaacctttgaggatgtagctgtgtacttcatccggaaggagtggaagcgtttggaacctgctcagagggacctctatagagatgtgatgctggagaattacgggaatgtgttctcactggatcgtgagaccaggactgaaaatgatcaagaaatttctgaagacacaagatcacatggggtcctactgggaagatttcaaaaggatatttctcagggtctcaagtttaaagaagcctatgaacgagaagtcagtctgaaaaggccgctggggaactcccctggagaaagactgaacaggaaaatgccagattttggtcaagtgacagttgaggagaagctaacccccaggggagagagaagcgagaaatataatgattttgggaacagcttcactgtgaattccaaccttatctcacatcagagactccccgtgggagacagaccccataagtgtgatgaatgtagcaagagctttaatcgaacttcagaccttattcaacatcagagaatccacactggggaaaagccctatgaatgtaatgagtgtgggaaggccttcagccagagctcacaccttattcagcatcagagaatccacactggggaaaaaccttatgaatgtagtgattgtgggaaaaccttcagctgtagctctgccctcattctgcatcggaggatccacacgggggagaaaccctatgaatgtaatgagtgtgggaagaccttcagctggagctccaccctcacccaccatcagagaatccacactggtgagaaaccctacgcctgcaatgaatgtgggaaggccttcagcaggagctcaacccttattcaccatcagagaatccacactgaagctcttcccacattcgttacactgataaggcttctccccagtgtggatccgatagtgacgaatgaggctgcctttcccgctgaaagccttgccacaatctttgcactgatatggcgcctcttctgtgtgcattctctgatgtttaagaaggtctgagctctgcccaaaagcttttccacacttacagtcatagggccggtccaccaagtgtgttctgtagtggagggtgaggtttgagctgtggctgaaagctttcccacacttggtgcacacgtaaggtttctccccagtgtgtgttctcctgtgtttggtgagatttgagctattactaaaggctttgccacattcagcacatatataacgtctctctcctggggtaggtttagtaggaactgattctctacctttcttggagcctgcctcttgaagagggggttttgttcctttttcattttcaaggtttacgcactgcctctctaagctggcctcaggtttattggcgataatcacagaaattatatcccctttgagcccctctgcttcagaacctttctgctcatctgctgattcctcgtgctgggtactcaatctgcaatctgaaacaataagcagattaaggatacttcagttgtttcttgttctgaggaagaaactgttaccagagagatagaaccatcaggtgagactgatggtttctgaagggtgactaaacagagctcatgatagcgcatagatacaagtaaatcagcatccaatctagtttacaatactgcacttctttttttttttgagatggagtctcgctgtcagcaggctggaatgcagtgagntgagatgcnccnntgcactccagcctgngngacagagtgaaattccgtcttaagaaaaataaagaaaatttaaaaataccgggcgcggtggctcacgcctgtaatcccagctctcagggaggcaacaggtgggaggatagcttgagcccaggagttccagacctgcctgggcaatatagcgagaccctgttctccacaaaaaggaaaaaaaaaaaattaaaaaataaaagacaataaaagactagtcccagttgccacatttcttctcactgtacctgggtactcactgaaatactagctcccatctttctgtctacaggaggttttttcgaattatctttgaaccttgaacttttgcttctgcagtgcttccggtcg

SEQ ID NO: 290733 - DNA, 2421 bp, Homo sapiens
  misc_feature (2043)..(2043): n is a, c, g, or t
  misc_feature (2052)..(2052): n is a, c, g, or t
  misc_feature (2055)..(2056): n is a, c, g, or t
  misc_feature (2071)..(2071): n is a, c, g, or t
  misc_feature (2073)..(2073): n is a, c, g, or t
tgcatcatcgccgctgactgcatcaacgccgcgctttgttctgtccccggtgtgtgggtctgtgacagggtccaacagggcctggtccgtgtccggtcccccaaatctgtcgtccctgcccccaggcagtgcttcctcattctcttttaaaacccgcttcccgctgagtctgcacccaggagaccagagagcaccttgcccttccatggaaactcaggctgatctcgtatctcaggaacctcaggccctgcttgacagtgctcttccttcaaaagttcctgccttttccgacaaggacagcctgggggatgagatgttggcggctgcgctcctaaaggccaagtcccaggagctggtaacctttgaggatgtagctgtgtacttcatccggaaggagtggaagcgtttggaacctgctcagagggacctctatagagatgtgatgctggagaattacgggaatgtgttctcactggatcgtgagaccaggactgaaaatgatcaagaaatttctgaagacacaagatcacatggggtcctactgggaagatttcaaaaggatatttctcagggtctcaagtttaaagaagcctatgaacgagaagtcagtctgaaaaggccgctggggaactcccctggagaaagactgaacaggaaaatgccagattttggtcaagtgacagttgaggagaagctaacccccaggggagagagaagcgagaaatataatgattttgggaacagcttcactgtgaattccaaccttatctcacatcagagactccccgtgggagacagaccccataagtgtgatgaatgtagcaagagctttaatcgaacttcagaccttattcaacatcagagaatccacactggggaaaagccctatgaatgtaatgagtgtgggaaggccttcagccagagctcacaccttattcagcatcagagaatccacactggggaaaaaccttatgaatgtagtgattgtgggaaaaccttcagctgtagctctgccctcattctgcatcggaggatccacacgggggagaaaccctatgaatgtaatgagtgtgggaagaccttcagctggagctccaccctcacccaccatcagagaatccacactggtgagaaaccctacgcctgcaatgaatgtgggaaggccttcagcaggagctcaacccttattcaccatcagagaatccacactgaagctcttcccacattcgttacactgataaggcttctccccagtgtggatccgatagtgacgaatgaggctgcctttcccgctgaaagccttgccacaatctttgcactgatatggcgcctcttctgtgtgcattctctgatgtttaagaaggtctgagctctgcccaaaagcttttccacacttacagtcatagggccggtccaccaagtgtgttctgtagtggagggtgaggtttgagctgtggctgaaagctttcccacacttggtgcacacgtaaggtttctccccagtgtgtgttctcctgtgtttggtgagatttgagctattactaaaggctttgccacattcagcacatatataacgtctctctcctggggtaggtttagtaggaactgattctctacctttcttggagcctgcctcttgaagagggggttttgttcctttttcattttcaaggtttacgcactgcctctctaagctggcctcaggtttattggcgataatcacagaaattatatcccctttgagcccctctgcttcagaacctttctgctcatctgctgattcctcgtgctgggtactcaatctgcaatctgaaacaataagcagattaaggatacttcagttgtttcttgttctgaggaagaaactgttaccagagagatagaaccatcaggtgagactgatggtttctgaagggtgactaaacagagctcatgatagcgcatagatacaagtaaatcagcatccaatctagtttacaatactgcacttctttttttttttgagatggagtctcgctgtcagcaggctggaatgcagtgagntgagatgcnccnntgcactccagcctgngngacagagtgaaattccgtcttaagaaaaataaagaaaatttaaaaataccgggcgcggtggctcacgcctgtaatcccagctctcagggaggcaacaggtgggaggatagcttgagcccaggagttccagacctgcctgggcaatatagcgagaccctgttctccacaaaaaggaaaaaaaaaaaattaaaaaataaaagacaataaaagactagtcccagttgccacatttcttctcactgtacctgggtactcactgaaatactagctcccatctttctgtctacaggaggttttttcgaattatctttgaaccttgaacttttgcttctgcagtgcttccggtcg

SEQ ID NO: 290734 - DNA, 1471 bp, Homo sapiens
tgcatcatcgccgctgactgcatcaacgccgcgctttgttctgtccccggtgtgtgggtctgtgacagggtccaacagggcctggtccgtgtccggtcccccaaatctgtcgtccctgcccccaggcattggcatcaacaaaagtcagaattcccgggaacttgaacagaggctgctaaattcccagtaattgctcctttggccttctagggactgacttcaaagaaggaaggaaagaatcaggcagtgcttcctcattctcttttaaaacccgcttcccgctgagtctgcacccaggagaccagagagcaccttgcccttccatggaaactcaggctgatctcgtatctcaggaacctcaggccctgcttgacagtgctcttccttcaaaagttcctgccttttccgacaaggacagcctgggggatgagatgttggcggctgcgctcctaaaggccaagtcccaggagctggtaacctttgaggatgtagctgtgtacttcatccggaaggagtggaagcgtttggaacctgctcagagggacctctatagagatgtgatgctggagaattacgggaatgtgttctcactggactggatacacgtctgtttaactacgcaaaaggtaatgctggcatggcttactgggaccctaagtgtggcgaagggactctgctccagtgaactggcgagtgtggaacctcctgacaccttctgaggacctcctgcctgccatgttgctgtggagctcgcactcctcaggcatcccctgatgttgagtgatacaaactctatcaccggaatcgatgctgctgcaatgacaagacttctttctggttttcagattctaaagtttaaaacaacgacaacaacaggagcgcttgaaagttacggtgcttctccctctccagtgtggactcgctgatgtttggaaagattggacttgctacagaaggtctttccacagtgatgacaccagtagggcttttccccggtgtggattctgtggtgtttattgaagttggagctgtggttgaaggctttcccacactccttacacttatatggcttctctccggtgtggagtctctggtgggagctgaggcccgcatgctgactgaagctcttcccacattcgttacactgataaggcttctccccagtgtggatccgatagtgacgaatgaggctgcctttcccgctgaaagccttgccacaatctttgcactgatatggcgcctcttctgtgtgcattctctgatgtttaagaaggtctgagctctgcccaaaagcttttccacacttacagtcatagggccggtccaccaagtgtgttctgtagtggagggtgaggtttgagctgtggctgaaagctttcccacacttggtgcacacgtaaggtttctccccagtgtgtgttctcctgtgtttggtgagatttgagctattactaaaggctttgccacattc

SEQ ID NO: 290735 - DNA, 2611 bp, Homo sapiens
  misc_feature (2233)..(2233): n is a, c, g, or t
  misc_feature (2242)..(2242): n is a, c, g, or t
  misc_feature (2245)..(2246): n is a, c, g, or t
  misc_feature (2261)..(2261): n is a, c, g, or t
  misc_feature (2263)..(2263): n is a, c, g, or t
tgcatcatcgccgctgactgcatcaacgccgcgctttgttctgtccccggtgtgtgggtctgtgacagggtccaacagggcctggtccgtgtccggtcccccaaatctgtcgtccctgcccccaggcattggcatcaacaaaagtcagaattcccgggaacttgaacagaggctgctaaattcccagtaattgctcctttggccttctagggactgacttcaaagaaggaaggaaagaatcaggcagtgcttcctcattctcttttaaaacccgcttcccgctgagtctgcacccaggagaccagagagcaccttgcccttccatggaaactcaggctgatctcgtatctcaggaacctcaggccctgcttgacagtgctcttccttcaaaagttcctgccttttccgacaaggacagcctgggggatgagatgttggcggctgcgctcctaaaggccaagtcccaggtgagctgtggttccgtttatccttttcctttccattttctgtgcaatgacatcccattcagagctttaaaccctgatctcctccatcaggcccatggttctgtcctgctgaatcatggaccctcaccttctatcttggactcctgtctctcttcctccaccctgtcctcccttcctcccttcccaaatgtgcatttttcaccccatcctcagtgatttttttggtgccgccattcacattcctcaccctgaaattgcatgccagcacgtgttgtttcaggagctggtaacctttgaggatgtagctgtgtacttcatccggaaggagtggaagcgtttggaacctgctcagagggacctctatagagatgtgatgctggagaattacgggaatgtgttctcactggactggatacacgtctgtttaactacgcaaaaggtaatgctggcatggcttactgggaccctaagtgtggcgaagggactctgctccagtgaactggcgagtgtggaacctcctgacaccttctgaggacctcctgcctgccatgttgctgtggagctcgcactcctcaggcatcccctgatgttgagtgatacaaactctatcaccggaatcgatgctgctgcaatgacaagacttctttctggttttcagattctaaagtttaaaacaacgacaacaacaggagcgcttgaaagttacggtgcttctccctctccagtgtggactcgctgatgtttggaaagattggacttgctacagaaggtctttccacagtgatgacaccagtagggcttttccccggtgtggattctgtggtgtttattgaagttggagctgtggttgaaggctttcccacactccttacacttatatggcttctctccggtgtggagtctctggtgggagctgaggcccgcatgctgactgaagctcttcccacattcgttacactgataaggcttctccccagtgtggatccgatagtgacgaatgaggctgcctttcccgctgaaagccttgccacaatctttgcactgatatggcgcctcttctgtgtgcattctctgatgtttaagaaggtctgagctctgcccaaaagcttttccacacttacagtcatagggccggtccaccaagtgtgttctgtagtggagggtgaggtttgagctgtggctgaaagctttcccacacttggtgcacacgtaaggtttctccccagtgtgtgttctcctgtgtttggtgagatttgagctattactaaaggctttgccacattcagcacatatataacgtctctctcctggggtaggtttagtaggaactgattctctacctttcttggagcctgcctcttgaagagggggttttgttcctttttcattttcaaggtttacgcactgcctctctaagctggcctcaggtttattggcgataatcacagaaattatatcccctttgagcccctctgcttcagaacctttctgctcatctgctgattcctcgtgctgggtactcaatctgcaatctgaaacaataagcagattaaggatacttcagttgtttcttgttctgaggaagaaactgttaccagagagatagaaccatcaggtgagactgatggtttctgaagggtgactaaacagagctcatgatagcgcatagatacaagtaaatcagcatccaatctagtttacaatactgcacttctttttttttttgagatggagtctcgctgtcagcaggctggaatgcagtgagntgagatgcnccnntgcactccagcctgngngacagagtgaaattccgtcttaagaaaaataaagaaaatttaaaaataccgggcgcggtggctcacgcctgtaatcccagctctcagggaggcaacaggtgggaggatagcttgagcccaggagttccagacctgcctgggcaatatagcgagaccctgttctccacaaaaaggaaaaaaaaaaaattaaaaaataaaagacaataaaagactagtcccagttgccacatttcttctcactgtacctgggtactcactgaaatactagctcccatctttctgtctacaggaggttttttcgaattatctttgaaccttgaacttttgcttctgcagtgcttccggtcg

SEQ ID NO: 290736 - DNA, 2403 bp, Homo sapiens
  misc_feature (2025)..(2025): n is a, c, g, or t
  misc_feature (2034)..(2034): n is a, c, g, or t
  misc_feature (2037)..(2038): n is a, c, g, or t
  misc_feature (2053)..(2053): n is a, c, g, or t
  misc_feature (2055)..(2055): n is a, c, g, or t
tgcatcatcgccgctgactgcatcaacgccgcgctttgttctgtccccggtgtgtgggtctgtgacagggtccaacagggcctggtccgtgtccggtcccccaaatctgtcgtccctgcccccaggcattggcatcaacaaaagtcagaattcccgggaacttgaacagaggctgctaaattcccagtaattgctcctttggccttctagggactgacttcaaagaaggaaggaaagaatcaggcagtgcttcctcattctcttttaaaacccgcttcccgctgagtctgcacccaggagaccagagagcaccttgcccttccatggaaactcaggctgatctcgtatctcaggaacctcaggccctgcttgacagtggtgaggaataaggactcattcattcttttactcagtcattctgcaatcatccattgaaatcgctcacttacgctcttccttcaaaagttcctgccttttccgacaaggacagcctgggggatgagatgttggcggctgcgctcctaaaggccaagtcccaggagctggtaacctttgaggatgtagctgtgtacttcatccggaaggagtggaagcgtttggaacctgctcagagggacctctatagagatgtgatgctggagaattacgggaatgtgttctcactggactggatacacgtctgtttaactacgcaaaaggtaatgctggcatggcttactgggaccctaagtgtggcgaagggactctgctccagtgaactggcgagtgtggaacctcctgacaccttctgaggacctcctgcctgccatgttgctgtggagctcgcactcctcaggcatcccctgatgttgagtgatacaaactctatcaccggaatcgatgctgctgcaatgacaagacttctttctggttttcagattctaaagtttaaaacaacgacaacaacaggagcgcttgaaagttacggtgcttctccctctccagtgtggactcgctgatgtttggaaagattggacttgctacagaaggtctttccacagtgatgacaccagtagggcttttccccggtgtggattctgtggtgtttattgaagttggagctgtggttgaaggctttcccacactccttacacttatatggcttctctccggtgtggagtctctggtgggagctgaggcccgcatgctgactgaagctcttcccacattcgttacactgataaggcttctccccagtgtggatccgatagtgacgaatgaggctgcctttcccgctgaaagccttgccacaatctttgcactgatatggcgcctcttctgtgtgcattctctgatgtttaagaaggtctgagctctgcccaaaagcttttccacacttacagtcatagggccggtccaccaagtgtgttctgtagtggagggtgaggtttgagctgtggctgaaagctttcccacacttggtgcacacgtaaggtttctccccagtgtgtgttctcctgtgtttggtgagatttgagctattactaaaggctttgccacattcagcacatatataacgtctctctcctggggtaggtttagtaggaactgattctctacctttcttggagcctgcctcttgaagagggggttttgttcctttttcattttcaaggtttacgcactgcctctctaagctggcctcaggtttattggcgataatcacagaaattatatcccctttgagcccctctgcttcagaacctttctgctcatctgctgattcctcgtgctgggtactcaatctgcaatctgaaacaataagcagattaaggatacttcagttgtttcttgttctgaggaagaaactgttaccagagagatagaaccatcaggtgagactgatggtttctgaagggtgactaaacagagctcatgatagcgcatagatacaagtaaatcagcatccaatctagtttacaatactgcacttctttttttttttgagatggagtctcgctgtcagcaggctggaatgcagtgagntgagatgcnccnntgcactccagcctgngngacagagtgaaattccgtcttaagaaaaataaagaaaatttaaaaataccgggcgcggtggctcacgcctgtaatcccagctctcagggaggcaacaggtgggaggatagcttgagcccaggagttccagacctgcctgggcaatatagcgagaccctgttctccacaaaaaggaaaaaaaaaaaattaaaaaataaaagacaataaaagactagtcccagttgccacatttcttctcactgtacctgggtactcactgaaatactagctcccatctttctgtctacaggaggttttttcgaattatctttgaaccttgaacttttgcttctgcagtgcttccggtcg

SEQ ID NO: 290737 - DNA, 2819 bp, Homo sapiens
  misc_feature (2441)..(2441): n is a, c, g, or t
  misc_feature (2450)..(2450): n is a, c, g, or t
  misc_feature (2453)..(2454): n is a, c, g, or t
  misc_feature (2469)..(2469): n is a, c, g, or t
  misc_feature (2471)..(2471): n is a, c, g, or t
tgcatcatcgccgctgactgcatcaacgccgcgctttgttctgtccccggtgtgtgggtctgtgacagggtccaacagggcctggtccgtgtccggtcccccaaatctgtcgtccctgcccccaggcattggcatcaacaaaagtcagaattcccgggaacttgaacagaggctgctaaattcccagtaattgctcctttggccttctagggactgacttcaaagaaggaaggaaagaatcaggcagtgcttcctcattctcttttaaaacccgcttcccgctgagtctgcacccaggagaccagagagcaccttgcccttccatggaaactcaggctgatctcgtatctcaggaacctcaggccctgcttgacagtgctcttccttcaaaagttcctgccttttccgacaaggacagcctgggggatgagatgttggcggctgcgctcctaaaggccaagtcccaggtgagctgtggttccgtttatccttttcctttccattttctgtgcaatgacatcccattcagagctttaaaccctgatctcctccatcaggcccatggttctgtcctgctgaatcatggaccctcaccttctatcttggactcctgtctctcttcctccaccctgtcctcccttcctcccttcccaaatgtgcatttttcaccccatcctcagtgatttttttggtgccgccattcacattcctcaccctgaaattgcatgccagcacgtgttgtttcaggagctggtaacctttgaggatgtagctgtgtacttcatccggaaggagtggaagcgtttggaacctgctcagagggacctctatagagatgtgatgctggagaattacgggaatgtgttctcactggatcgtgagaccaggactgaaaatgatcaagaaatttctgaagacacaagatcacatggggtcctactgggaagatttcaaaaggatatttctcagggtctcaagtttaaagaagcctatgaacgagaagtcagtctgaaaaggccgctggggaactcccctggagaaagactgaacaggaaaatgccagattttggtcaagtgacagttgaggagaagctaacccccaggggagagagaagcgagaaatataatgattttgggaacagcttcactgtgaattccaaccttatctcacatcagagactccccgtgggagacagaccccataagtgtgatgaatgtagcaagagctttaatcgaacttcagaccttattcaacatcagagaatccacactggggaaaagccctatgaatgtaatgagtgtgggaaggccttcagccagagctcacaccttattcagcatcagagaatccacactggggaaaaaccttatgaatgtagtgattgtgggaaaaccttcagctgtagctctgccctcattctgcatcggaggatccacacgggggagaaaccctatgaatgtaatgagtgtgggaagaccttcagctggagctccaccctcacccaccatcagagaatccacactggtgagaaaccctacgcctgcaatgaatgtgggaaggccttcagcaggagctcaacccttattcaccatcagagaatccacactgaagctcttcccacattcgttacactgataaggcttctccccagtgtggatccgatagtgacgaatgaggctgcctttcccgctgaaagccttgccacaatctttgcactgatatggcgcctcttctgtgtgcattctctgatgtttaagaaggtctgagctctgcccaaaagcttttccacacttacagtcatagggccggtccaccaagtgtgttctgtagtggagggtgaggtttgagctgtggctgaaagctttcccacacttggtgcacacgtaaggtttctccccagtgtgtgttctcctgtgtttggtgagatttgagctattactaaaggctttgccacattcagcacatatataacgtctctctcctggggtaggtttagtaggaactgattctctacctttcttggagcctgcctcttgaagagggggttttgttcctttttcattttcaaggtttacgcactgcctctctaagctggcctcaggtttattggcgataatcacagaaattatatcccctttgagcccctctgcttcagaacctttctgctcatctgctgattcctcgtgctgggtactcaatctgcaatctgaaacaataagcagattaaggatacttcagttgtttcttgttctgaggaagaaactgttaccagagagatagaaccatcaggtgagactgatggtttctgaagggtgactaaacagagctcatgatagcgcatagatacaagtaaatcagcatccaatctagtttacaatactgcacttctttttttttttgagatggagtctcgctgtcagcaggctggaatgcagtgagntgagatgcnccnntgcactccagcctgngngacagagtgaaattccgtcttaagaaaaataaagaaaatttaaaaataccgggcgcggtggctcacgcctgtaatcccagctctcagggaggcaacaggtgggaggatagcttgagcccaggagttccagacctgcctgggcaatatagcgagaccctgttctccacaaaaaggaaaaaaaaaaaattaaaaaataaaagacaataaaagactagtcccagttgccacatttcttctcactgtacctgggtactcactgaaatactagctcccatctttctgtctacaggaggttttttcgaattatctttgaaccttgaacttttgcttctgcagtgcttccggtcg

SEQ ID NO: 290738 - DNA, 1191 bp, Homo sapiens
tgcatcatcgccgctgactgcatcaacgccgcgctttgttctgtccccggtgtgtgggtctgtgacagggtccaacagggcctggtccgtgtccggtcccccaaatctgtcgtccctgcccccaggcattggcatcaacaaaagtcagaattcccgggaacttgaacagaggctgctaaattcccagtaattgctcctttggccttctagggactgacttcaaagaaggaaggaaagaatcaggcagtgcttcctcattctcttttaaaacccgcttcccgctgagtctgcacccaggagaccagagagcaccttgcccttccatggaaactcaggctgatctcgtatctcaggaacctcaggccctgcttgacagtgctcttccttcaaaagttcctgccttttccgacaaggacagcctgggggatgagatgttggcggctgcgctcctaaaggccaagtcccaggtgagctgtggttccgtttatccttttcctttccattttctgtgcaatgacatcccattcagagctttaaaccctgatctcctccatcaggcccatggttctgtcctgctgaatcatggaccctcaccttctatcttggactcctgtctctcttcctccaccctgtcctcccttcctcccttcccaaatgtgcatttttcaccccatcctcagtgatttttttggtgccgccattcacattcctcaccctgaaattgcatgccagcacgtgttgtttcaggagctggtaacctttgaggatgtagctgtgtacttcatccggaaggagtggaagcgtttggaacctgctcagagggacctctatagagatgtgatgctggagaattacgggaatgtgttctcactggagtaaggagttatgccttgtcaacaaaactcgctggtgtttctttgcttcttcgtttgctagtaacaatctagtcactgaaaagagctgtttcagcagattttttttttgaggtgcaatggcacaatctttgctcagtgcaacatccatctcccagattcaagtgttcccaggttctcacctctgcctcccaagtagctgggactacaggcacgcaccaccacaccaggctaatttttgtatttgttttgtttttttttgttttagtagagacggggtttcaccagcctgggcaacatagcaaaacccacctcaaaa

SEQ ID NO: 290739 - DNA, 2405 bp, Homo sapiens
  misc_feature (29)..(29): n is a, c, g, or t
  misc_feature (2027)..(2027): n is a, c, g, or t
  misc_feature (2036)..(2036): n is a, c, g, or t
  misc_feature (2039)..(2040): n is a, c, g, or t
  misc_feature (2055)..(2055): n is a, c, g, or t
  misc_feature (2057)..(2057): n is a, c, g, or t
agtcgctttcgacagacgctgggataatntgcgcgcctcttaagccagtccaggtgagctgtggttccgtttatccttttcctttccattttctgtgcaatgacatcccattcagagctttaaaccctgatctcctccatcaggcccatggttctgtcctgctgaatcatggaccctcaccttctatcttggactcctgtctctcttcctccaccctgtcctcccttcctcccttcccaaatgtgcatttttcaccccatcctcagtgatttttttggtgccgccattcacattcctcaccctgaaattgcatgccagcacgtgttgtttcaggagctggtaacctttgaggatgtagctgtgtacttcatccggaaggagtggaagcgtttggaacctgctcagagggacctctatagagatgtgatgctggagaattacgggaatgtgttctcactggatcgtgagaccaggactgaaaatgatcaagaaatttctgaagacacaagatcacatggggtcctactgggaagatttcaaaaggatatttctcagggtctcaagtttaaagaagcctatgaacgagaagtcagtctgaaaaggccgctggggaactcccctggagaaagactgaacaggaaaatgccagattttggtcaagtgacagttgaggagaagctaacccccaggggagagagaagcgagaaatataatgattttgggaacagcttcactgtgaattccaaccttatctcacatcagagactccccgtgggagacagaccccataagtgtgatgaatgtagcaagagctttaatcgaacttcagaccttattcaacatcagagaatccacactggggaaaagccctatgaatgtaatgagtgtgggaaggccttcagccagagctcacaccttattcagcatcagagaatccacactggggaaaaaccttatgaatgtagtgattgtgggaaaaccttcagctgtagctctgccctcattctgcatcggaggatccacacgggggagaaaccctatgaatgtaatgagtgtgggaagaccttcagctggagctccaccctcacccaccatcagagaatccacactggtgagaaaccctacgcctgcaatgaatgtgggaaggccttcagcaggagctcaacccttattcaccatcagagaatccacactgaagctcttcccacattcgttacactgataaggcttctccccagtgtggatccgatagtgacgaatgaggctgcctttcccgctgaaagccttgccacaatctttgcactgatatggcgcctcttctgtgtgcattctctgatgtttaagaaggtctgagctctgcccaaaagcttttccacacttacagtcatagggccggtccaccaagtgtgttctgtagtggagggtgaggtttgagctgtggctgaaagctttcccacacttggtgcacacgtaaggtttctccccagtgtgtgttctcctgtgtttggtgagatttgagctattactaaaggctttgccacattcagcacatatataacgtctctctcctggggtaggtttagtaggaactgattctctacctttcttggagcctgcctcttgaagagggggttttgttcctttttcattttcaaggtttacgcactgcctctctaagctggcctcaggtttattggcgataatcacagaaattatatcccctttgagcccctctgcttcagaacctttctgctcatctgctgattcctcgtgctgggtactcaatctgcaatctgaaacaataagcagattaaggatacttcagttgtttcttgttctgaggaagaaactgttaccagagagatagaaccatcaggtgagactgatggtttctgaagggtgactaaacagagctcatgatagcgcatagatacaagtaaatcagcatccaatctagtttacaatactgcacttctttttttttttgagatggagtctcgctgtcagcaggctggaatgcagtgagntgagatgcnccnntgcactccagcctgngngacagagtgaaattccgtcttaagaaaaataaagaaaatttaaaaataccgggcgcggtggctcacgcctgtaatcccagctctcagggaggcaacaggtgggaggatagcttgagcccaggagttccagacctgcctgggcaatatagcgagaccctgttctccacaaaaaggaaaaaaaaaaaattaaaaaataaaagacaataaaagactagtcccagttgccacatttcttctcactgtacctgggtactcactgaaatactagctcccatctttctgtctacaggaggttttttcgaattatctttgaaccttgaacttttgcttctgcagtgcttccggtcg

SEQ ID NO: 290740 - DNA, 2119 bp, Homo sapiens
  misc_feature (1741)..(1741): n is a, c, g, or t
  misc_feature (1750)..(1750): n is a, c, g, or t
  misc_feature (1753)..(1754): n is a, c, g, or t
  misc_feature (1769)..(1769): n is a, c, g, or t
  misc_feature (1771)..(1771): n is a, c, g, or t
gtttaggctaggtacgaggctgcgtggtgaatcggccgagggtccaggagctggtaacctttgaggatgtagctgtgtacttcatccggaaggagtggaagcgtttggaacctgctcagagggacctctatagagatgtgatgctggagaattacgggaatgtgttctcactggatcgtgagaccaggactgaaaatgatcaagaaatttctgaagacacaagatcacatggggtcctactgggaagatttcaaaaggatatttctcagggtctcaagtttaaagaagcctatgaacgagaagtcagtctgaaaaggccgctggggaactcccctggagaaagactgaacaggaaaatgccagattttggtcaagtgacagttgaggagaagctaacccccaggggagagagaagcgagaaatataatgattttgggaacagcttcactgtgaattccaaccttatctcacatcagagactccccgtgggagacagaccccataagtgtgatgaatgtagcaagagctttaatcgaacttcagaccttattcaacatcagagaatccacactggggaaaagccctatgaatgtaatgagtgtgggaaggccttcagccagagctcacaccttattcagcatcagagaatccacactggggaaaaaccttatgaatgtagtgattgtgggaaaaccttcagctgtagctctgccctcattctgcatcggaggatccacacgggggagaaaccctatgaatgtaatgagtgtgggaagaccttcagctggagctccaccctcacccaccatcagagaatccacactggtgagaaaccctacgcctgcaatgaatgtgggaaggccttcagcaggagctcaacccttattcaccatcagagaatccacactgaagctcttcccacattcgttacactgataaggcttctccccagtgtggatccgatagtgacgaatgaggctgcctttcccgctgaaagccttgccacaatctttgcactgatatggcgcctcttctgtgtgcattctctgatgtttaagaaggtctgagctctgcccaaaagcttttccacacttacagtcatagggccggtccaccaagtgtgttctgtagtggagggtgaggtttgagctgtggctgaaagctttcccacacttggtgcacacgtaaggtttctccccagtgtgtgttctcctgtgtttggtgagatttgagctattactaaaggctttgccacattcagcacatatataacgtctctctcctggggtaggtttagtaggaactgattctctacctttcttggagcctgcctcttgaagagggggttttgttcctttttcattttcaaggtttacgcactgcctctctaagctggcctcaggtttattggcgataatcacagaaattatatcccctttgagcccctctgcttcagaacctttctgctcatctgctgattcctcgtgctgggtactcaatctgcaatctgaaacaataagcagattaaggatacttcagttgtttcttgttctgaggaagaaactgttaccagagagatagaaccatcaggtgagactgatggtttctgaagggtgactaaacagagctcatgatagcgcatagatacaagtaaatcagcatccaatctagtttacaatactgcacttctttttttttttgagatggagtctcgctgtcagcaggctggaatgcagtgagntgagatgcnccnntgcactccagcctgngngacagagtgaaattccgtcttaagaaaaataaagaaaatttaaaaataccgggcgcggtggctcacgcctgtaatcccagctctcagggaggcaacaggtgggaggatagcttgagcccaggagttccagacctgcctgggcaatatagcgagaccctgttctccacaaaaaggaaaaaaaaaaaattaaaaaataaaagacaataaaagactagtcccagttgccacatttcttctcactgtacctgggtactcactgaaatactagctcccatctttctgtctacaggaggttttttcgaattatctttgaaccttgaacttttgcttctgcagtgcttccggtcg

SEQ ID NO: 290741 - DNA, 664 bp, Homo sapiens
tgcatcatcgccgctgactgcatcaacgccgcgctttgttctgtccccggtgtgtgggtctgtgacagggtccaacagggcctggtccgtgtccggtcccccaaatctgtcgtccctgcccccaggcattggcatcaacaaaagtcagaattcccgggaacttgaacagaggctgctaaattcccagtaattgctcctttggccttctagggactgacttcaaagaaggaaggaaagaatcaggcagtgcttcctcattctcttttaaaacccgcttcccgctgagtctgcacccaggagaccagagagcaccttgcccttccatggaaactcaggctgatctcgtatctcaggaacctcaggccctgcttgacagtggtgaggaataaggactcattcattcttttactcagtcattctgcaatcatccattgaaatcgctcacttaccaggtactaggctaactactagaatccagatgtgaataagacacactcttcgccattcagtaactcacagcctagtggggaagctgaccgaacagtaatcaatgacagcttgataggtttgataattgaggcagattgttttgttttgttttgttttttttgagatggagtcttgctctgttgctcaggctagagtgcagtggcacaatctcggc

SEQ ID NO: 290742 - DNA, 341 bp, Homo sapiens
tgatgctggagaattacgggaatgtgttctcactggagtaaggagttatgccttgtcaacaaaactcgctggtgtttctttgcttcttcgtttgctagtaacaatctagtcactgaaaagagctgtttcagcagattttttttttgaggtgcaatggcacaatctttgctcagtgcaacatccatctcccagattcaagtgttcccaggttctcacctctgcctcccaagtagctgggactacaggcacgcaccaccacaccaggctaatttttgtatttgttttgtttttttttgttttagtagagacggggtttcaccatgttggccaggctggtctca

SEQ ID NO: 290743 - DNA, 376 bp, Homo sapiens
ggcggctgcgctcctaaaggccaagtcccaggtgagctgtggttccgtttatccttttcctttccattttctgtgcaatgacatcccattcagagctttaaaccctgatctcctccatcaggcccatggttctgtcctgctgaatcatggaccctcaccttctatcttggactcctgtctctcttcctccaccctgtcctcccttcctcccttcccaaatgtgcatttttcaccccatcctcagtgatttttttggtgccgccattcacattcctcaccctgaaattgcatgccagcacgtgttgtttcaggagctggtaacctttgaggatgtagctgtgtacttcatccggaaggagtggaagcgtttggaacc

SEQ ID NO: 290744 - DNA, 412 bp, Homo sapiens
ccgggtgaaatgggcagagtggcgcttacccgggatggcggtgaagcgggaccgggaggtcatcgtgacaaagggtggcatgaggtacctggccttgacgccctccccggctagacggtccagattgggggtgtccacatcctgatcctagtcccagcggaagccctggaaggagatcagcagcagctaaactcctggagggcagagccatgcctgccattttcatcattgcattaccaccacccagcacagtgcctggtacaaaagagttgctcaataaataaatcaggatgaatggataaatacacggataggcactttgaactacagatgagcttaaatactttgtgtttttcttagtcaaacatgtgcaattaagcatgtgataaattatatgatgaccacacctgtg

SEQ ID NO: 290745 - DNA, 318 bp, Homo sapiens
ctccagatgcaagccctcatggggcttcagataccatgaggaatgggcgtccctgcaatattgtcatggctgtcaaaagtgttattggagctggaaactcctggagggcagagccatgcctgccattttcatcattgcattaccaccacccagcacagtgcctggtacaaaagagttgctcaataaataaatcaggatgaatggataaatacacggataggcactttgaactacagatgagcttaaatactttgtgtttttcttagtcaaacatgtgcaattaagcatgtgataaattatatgatgaccacacctgtg

SEQ ID NO: 290746 - DNA, 1307 bp, Homo sapiens
caacgtccctaccgccgctgcttcccgggaacctggcgccgccggaactgatcgcggcctagtcccgacgcgtgtgtgctagtgagccggagccggcgacggcggcagtggcggcccggcctgcaggagcccgacggggtctctgccatgggggagtgacgcgcctgcacccgctgttccgcggcagcggcgagacatgaggagaccccgcgacaggggcagcggcggcggctcgtgagccccgggatggaggagaaatacggcggggacgtgctggccggccccggcggcggcggcggccttgggccggtggacgtacccagcgctcgattaacaaaatatattgtgttactatgtttcactaaatttttgaaggctgtgggacttttcgaatcatatgatctcctaaaagctgttcacattgttcagttcatttttatattaaaacttgggactgcattttttatggttttgtttcaaaagccattttcttctgggaaaactattaccaaacaccagataattggatcactaaaaattcctggtagaaaagaatttaaagacaaaaagttaaatgatcctaggaaactagtgggaaactgagaaatcataaaattgtactctgaagaaaaagatttcaaaatctaccagcagacaagaatatagataatggaaaacagaatactgtcctttttttttttctttctttttttgagaaagagtcttgctccatcgcccaggctgcagtgcagtgacacgatcttgtctcactgcaacctctgcctcccgggttcaagcgattctcctgcctcagcctcctgagtagctggaattacaggcacccaccaccacacccagctcatttttgtatttttagtagagacggggcttcattcaccacattggccagcctggtcttgaactcctgacctcaggtgatctgcctgcctcggcctcacaaagtgctaggattacaggcatgagccacagcacccggcccagaataagaatactgtcttggaaatctagacttagtcaagggatcttatgttttctatttacaaaatatgtaatgatttcacctttaaaatatttgttattattatctttctgtattttatttaaaatttggatatatagcaaaatatatgtgactgaaatttttaatttttttgtttccatttatagtggatcaaaatatttaaacatgcagttgctgggtgtattatttcactcttgtggttttttggcctcactctttgtggaccactaaggtaaataaaaatgcatattttgaatgtgtgttt

SEQ ID NO: 290747 - DNA, 644 bp, Homo sapiens
caacgtccctaccgccgctgcttcccgggaacctggcgccgccggaactgatcgcggcctagtcccgacgcgtgtgtgctagtgagccggagccggcgacggcggcagtggcggcccggcctgcaggagcccgacggggtctctgccatgggggagtgacgcgcctgcacccgctgttccgcggcagcggcgagacatgaggagaccccgcgacaggggcagcggcggcggctcgtgagccccgggatggaggagaaatacggcggggacgtgctggccggccccggcggcggcggcggccttgggccggtggacgtacccagcgctcgattaacaaaatatattgtgttactatgtttcactaaatttttgaaggctgtgggacttttcgaatcatatgatctcctaaaagctgttcacattgttcagttcatttttatattaaaacttgggactgcattttttatggttttgtttcaaaagccattttcttctgggaaaactattaccaaacaccagtggatcaaaatatttaaacatgcagttgctgggtgtattatttcactcttgtggttttttggcctcactctttgtggaccactaaggactttgctgctatttgagcacagtgatattgttgtcat

SEQ ID NO: 290748 - DNA, 1184 bp, Homo sapiens
caacgtccctaccgccgctgcttcccgggaacctggcgccgccggaactgatcgcggcctagtcccgacgcgtgtgtgctagtgagccggagccggcgacggcggcagtggcggcccggcctgcaggagcccgacggggtctctgccatgggggagtgacgcgcctgcacccgctgttccgcggcagcggcgagacatgaggagaccccgcgacaggggcagcggcggcggctcgtgagccccgggatggaggagaaatacggcggggacgtgctggccggccccggcggcggcggcggccttgggccggtggacgtacccagcgctcggactgcattttttatggttttgtttcaaaagccattttcttctgggaaaactattaccaaacaccagataattggatcactaaaaattcctggtagaaaagaatttaaagacaaaaagttaaatgatcctaggaaactagtgggaaactgagaaatcataaaattgtactctgaagaaaaagatttcaaaatctaccagcagacaagaatatagataatggaaaacagaatactgtcctttttttttttctttctttttttgagaaagagtcttgctccatcgcccaggctgcagtgcagtgacacgatcttgtctcactgcaacctctgcctcccgggttcaagcgattctcctgcctcagcctcctgagtagctggaattacaggcacccaccaccacacccagctcatttttgtatttttagtagagacggggcttcattcaccacattggccagcctggtcttgaactcctgacctcaggtgatctgcctgcctcggcctcacaaagtgctaggattacaggcatgagccacagcacccggcccagaataagaatactgtcttggaaatctagacttagtcaagggatcttatgttttctatttacaaaatatgtaatgatttcacctttaaaatatttgttattattatctttctgtattttatttaaaatttggatatatagcaaaatatatgtgactgaaatttttaatttttttgtttccatttatagtggatcaaaatatttaaacatgcagttgctgggtgtattatttcactcttgtggttttttggcctcactctttgtggaccactaaggtaaataaaaatgcatattttgaatgtgtgttt

SEQ ID NO: 290749 - DNA, 876 bp, Homo sapiens
ccgtattgtttaggagtcaactgtatattcttactttgcccatgtctgagtaggaaaaaggaagggaggttaattgattgcttgtgttagatgaaatacgcgtgaatcctttatgagatttataagaacatcaacaaacagtaacttgggcaaagaattccaaagacatttctttagtcctctttcaataagcacattttctgacattaggtagtaataaaagacagtgctcatatcgaggcttactacatgcttttggaattgcaggattttgttatttaaatttagactgtgattctctgagtaactgtatatattgctttaccccaaatccactcaaatcctctgagcagcagtccttcgggtctaagtgccaccttcacgagacaccccgcacacaggtgccgccagcagtgtggctgaccctgctagctctccacccacggtccactctccacttcaaccttattaacagaaacttgattgcttccaaatggcaatcaactcagccaaagatctacatttcccaggctcccatgtagcaagggacagctatgtcatacagttctgcccgatgagataaaaccagacatattctagggacctctgagaaaattctgctttcctgatttctgctgccccttcttccttgaagtttcatttcacttcttctaggctggaacacagatgtggggctggaagtggagcagccccttttagccatgaggcccaaagccacatgctaaggatggtgaagcaggggatagaaagagcctgtgtctttgctgacttccttaagccacggcaccagcctgggcctgccctactctggacatctaaatgtgtaaggagaaataaacttcattcgttttatta

SEQ ID NO: 290750 - DNA, 552 bp, Homo sapiens
tgtggagtgcagctgaaatgaccgctactgctccttcacagtatatttacatgagcttcctgtggacatcagcaccatttaaaattaagtcttctaggctggaacacagatgtggggctggaagtggagcagccccttttagccatgaggcccaaagccacatgctaaggatggtgaagcaggggatagaaagagcctgtgtctttgctgacttccttaagccacggcaccagcctgggcctgccctactctggacatctaaatgtcaggagctaagaatcaagtcagtctagaggtgttcgttgccatgtggagagatccttcccaagaagaaagatgctacaaagtgtcctggaaatcctctttgcccatccagatccaccctccctagcctgctctgtacctcaggaagctgcttttcatggttcacataaaccaggctcctgtaccctccagataggtccatcctatgggtggtaccagcaggagaccagagagatgaaggagggaaaaaaagaacattaggggttgaattgtatcaccccaaaattc

SEQ ID NO: 290751 - DNA, 683 bp, Homo sapiens
  misc_feature (611)..(611): n is a, c, g, or t
  misc_feature (622)..(623): n is a, c, g, or t
  misc_feature (635)..(636): n is a, c, g, or t
  misc_feature (648)..(648): n is a, c, g, or t
  misc_feature (651)..(651): n is a, c, g, or t
  misc_feature (653)..(653): n is a, c, g, or t
  misc_feature (665)..(666): n is a, c, g, or t
  misc_feature (676)..(676): n is a, c, g, or t
tgtggagtgcagctgaaatgaccgctactgctccttcacagtatatttacatgagcttcctgtggacatcagcaccatttaaaattaaggctggactgcagtggcgtgatctcggctcactgcaacttctgcctcccgagctcaagtgatccttccacctcggcctccccagtacccgggactacaggcacacaccaccacgcctggctaatttttgtattttttgtagagatggggttgcatcatgttgcccaggctggtcttgaactcctaagctcaagcagtctgcccagcactttgggaggctgaggcagatggatcccaagtccaggaatttgagacgagcctgggcaacatagtgagagcctgtcaacaaaaaatagaaaaattagctgggcttggtgatacacatctgtagtcccagctatttgggaggctgccttgatatcaggcagtcgaggctgcagtgagctgactgccccactgtattccagcctgggtgaccccatctcaaagaagaaaagttaccagatgtcatgggtaaaggttgggcttcaagtggcctcataagttgcttgcatttaaattcacggaattcattggaccaatangttacattttnngtccttttttgnnttgggtcatctngtnancagtgggggccnnattactgctnctttgta

SEQ ID NO: 290752 - DNA, 630 bp, Homo sapiens
  misc_feature (558)..(558): n is a, c, g, or t
  misc_feature (569)..(570): n is a, c, g, or t
  misc_feature (582)..(583): n is a, c, g, or t
  misc_feature (595)..(595): n is a, c, g, or t
  misc_feature (598)..(598): n is a, c, g, or t
  misc_feature (600)..(600): n is a, c, g, or t
  misc_feature (612)..(613): n is a, c, g, or t
  misc_feature (623)..(623): n is a, c, g, or t
tgtggagtgcagctgaaatgaccgctactgctccttcacagtatatttacatgagcttcctgtggacatcagcaccatttaaaattaaggctggactgcagtggcgtgatctcggctcactgcaacttctgcctcccgagctcaagtgatccttccacctcggcctccccagtacccgggactacaggcacacaccaccacgcctggctaatttttgtattttttgtagagatggggttgcatcatgttgcccaggctggtcttgaactcctaagctcaagcagtctgcccagcactttgggaggctgaggcagatggatcccaagtccaggaatttgagacgagcctgggcaacatagtgagagcctgtcaacaaaaaatagaaaaattagctgggcttggtgatacacatctgtagtcccagctatttgggaggctgccttgatatcaggcagtcgaggctgcagtgagctgactgccccactgtattccagcctgggtgaccccatctcaaagaagtgcttgcatttaaattcacggaattcattggaccaatangttacattttnngtccttttttgnnttgggtcatctngtnancagtgggggccnnattactgctnctttgta

SEQ ID NO: 290753 - DNA, 298 bp, Homo sapiens
tgtggagtgcagctgaaatgaccgctactgctccttcacagtatatttacatgagcttcctgtggacatcagcaccatttaaaattaagtcttctaggctggaacacagatgtggggctggaagtggagcagccccttttagccatgaggcccaaagccacatgctaaggatggtgaagcaggggatagaaagagcctgtgtctttgctgacttccttaagccacggcaccagcctgggcctgccctactctggacatctaaatgtgtaaggagaaataaacttcattcgttttatta

SEQ ID NO: 290754 - DNA, 821 bp, Homo sapiens
ccgtattgtttaggagtcaactgtatattcttactttgcccatgtctgagtaggaaaaaggaagggaggttaattgattgcttgtgttagatgaaatacgcgtgaatcctttatgagatttataagaacatcaacaaacagtaacttgggcaaagaattccaaagacatttctttagtcctctttcaataagcacattttctgacattaggtagtaataaaagacagtgctcatatcgaggcttactacatgcttttggaattgcaggattttgttatttaaatttagactgtgattctctgagtaactgtatatattgctttaccccaaatccactcaaatcctctgagcagcagtccttcgggtctaagtgccaccttcacgagacaccccgcacacaggtgccgccagcagtgtggctgaccctgctagctctccacccacggtccactctccacttcaaccttattaacagaaacttgattgcttccaaatggcaatcaactcagccaaagatctacatttcccaggctcccatgtagcaagggacagctatgtcatacagttctgcccgatgagataaaaccagacatattctagggacctctgagatcttctaggctggaacacagatgtggggctggaagtggagcagccccttttagccatgaggcccaaagccacatgctaaggatggtgaagcaggggatagaaagagcctgtgtctttgctgacttccttaagccacggcaccagcctgggcctgccctactctggacatctaaatgtgtaaggagaaataaacttcattcgttttatta

SEQ ID NO: 290755 - DNA, 479 bp, Homo sapiens
taacatgaggtgatatctttcctggtttgactttcatcaaaaattaaacgacagaccataccgacgctttgaaaacgtgactgagctggtgcacaaaacaatggtgcctagaattttgaattgtgcaatgttgtgcatggccgcggatatgtggggccttgtggttccaagagcctgtctcaggtgtaccggccctcatcactgggcttcagaggttcaatctgcaaggaggcatctcctgccaggaaattggaagcaaaggccactcggcccttctgttcctcagtcaagttattgtagacatgacgactggagtaagtgatcacctgtgggatagaccgaggcagagtcaagcagcgtaactctcagcctgcctttcctgatggtgtgaagaagaggaaagggagtactcccagtggcacaaagtagtcaagcctggggctgagagtccaagagacctctgttctaaataaaagtta

SEQ ID NO: 290756 - DNA, 2300 bp, Homo sapiens
tcgacagtccccgctctgagagggagggacagagagcgaactgtcagatcggagcgagagcgggcgcccgagagagggagagagagagagggagggagaggaaaagtgagagagggaaagagagcgcgaacgagggcgcagagcgagctcctgctgcaactctgctccagcacggccagcgccagcgcccgccgtcggtgcactctacgagccgtgcagcgtgcccactggagttgttgtgtatcaaggatcgatcccctatatgcacacacacacctccacctccaccaatgcactcttcttcctcctccttctccagacaactgctgggaaaaaaataaaacaccaaccccaaccgtcagcaacaaggtaacagagcgattcgacatcattttttttcctgttcaattttttccttgttatatttgtttcctaatttctgcccaaaaggaaagatgtcgcatcagactgtgactgttgcgaggagaatgaaaaaggactcttgtttcagaggcaaccaagagctccggcaatagcaacttcagagaaatgcaccatcgcaagaagttttcctaggacagaacaaaacttgaaacgagaggaccagagggggagagcaggagccagcctcccctctccgcactcgcgagcagccagcagcaccacgccttcaaggacgaaaaagttttactactctaagggaaaacgagtgaaatgtgttcctgaggaggagaggagaggagaggagagagcggacaagagaaggagcgggccggttgctggtcatccgtaatttggctaaggaagaaaggagcagcttctttctttgttatctcccgtgaaaccttcacttagcaggtggacggagccccgcgaccgggcagagtccgggcccatccgccgccctcccctccacccagagacaggcatgcccgcccttggaggagaaaacgcgggagaaacggaccaaggaggcatttttgcagtccaaggaaggaggggccaaaaaataaaaagcataataaacacccagactgttttgtatacatatataacaaacaaaaccggaagagaaaaagggggcgatcatgagatctcgttcatactgtggtggtgtttcgtttttgtttttgtttttaaagaagggtgaagatgcctgacgcacgaaaactgcactcgtgaggtttttccaccctgagatgacctacacggcagcggtggacagcacctgcctcgtcttctcctctttgaaaaaaagagagagagagagtcccctttcctttcactttctccctccaaaacagctgcctaaagagatccacggaaactttatttcctgggagcgacctgagagaaaacagaggcaccaggttccatcaggggacgacaccgtgctctgggaccctgtttttcttggccatattaaagtcatttggaaacaaatcaactctgaaatgggaaggaggggggaaaaacagtctccaagaaaaaaataattatattgacagcttctgaaactaacagactgaatagcaaagccaaaagaaaagtatcctcaaagtaaccttggaaataaaaggatcgggaaggagcagagggagagggggaacgtccgctgaggagtggcgagaggccccggccgagtcgggtcgcgggcgggcgggcgaactgggagcagagcgggggcccagccagcgaggccgccgagccaggcccggccgcgtacccaggctttgacggctgccattcagggtggacgatgcctaaagattccaccgctaatattttttttattaatattttttattttttatttctggactgactcagataaaggaatttagaaagactgagcaccagccgctgcacttctctggacttctctcctcaatccgttgccaactttgattgaatgggtgctgtggatgtgattatataatactgccatttccaagcagtgtttttggtaggttttaataaacagacttttcaaaagacggcaatatagaattgttagatccgttgttgatctaaaaatatttgctttatattttcattaaatgacttcttttaatattttattcagaatacttatgaactgctgcaaaacggtaatttatttttccccagatcttgtattacgtgtttttttcagacgagcacaaatcaaaatgaaatgaaaatatggacagttgttaggtaataagggtatcttttgatgtgatcatttgattgtaatttaatttgagtagtgattccgtaagagctgatcgagaaaataaatttgttagaatgaaata

SEQ ID NO: 290757 - DNA, 1489 bp, Homo sapiens
gccgccgccgccgccgccgccgccgccgctgccgccgccgcgccgaccctgcacctgggccgctccgggctccagcccaggcccatccgccgccctcccctccacccagagacaggcatgcccgcccttggaggagaaaacgcgggagaaacggaccaaggaggcatttttgcagtccaaggaaggaggggccaaaaaataaaaagcataataaacacccagactgttttgtatacatatataacaaacaaaaccggaagagaaaaagggggcgatcatgagatctcgttcatactgtggtggtgtttcgtttttgtttttgtttttaaagaagggtgaagatgcctgacgcacgaaaactgcactcgtgaggtttttccaccctgagatgacctacacggcagcggtggacagcacctgcctcgtcttctcctctttgaaaaaaagagagagagagagtcccctttcctttcactttctccctccaaaacagctgcctaaagagatccacggaaactttatttcctgggagcgacctgagagaaaacagaggcaccaggttccatcaggggacgacaccgtgctctgggaccctgtttttcttggccatattaaagtcatttggaaacaaatcaactctgaaatgggaaggaggggggaaaaacagtctccaagaaaaaaataattatattgacagcttctgaaactaacagactgaatagcaaagccaaaagaaaagtatcctcaaagtaaccttggaaataaaaggatcgggaaggagcagagggagagggggaacgtccgctgaggagtggcgagaggccccggccgagtcgggtcgcgggcgggcgggcgaactgggagcagagcgggggcccagccagcgaggccgccgagccaggcccggccgcgtacccaggctttgacggctgccattcagggtggacgatgcctaaagattccaccgctaatattttttttattaatattttttattttttatttctggactgactcagataaaggaatttagaaagactgagcaccagccgctgcacttctctggacttctctcctcaatccgttgccaactttgattgaatgggtgctgtggatgtgattatataatactgccatttccaagcagtgtttttggtaggttttaataaacagacttttcaaaagacggcaatatagaattgttagatccgttgttgatctaaaaatatttgctttatattttcattaaatgacttcttttaatattttattcagaatacttatgaactgctgcaaaacggtaatttatttttccccagatcttgtattacgtgtttttttcagacgagcacaaatcaaaatgaaatgaaaatatggacagttgttaggtaataagggtatcttttgatgtgatcatttgattgtaatttaatttgagtagtgattccgtaagagctgatcgagaaaataaatttgttagaatgaaata

SEQ ID NO: 290758 - DNA, 2071 bp, Homo sapiens
  misc_feature (251)..(251): n is a, c, g, or t
atggccacggcggcttctaacccctacctgccggggaacagcctgctcgcggccggctctattgtgcactcggacgcggcaggggctggcggcggcgggggtggcggcggcggcggcggcgggggcggcgcagggggcgggggcggcggcatgcagccgggcagcgccgccgtgacctcgggcgcctaccggggggacccgtcctctgtcaagatggtccagagcgacttcatgcagggggccatggccgncagcaacggcggccatatgctgagccacgcgcaccagtgggtcacagccctgccccacgccgccgccgccgccgccgctgccgccgccgccgccgtggaggcgagctcgccgtggtcgggcagcgccgtgggcatggctggcagcccccagcagccaccgcagccgccgccgccaccgccgcagggccccgacgtgaagggcggcgccgggcgcgacgacctgcacgcgggcacagcgctgcaccaccgcgggccgccgcacctcggacccccgccgccgcccccacaccagggccaccctgggggctggggggcggccgccgctgccgcagccgcagccgccgccgccgccgccgccgcgcacctcccgtccatggccgggggcctgggccgctccgggctccagcccaggcccatccgccgccctcccctccacccagagacaggcatgcccgcccttggaggagaaaacgcgggagaaacggaccaaggaggcatttttgcagtccaaggaaggaggggccaaaaaataaaaagcataataaacacccagactgttttgtatacatatataacaaacaaaaccggaagagaaaaagggggcgatcatgagatctcgttcatactgtggtggtgtttcgtttttgtttttgtttttaaagaagggtgaagatgcctgacgcacgaaaactgcactcgtgaggtttttccaccctgagatgacctacacggcagcggtggacagcacctgcctcgtcttctcctctttgaaaaaaagagagagagagagtcccctttcctttcactttctccctccaaaacagctgcctaaagagatccacggaaactttatttcctgggagcgacctgagagaaaacagaggcaccaggttccatcaggggacgacaccgtgctctgggaccctgtttttcttggccatattaaagtcatttggaaacaaatcaactctgaaatgggaaggaggggggaaaaacagtctccaagaaaaaaataattatattgacagcttctgaaactaacagactgaatagcaaagccaaaagaaaagtatcctcaaagtaaccttggaaataaaaggatcgggaaggagcagagggagagggggaacgtccgctgaggagtggcgagaggccccggccgagtcgggtcgcgggcgggcgggcgaactgggagcagagcgggggcccagccagcgaggccgccgagccaggcccggccgcgtacccaggctttgacggctgccattcagggtggacgatgcctaaagattccaccgctaatattttttttattaatattttttattttttatttctggactgactcagataaaggaatttagaaagactgagcaccagccgctgcacttctctggacttctctcctcaatccgttgccaactttgattgaatgggtgctgtggatgtgattatataatactgccatttccaagcagtgtttttggtaggttttaataaacagacttttcaaaagacggcaatatagaattgttagatccgttgttgatctaaaaatatttgctttatattttcattaaatgacttcttttaatattttattcagaatacttatgaactgctgcaaaacggtaatttatttttccccagatcttgtattacgtgtttttttcagacgagcacaaatcaaaatgaaatgaaaatatggacagttgttaggtaataagggtatcttttgatgtgatcatttgattgtaatttaatttgagtagtgattccgtaagagctgatcgagaaaataaatttgttagaatgaaata

SEQ ID NO: 290759 - DNA, 1567 bp, Homo sapiens
  misc_feature (251)..(251): n is a, c, g, or t
atggccacggcggcttctaacccctacctgccggggaacagcctgctcgcggccggctctattgtgcactcggacgcggcaggggctggcggcggcgggggtggcggcggcggcggcggcgggggcggcgcagggggcgggggcggcggcatgcagccgggcagcgccgccgtgacctcgggcgcctaccggggggacccgtcctctgtcaagatggtccagagcgacttcatgcagggggccatggccgncagcaacggcggccatatgctgagccacgcgcaccagtgggtcacagccctgccccacgccgccgccgccgccgccgctgccgccgccgccgccgtggaggcgagctcgccgtggtcgggcagcgccgtgggcatggctggcagcccccagcagccaccgcagccgccgccgccaccgccgcagggccccgacgtgaagggcggcgccgggcgcgacgacctgcacgcgggcacagcgctgcaccaccgcgggccgccgcacctcggacccccgccgccgcccccacaccagggccaccctgggggctggggggcggccgccgctgccgcagccgcagccgccgccgccgccgccgccgcgcacctcccgtccatggccgggggccagcagccgccgccgcagagtctgctctactcgcagcccggaggcttcacggtgaacggcatgctgagcgcgccaccggggcccggcggcggcggcggcggcgcgggcggtggagcccagagcttggtgcacccggggctggtgcgcggggacacgccagagctggccgagcaccaccaccaccaccaccaccacgcgcatcctcacccgccgcacccgcaccacgcgcagggacccccgcaccacggcggcggcggcggcggcgcggggcctggactcaacagccacgacccgcactcggacgaggacacgccgacgtcggacgacctggagcagttcgccaagcagttcaagcagcggcgcatcaagctgggcttcacgcaggccgacgtggggttggcgctgggcacactctacggcaacgtgttctcgcagaccaccatctgccgcttcgaggccctgcagctgagcttcaagaacatgtgcaagctcaagccgctgctgaacaagtggctggaggaggcggactcaagcaccggcagccccacaagcatcgacaagatcgcggcgcagggccgcaagcgcaagaagcggacctctatcgaggtgagcgtcaagggcgcgctggagagccacttcctcaagtgccccaagccctccgcgcaggagatcaccaacctggccgacagcctgcagctcgagaaggaggtggtgcgggtctggttctgcaatcggcgccaaaaggagaagcgcatgacgccgcccgggatccaacagcagacgcccgacgacgtctactcgcaggtgggcaccgtgagcgccgacacgccgccgcctcaccacgggctgcagacgagcgttcagtgaagccagggcgcagagcgaagagggccgccgccgccgccgcctccgcagccgccgtcagcaccgc

SEQ ID NO: 290760 - DNA, 975 bp, Homo sapiens
tcgacagtccccgctctgagagggagggacagagagcgaactgtcagatcggagcgagagcgggcgcccgagagagggagagagagagagggagggagaggaaaagtgagagagggaaagagagcgcgaacgagggcgcagagcgagctcctgctgcaactctgctccagcacggccagcgccagcgcccgccgtcggtgcactctacgagccgtgcagcgtgcccactggagttgttgtgtatcaaggatcgatcccctatatgcacacacacacctccacctccaccaatgcactcttcttcctcctccttctccagacaactgctgggaaaaaaataaaacaccaaccccaaccgtcagcaacaaggtaacagagcgattcgacatcattttttttcctgttcaattttttccttgttatatttgtttcctaatttctgcccaaaaggaaagatgtcgcatcagactgtgactgttgcgaggagaatgaaaaaggactcttgtttcagaggcaaccaagagctccggcaatagcaacttcagagaaatgcaccatcgcaagaagttttcctaggacagaacaaaacttgaaacgagaggaccagagggggagagcaggagccagcctcccctctccgcactcgcgagcagccagcagcaccacgccttcaaggacgaaaaagttttactactctaagggaaaacgagtgaaatgtgttcctgaggaggagaggagaggagaggagagagcggacaagagaaggagcgggccggttgctggtcatccgtaatttggctaaggaagaaaggagcagcttctttctttgttatctcccgtgaaaccttcacttagcaggtggacggagccccgcgaccgggcagagtccgggctcgcccgaggacaggaggaggagcgggagcccgcgcgtcccgggagagcgccccgagtgcaggtccccgccccgcccggcga

SEQ ID NO: 290761 - DNA, 357 bp, Homo sapiens
  misc_feature (280)..(280): n is a, c, g, or t
  misc_feature (334)..(335): n is a, c, g, or t
tgaagctgagtgagcactaaaggcctgtttagggtcgaggctgtgacgggcctcgatgaggggcccacagccttagcagactcaggaggcaaaaccaggggcagatgattagaaatgcgtgggtggggggacttgcctggggtccatggtgggggcaggggccttgcctggggtccatgaggaatagtcggcttgcccggggtcagtggggggtggaaggggcagtgggcttacccggggtgaggggatgggggggcagtgggcttgcctagggtcagtnagttgggggacgggaggggcagtgggcttacccggggtgaggggatgggggggnngtgggcttgcccagggtcagtg

SEQ ID NO: 290762 - DNA, 600 bp, Homo sapiens
agtgattgtacattcttctcgagggcacatgggacattctccaggatagaccatatgttaggtcaaaattcaaacttcaaaaaattcataaagtctgaatccaaactaaagatcttttccaagtacaatggaaaggacctaaaaaatcaatgagggaaaatggaaaaattcacaatgacaggtgccacagattgactactgcaaataaagccagtctgagtgcctgtgtgggccctacctccacaacttctctgaagcacagcaaatccaagaaagagtctaaaaaagagaccctgctcaccctatttctgcacctgctgttgctcacagggagactttggtacctcatggcaggttcttcaccttcaggaccaacacttgaaaatagaaggaagaggagggtcgtggacttaccagctgtggtcgctgaaggaatggtgttggttgccaaaataggtgctactgtggctgcagccactggcgtgccagtactgaagattgttttctgtgagggaaaccccacaacacagttataagaacattatccactgcgtccagggtaaacacaatcaatgccttcggtatcaccaggccctcagc

SEQ ID NO: 290763 - DNA, 667 bp, Homo sapiens
tgctcttctccgggcgctgcactgcggccgctccgcaggcagagaagccgggagcgggcgaggcggcggcggcagcagcgatggcaggaatagagttggagcggtgccagcagcaggcgaacgaggtgacggaaattatgcgtaacaacttcggcaaggtcctggagcgtggtgtgaagctggccgaactgcagcagcgttcagaccaactcctggatatgagctcaaccttcaacaagactacacagaacctggcccagaagaagtgctgggagaacatccgttaccggatctgcgtggggctggtggtggttggtgtcctgctcatcatcctgattgtgctgctggtcgtctttctccctcagagcagtgacagcagtagtgccccacggacccaggatgcaggcattgcctcagggcctgggaactgacccagctggtcctgaaggagaagccaaatggctgcactggccgattctggtctccagaggaccttggtgtttgctctcccttgacccaccccagtgagtgccaaagggcagccccaacatgtgcacccctgcatttcctgtcatgccacagactggcccttgagggcagcctgctgtactggccatgctgggccagccccacctggagctcagtaaaaactgctgtttgattaaaa

SEQ ID NO: 290764 - DNA, 784 bp, Homo sapiens
tgctcttctccgggcgctgcactgcggccgctccgcaggcagagaagccgggagcgggcgaggcggcggcggcagcagcgatggcaggaatagagttggagcggtgccagcagcaggcgaacgaggtgacggaaattatgcgtaacaacttcggcaaggtcctggagcgtggtgtgaagctggccgaactgcagcagcgttcagaccaactcctggatatgagctcaaccttcaacaagactacacagaacctggcccagaagaagtgctgggagaacatccgttaccggatctgcgtggggctggtggtggttggtgtcctgctcatcatcctgattgtgctgctggtcgtctttctccctcagagcagtgacagcagtagtgccccacggacccaggatgcaggcattgcctcagggcctgggaactgacccagctggtcctgaaggagaagccaaatggctgcactggccgattctggtctccagaggaccttggtgtttgctctcccttgacccaccccagtgagtgccaaagggcagccccaacatgtgcacccctgcatttcctgtcatgccacagactggcccttgagggcagcctgctgtactggccatgctgggccagccccacctggagctcagtaaaaactgctgtttgattaaaaaaaaaacaaggaagaaaacgcgagaggggggagggggaggggaggagaagagggacacagggggggagagaggggcgcggcgcgcgggggggagagagaggggggaggggagagaga

SEQ ID NO: 290765 - DNA, 899 bp, Homo sapiens
tctaaagagaattactatatttacattaggaaaattattttaattgattctgaacaaataattaacaattaccaaatgcctactatattccaggcattgtacttagatgatttacatacattatctcatttatcctcacaacaaccctatgaaataggtatattatcatccccattttatagatgaggaaattgagtaactcactcactcaaggtcacacagctggtgagtgttggagccgggattcgaacctaggtcttacttgaaagcccgtgctctttccactatactacattgcttcccacaaagttgccaactggactctgttataaaaattaaaagcacacatcacgaaaattcttggacttgcaaagcaataagcctactaacaaaataagtgctatagtttcttttgaaataaggcattctaattatctcagtatgtctgccaaccaaataatgggaaatcagggaactaacttaatatttaatacattaactattagtaaaataaaaacactcttacatccatggcctaaatactatagatattatagatgaggaaagaggcatttcctctatacaagggtgcttgctcaatgtacaataaaggtaataacacaaatattattcaagtctgtgtttttggttggggagttcctagttttaaaaaatactcatttggtgaaataaatcatcttgagatttttctgaaaccatgctgcttacaaggatttcccatattactagaatttttttacttttctgtaaacattttctaattaagccagcatttacaaaaggtttaaaaatattaaaaatgtaactttaataactaaattaagaatgccttacataatacatctaacaattcccctcagtagtattatgaaaaaaaa

SEQ ID NO: 290766 - DNA, 662 bp, Homo sapiens
tctaaagagaattactatatttacattaggaaaattattttaattgattctgaacaattgcttcccacaaagttgccaactggactctgttataaaaattaaaagcacacatcacgaaaattcttggacttgcaaagcaataagcctactaacaaaataagtgctatagtttcttttgaaataaggcattctaattatctcagtatgtctgccaaccaaataatgggaaatcagggaactaacttaatatttaatacattaactattagtaaaataaaaacactcttacatccatggcctaaatactatagatattatagatgaggaaagaggcatttcctctatacaagggtgcttgctcaatgtacaataaaggtaataacacaaatattattcaagtctgtgtttttggttggggagttcctagttttaaaaaatactcatttggtgaaataaatcatcttgagatttttctgaaaccatgctgcttacaaggatttcccatattactagaatttttttacttttctgtaaacattttctaattaagccagcatttacaaaaggtttaaaaatattaaaaatgtaactttaataactaaattaagaatgccttacataatacatctaacaattcccctcagtagtattatgaaaaaaaa

SEQ ID NO: 290767 - DNA, 453 bp, Homo sapiens
actcgggcaggggagggattcggggaggtctcatcaatttgggcctgaggaaaattcaggtggaagacaattaaataactaaccacctccgcaaggtgcagaactcaaacccaagtctccctcccacgccctgggctccagggaagcccttgggtgtcgttgttgaaacaggacgaggcgtgaccccgggtctgcgttgtttggcgtgggttctcactatgttgcttaagctggtctagaactcaagccagtctctcacttcagcctcttgagtcgttgggattacagaagccaccatgtccaactgctgatcttgaactcctgggctcaagtgatcctcccacctcggcctcccaatgtgttgggattacaggcgtgagttgcggcgcccagctgatatgtatacttttctataggtatattacacttcaataaaaagtttgaaacagaaaa

SEQ ID NO: 290768 - DNA, 571 bp, Homo sapiens
gcgtgggcgcggcagtcgccactcaccgaggttgacgaccttgagcgccgtgaagaagcggttctgccgggccaggtcctgccagggagccttggagcagtggtacttgatgaaggggaagcagccggcgtgggttctcactatgttgcttaagctggtctagaactcaagccagtctctcacttcagcctcttgagtcgttgggattacagaagccaccatgtccaactgattttgctgtgtcacccaggctggagtgccatggcatgatcatggctcactgcagcctctacctcccaggctcaagagctcctcccagctcagcctcccaagtagctgggactacagacgcataccactatgcccagctaattttttgtattttgtattttttgtagagacatggtctcactttgttttgcaggctgatcttgaactcctgggctcaagtgatcctcccacctcggcctcccaatgtgttgggattacaggcgtgagttgcggcgcccagctgatatgtatacttttctataggtatattacacttcaataaaaagtttgaaacagaaaa

SEQ ID NO: 290769 - DNA, 352 bp, Homo sapiens
gcgtgggcgcggcagtcgccactcaccgaggttgacgaccttgagcgccgtgaagaagcggttctgccgggccaggtcctgccagggagccttggagcagtggcgtgggttctcactatgttgcttaagctggtctagaactcaagccagtctctcacttcagcctcttgagtcgttgggattacagaagccaccatgtccaactgctgatcttgaactcctgggctcaagtgatcctcccacctcggcctcccaatgtgttgggattacaggcgtgagttgcggcgcccagctgatatgtatacttttctataggtatattacacttcaataaaaagtttgaaacagaaaa

SEQ ID NO: 290770 - DNA, 1054 bp, Homo sapiens
gcgtgggcgcggcagtcgccactcaccgaggttgacgaccttgagcgccgtgaagaagcggttctgccgggccaggtcctgccagggagccttggagcagtggtacttgatgaaggggaagcagccggcgtgggttctcactatgttgcttaagctggtctagaactcaagccagtctctcacttcagcctcttgagtcgttgggattacagaagccaccatgtccaactgctgatcttgaactcctgggctcaagtgatcctcccacctcggcctcccaatgtgttgggattacaggcagacaagatcttgttgcccaggctggtctcaaactcctgcgttcaaatgatactctcgccttggcctccaaaagtgttgggattgcagacctgagctactatgcctggctgaattctatttctattggattggttgtaaagaagtgcattgtagcctgcaaaggagcagggccagtggggtggagagggcagaagtgctacagaggcccctgctctccactgccctgactgctactgtgctggatgccgtgtgaaccacagctgcatctggaggccttgggcagcacctaacaggaagccagagtaggtcctctgaaggtgtttgttcaatgaacttgtcatcctcctcaacttaaagcctttagcttttccaatttggaggcacaaataagtgagaacttggggatccactgaggtctgaggcacggtggtaccagaggagatgaaggggctttcagcatgaagctggtcccctgtcgacagcacgctgattttcccgttgggctctatcagcatgtccactgtgaggttggtgacattgtctgcaggtgggaatgcttcgatcacaccccctggtgggaaaaacatggagtaggtgaaaggacacatgcattttgtttgacttgggctcagattctgcatctgccatgtcttgaaagactttgggcaagtagcttacattctctgaacttatttttctttatccgtaatatgggcataataaagcctacctcattagattgttgtgcatcttg

SEQ ID NO: 290771 - DNA, 508 bp, Homo sapiens
gccaaaccatggctcacctttttaaagagaagccccgatatccaagcaaaagaagagttatggaagcacattcaaaaagaacttgtggatccatccggattgtccgaagaacaattaaaagagattccatacactaaaatagagtgagtgcctttcagaatcttctcaccaaagctttattagtgcttgacacaaggtgacccaatccgcatcaggcattctcattcgccacgaagttaccgccagtatcgcaggtcccagtgttcagatggggagcgatcagttctctcggaagtgaattcaaaaacagatcttgtaccaccacttccggtgacccattcttcggatgctcagggttctggggatgctacagttcatcagagaagaaatgggtctaaagatagcctgatggaagaaaaacctcagacatctacaaacaacctggctggaaaacacacagcaaaaacaataaaaactatacaagcttcccgcctcaagacagaaaatt

SEQ ID NO: 290772 - DNA, 2384 bp, Homo sapiens
agccgcaggatgcgcggggacgcgccaccgccctccgcgcccagttccgccggcgcttccccggcggctcccgggcgctgactctcccgggcttttccgcctttctcgctcccgccccgccgggcggttcggcggccggtccccggaccccgccgggagctgctcgtctcaccctcgccacggcgcggacaataaattaatgcatcgcgcttgagtggagggggcggctgggcgcctcggtggtagctttctctcctggctggagacgaccacaaccgacatgggctgtttctgcgctgttccggaagaattttactgcgaagttttgctcctggatgaatccaagttaacccttaccacccagcagcagggcatcaagaagtcaacgaaaggttccgttgtccttgaccacgtattccatcacgtaaaccttgtggagatagattattttgggctacgttactgtgacagaagccatcagacgtattggctggatcctgcaaaaacccttgctgaacacaaagaactgatcaacactggacctccatatactttgtattttggtattaaattctatgctgaagatccatgtaaacttaaagaagaaataaccagatatcagtttttcttgcaggtgaagcaagatgtccttcagggccgtctgccctgtcccgtcaacactgctgctcagctgggagcgtatgccatccagtcggagcttggagattatgacccatataaacatactgcaggatatgtatctgagtaccggtttgttcctgatcagaaggaagaacttgaagaagccatagaaaggattcataaaactctaatgggtcagattccttctgaggctgagctgaattacttgaggactgccaaatccctggagatgtatggcgttgacctccatcccgtctatggagaaaacaagtctgagtatttcttaggattaactccggttggtgttgttgtgtacaagaataaaaagcaagtggggaagtatttctggcctcggattacaaaggttcacttcaaggagactcaatttgaactcagagtactgggaaaagattgtaacgaaacctcattcttttttgaagctcggagtaaaactgcttgcaagcacctctggaagtgcagtgtggaacatcatacattttttagaatgccagaaaatgaatccaattcactgtcaagaaaactcagcaagtttggatccatacgttataagcaccgctacagtggcaggacagctttgcaaatgagccgagatctttctattcagcttccccggcctgatcagaatgtgacaagaagtcgaagcaagacttaccctaagcgaatagcacaaacacagccagctgaatcaaacaccatcagtaggataactgcaaacatggaaaatggagaaaatgaaggaacaattaaaattattgcaccttcaccagtaaaaagctttaagaaagcaaagaatgaaaatagccctgatacccaaagaagcaaatctcatgcaccgtgggaagaaaatggcccccagagtggactctacaattctcccagtgatcgcactaagtcgccaaagttcccttacacgcgtcgccgaaacccctcctgtggaagtgacaatgattctgtacagcctgtgaggaggaggaaagcccataacagtggtgaagattcagatcttaagcaaaggaggaggtcacgttcacgctgtaacaccagcagtggtagtgaatcagaaaattctaatagagaacaccggaaaaagagaaacagaatacggcaggagaatgatatggttgattcagcgcctcagtgggaagctgtattaaggagacaaaaggaaaaaaaccaagccgaccccaacagcaggcgatccagacacagatctcgttcgagaagccccgatatccaagcaaaagaagagttatggaagcacattcaaaaagaacttgtggatccatccggattgtccgaagaacaattaaaagagattccatacactaaaatagagtgagtgcctttcagaatcttctcaccaaagctttattagtgcttgacacaaggtgacccaatccgcatcaggcattctcattcgccacgaagttaccgccagtatcgcaggtcccagtgttcagatggggagcgatcagttctctcggaagtgaattcaaaaacagatcttgtaccaccacttccggtgacccattcttcggatgctcagggttctggggatgctacagttcatcagagaagaaatgggtctaaagatagcctgatggaagaaaaacctcagacatctacaaacaacctggctggaaaacacacagcaaaaacaataaaaactatacaagcttcccgcctcaagacagaaaatt

SEQ ID NO: 290773 - DNA, 410 bp, Homo sapiens
gaaagatgatactaggtcaggaaatagcatttgaaagtcattctcatctggagggatgaagccaagataaggcggaacagaggaaaagctttaagaaagcaaagaatgaaaatagccctgatacccaaagaagcaaatctcatgcaccgtgggaagaaaatggcccccagagtggactctacaattctcccagtgatcgcactaagtcgccaaagttcccttacacgcgtcgccgaaacccctcctgtggaagtgacaatgattctgtacagcctgtgaggaggagggaaagcccattaacagtgggtgaagtttcagatctttaaggcaaagggagggaggttcacgttttcacggttgtttaaccacccagcagttggttagttgatttccggaaaattttcttaatt

SEQ ID NO: 290774 - DNA, 2339 bp, Homo sapiens
agccgcaggatgcgcggggacgcgccaccgccctccgcgcccagttccgccggcgcttccccggcggctcccgggcgctgactctcccgggcttttccgcctttctcgctcccgccccgccgggcggttcggcggccggtccccggaccccgccgggagctgctcgtctcaccctcgccacggcgcggacaataaattaatgcatcgcgcttgagtggagggggcggctgggcgcctcggtggtagctttctctcctggctggagacgaccacaaccgacatgggctgtttctgcgctgttccggaagaattttactgcgaagttttgctcctggatgaatccaagttaacccttaccacccagcagcagggcatcaagaagtcaacgaaaggttccgttgtccttgaccacgtattccatcacgtaaaccttgtggagatagattattttgggctacgttactgtgacagaagccatcagacgtattggctggatcctgcaaaaacccttgctgaacacaaagaactgatcaacactggacctccatatactttgtattttggtattaaattctatgctgaagatccatgtaaacttaaagaagaaataaccagatatcagtttttcttgcaggtgaagcaagatgtccttcagggccgtctgccctgtcccgtcaacactgctgctcagctgggagcgtatgccatccagtcggagcttggagattatgacccatataaacatactgcaggatatgtatctgagtaccggtttgttcctgatcagaaggaagaacttgaagaagccatagaaaggattcataaaactctaatgggtcagattccttctgaggctgagctgaattacttgaggactgccaaatccctggagatgtatggcgttgacctccatcccgtctatggagaaaacaagtctgagtatttcttaggattaactccggttggtgttgttgtgtacaagaataaaaagcaagtggggaagtatttctggcctcggattacaaaggttcacttcaaggagactcaatttgaactcagagtactgggaaaagattgtaacgaaacctcattcttttttgaagctcggagtaaaactgcttgcaagcacctctggaagtgcagtgtggaacatcatacattttttagaatgccagaaaatgaatccaattcactgtcaagaaaactcagcaagtttggatccatacgttataagcaccgctacagtggcaggacagctttgcaaatgagccgagatctttctattcagcttccccggcctgatcagaatgtgacaagaagtcgaagcaagacttaccctaagcgaatagcacaaacacagccagctgaatcaaacaccatcagtaggataactgcaaacatggaaaatggagaaaatgaaggaacaattaaaattattgcaccttcaccagtaaaaagctttaagaaagcaaagaatgaaaatagccctgatacccaaagaagcaaatctcatgcaccgtgggaagaaaatggcccccagagtggactctacaattctcccagtgatcgcactaagtcgccaaagttcccttacacgcgtcgccgaaacccctcctgtggaagtgacaatgattctgtacagcctgtgaggaggaggaaagcccataacagtggtgaagattcagatcttaagcaaaggaggaggtcacgttcacgctgtaacaccagcagtggtagtgaatcagaaaattctaatagagaacaccggaaaaagagaaacagaatacggcaggagaatgatatggttgattcagcgcctcagtgggaagctgtattaaggagacaaaaggaaaaaaaccaagccgaccccaacagcaggcgatccagacacagatctcgttcgagaagccccgatatccaagcaaaagaagagttatggaagcacattcaaaaagaacttgtggatccatccggattgtccgaagaacaattaaaagagattccatacactaaaatagagacacaaggtgacccaatccgcatcaggcattctcattcgccacgaagttaccgccagtatcgcaggtcccagtgttcagatggggagcgatcagttctctcggaagtgaattcaaaaacagatcttgtaccaccacttccggtgacccattcttcggatgctcagggttctggggatgctacagttcatcagagaagaaatgggtctaaagatagcctgatggaagaaaaacctcagacatctacaaacaacctggctggaaaacacacagcaaaaacaataaaaactatacaagcttcccgcctcaagacagaaaatt

SEQ ID NO: 290775 - DNA, 2313 bp, Homo sapiens
agccgcaggatgcgcggggacgcgccaccgccctccgcgcccagttccgccggcgcttccccggcggctcccgggcgctgactctcccgggcttttccgcctttctcgctcccgccccgccgggcggttcggcggccggtccccggaccccgccgggagctgctcgtctcaccctcgccacggcgcggacaataaattaatgcatcgcgcttgagtggagggggcggctgggcgcctcggtggtagctttctctcctggctggagacgaccacaaccgacatgggctgtttctgcgctgttccggaagaattttactgcgaagttttgctcctggatgaatccaagttaacccttaccacccagcagcagggcatcaagaagtcaacgaaaggttccgttgtccttgaccacgtattccatcacgtaaaccttgtggagatagattattttgggctacgttactgtgacagaagccatcagacgtattggctggatcctgcaaaaacccttgctgaacacaaagaactgatcaacactggacctccatatactttgtattttggtattaaattctatgctgaagatccatgtaaacttaaagaagaaataaccagatatcagtttttcttgcaggtgaagcaagatgtccttcagggccgtctgccctgtcccgtcaacactgctgctcagctgggagcgtatgccatccagtcggagcttggagattatgacccatataaacatactgcaggatatgtatctgagtaccggtttgttcctgatcagaaggaagaacttgaagaagccatagaaaggattcataaaactctaatgggtcagattccttctgaggctgagctgaattacttgaggactgccaaatccctggagatgtatggcgttgacctccatcccgtctatggagaaaacaagtctgagtatttcttaggattaactccggttggtgttgttgtgtacaagaataaaaagcaagtggggaagtatttctggcctcggattacaaaggttcacttcaaggagactcaatttgaactcagagtactgggaaaagattgtaacgaaacctcattcttttttgaagctcggagtaaaactgcttgcaagcacctctggaagtgcagtgtggaacatcatacattttttagaatgccagaaaatgaatccaattcactgtcaagaaaactcagcaagtttggatccatacgttataagcaccgctacagtggcaggacagctttgcaaatgagccgagatctttctattcagcttccccggcctgatcagaatgtgacaagaagtcgaagcaagacttaccctaagcgaatagcacaaacacagccagctgaatcaaacaccatcagtaggataactgcaaacatggaaaatggagaaaatgaaggaacaattaaaattattgcaccttcaccagtaaaaagctttaagaaagcaaagaatgaaaatagccctgatacccaaagaagcaaatctcatgcaccgtgggaagaaaatggcccccagagtggactctacaattctcccagtgatcgcactaagtcgccaaagttcccttacacgcgtcgccgaaacccctcctgtggaagtgacaatgattctgtacagcctgtgaggaggaggaaagcccataacagtggtgaagattcagatcttaagcaaaggaggaggtcacgttcacgctgtaacaccagcagtggtagtgaatcagaaaattctaatagagaacaccggaaaaagagaaacagaatacggcaggagaatgatatggttgattcagcgcctcagtgggaagctgtattaaggagacaaaaggaaaaaaaccaagccgaccccaacagcaggcgatccagacacagatctcgttcgagaagccccgatatccaagcaaaagaagagttatggaagcacattcaaaaagaacttgtggatccatccggattgtccgaagaacaattaaaagagattccatacactaaaatagagtgagtgcctttcagaatcttctcaccaaagctttattagtgcttgtgagtaatccattctaattcttcaattgtgttccagacagtgctttaatttgtctttacattttaaccaaaactaggtgacagtagcgaaagaggaagaaaagtgtgcattaaagctacttattctacactataatcactatcatctcttattagccacctctttgtacttggtaggtacaagggggcttttcctgattaatgtcagttttaaaataaattcttttctgagattctcactgaaaaaat

SEQ ID NO: 290776 - DNA, 969 bp, Homo sapiens
gaaagatgatactaggtcaggaaatagcatttgaaagtcattctcatctggagggatgaagccaagataaggcggaacagaggaaaagctttaagaaagcaaagaatgaaaatagccctgatacccaaagaagcaaatctcatgcaccgtgggaagaaaatggcccccagagtggactctacaattctcccagtgatcgcactaagtcgccaaagttcccttacacgcgtcgccgaaacccctcctgtggaagtgacaatgattctgtacagcctgtgaggaggaggaaagcccataacagtggtgaagattcagatcttaagcaaaggaggaggtcacgttcacgctgtaacaccagcagtggtagtgaatcagaaaattctaatagagaacaccggaaaaagagaaacagaatacggcaggagaatgatatggttgattcagcgcctcagtgggaagctgtattaaggagacaaaaggaaaaaaaccaagccgaccccaacagcaggcgatccagacacagatctcgttcgagaagccccgatatccaagcaaaagaagagttatggaagcacattcaaaaagaacttgtggatccatccggattgtccgaagaacaattaaaagagattccatacactaaaatagagacacaaggtgacccaatccgcatcaggcattctcattcgccacgaagttaccgccagtatcgcaggtcccagtgttcagatggggagcgatcagttctctcggaagtgaattcaaaaacagatcttgtaccaccacttccggtgacccattcttcggatgctcagggttctggggatgctacagttcatcagagaagaaatgggtctaaagatagcctgatggaagaaaaacctcagacatctacaaacaacctggctggaaaacacacagcaaaaacaataaaaactatacaagcttcccgcctcaagacagaaaatt

SEQ ID NO: 290777 - DNA, 1386 bp, Homo sapiens
cgggcgggatcagcgagcgtcgcgatgtgatgacgtcaggccccggacaggccgggagtggcgtgctgggcgtgcgcggctgcggtacggcgtgttggtcccagcggttcagctgaggtagggacgtgctgtaggccggaatgttaccggctgttggatctgcggatgaggaggaggatcctgcggaggaggattgtcctgaattggttcccattgagacgacgcaaagcgaggaggaggaaaagtctggcctcggcgccaagatcccagtcacaattatcaccgggtatttaggtgctgggaagacaacacttctgaactatattttgacagagcaacatagtaaaagagtagcggtcattttaaatgaatttggggaaggaagtgcgctggagaaatccttagctgtcagccaaggtggagagctctatgaagagtggctggaacttagaaacggttgcctctgctgttcagtgaaggacagtggccttagagctattgagaatttgatgcaaaagaaggggaaatttgattacatactgttagagaccactggattagcagaccctggtgcagtggcttctatgttttgggttgatgctgaattagggagtgatatttatcttgatggtatcataactattgtggattcaaaatatggattaaaacatttaacagaagagaaacctgatggccttatcaatgaagctactaggcaagttgctttggcagatgccattctcattaataaaacagacctggttccagaagaagatgtaaagaaattaagaacgacaattagatccataaatggactaggacaaatcttagaaacacaaagatcaagagttgatctctctaatgtattagatcttcatgcctttgatagtctctctggaataagtttgcagaaaaaacttcagcatgtgccaggaacacaacctcaccttgatcagagtattgttacaatcacatttgaagtaccaggaaatgcaaaggaagaacatcttaatatgtttattcagaatctcctgtgggaaaagaatgtgagaaacaaggacaatcactgcatggaggtcataaggctgaagggattggtgtcaatcaaagacaaatcacaacaagtgattgtccagggtgtccatgagctctatgatctggaggagactccagtgagctggaaggatgacactgagagaacaaatcgattggtcctccttggcagaaatttagataaggatatccttaaacagctgtttatagctactgtgacagaaacagaaaagcagtggacaacacgtttccaagaagatcaagtttgtacataacactagaggcatttcttatcaaaaggattggataataaaaataagtttctactgggta

SEQ ID NO: 290778 - DNA, 1255 bp, Homo sapiens
ctgcaggaattggcacgagactggtcccagcggttcagctgaggtagggacgtgctgtaggccggaatgttaccggctgttggatctgcggatgaggaggaggatcctgcggaggaggattgtcctgaattggttcccattgagacgacgcaaagcgaggaggaggaaaagtctggcctcggcgccaagatcccagtcacaattatcaccgggtatttaggtgctgggaagacaacacttctgaactatattttgacagagcaacatagtaaaagagtagcggtcattttaaatgaatttggggaaggaagtgcgctggagaaatccttagctgtcagccaaggtggagagctctatgaagagtggctggaacttagaaacggttgcctctgctgttcagtgaaggacagtggccttagagctattgagaatttgatgcaaaagaaggggaaatttgattacatactgttagagaccactggattagcagaccctggtgcagtggcttctatgttttgggttgatgctgaattagggagtgatatttatcttgatggtatcataactattgtggattcaaaatatggattaaaacatttaacagaagagaaacctgatggccttatcaatgaagctactaggcaagttgctttggcagatgccattctcattaataaaacagacctggttccagaagaagatgtaaagaaattaagaacgacaattagatccataaatggactaggacaaatcttagaaacacaaagatcaagtttgcagaaaaaacttcagcatgtgccaggaacacaacctcaccttgatcagagtattgttacaatcacatttgaagtaccaggaaatgcaaaggaagaacatcttaatatgtttattcagaatctcctgtgggaaaagaatgtgagaaacaaggacaatcactgcatggaggtcataaggctgaagggattggtgtcaatcaaagacaaatcacaacaagtgattgtccagggtgtccatgagctctatgatctggaggagactccagtgagctggaaggatgacactgagagaacaaatcgattggtcctccttggcagaaatttagataaggatatccttaaacagctgtttatagctactgtgacagaaacagaaaagcagtggacaacacgtttccaagaagatcaagtttgtacataacactagaggcatttcttatcaaaaggattggataataaaaataagtttctactgggta

SEQ ID NO: 290779 - DNA, 1419 bp, Homo sapiens
cgggcgggatcagcgagcgtcgcgatgtgatgacgtcaggccccggacaggccgggagtggcgtgctgggcgtgcgcggctgcggtacggcgtgttggtcccagcggttcagctgaggtagggacgtgctgtaggccggaatgttaccggctgttggatctgcggatgaggaggaggatcctgcggaggaggattgtcctgaattggttcccattgagacgacgcaaagcgaggaggaggaaaagtctggcctcggcgccaagatcccagtcacaattatcaccgggtatttagttattcagaggctgctctgctgagaagatgaacaaatttcttgtccaaaacaatgtatttcaaacgtgccgctcgggcctttcccgtattgctcactggtgctgggaagacaacacttctgaactatattttgacagagcaacatagtaaaagagtagcggtcattttaaatgaatttggggaaggaagtgcgctggagaaatccttagctgtcagccaaggtggagagctctatgaagagtggctggaacttagaaacggttgcctctgctgttcagtgaagtgaggaatgtgtttactgtgtacatggtttactagaaatgtttattgattatatttccagctttaattttcttgagtaatttaactgaatttacacagtttgcttcattgtattttcaaacaaatagaaaataaacttattaggaagcattttcttaaagtgtttcttgctgtcttttctatctgctctaatgttttggtccttttattgagtttttattgcttttgatgtcagggcttatttaatctctagtgcatgaaagtctcatatgtaaaaaatgattattctgaatttaatctgtcattggtcatacttctaagtgttcaatcttataaaaaaaataaatgactatcaaaaaagagaaaaaccttacgttatgttctactagttaagttttcaaggacagtgttcactagtctaccatagaccctagaagagttacccaacacatagtagcactcaaatatttgttgaatgaattataaaaatgactacttgtactgttaattttgtgtattctagtgaattaaatctcttcggcatcatttactcccttaggtatttgactttgtgtcaaatgttttggcaaggataaaattataacagactttcttgaacaaccaaaatataatctattaaggattttccttcacttttgataaaataagaaaaaaggaaattaaaaccttgcatcctaatgtaaaatagaattatatggtgtttaatatcagtgtctctttagctattatattaaactactatagttaatacattttatcattattttgtatgttggtttttaaaaatttcataaagctataaaaagatacttggtcagataa

SEQ ID NO: 290780 - DNA, 806 bp, Homo sapiens
  misc_feature (760)..(760): n is a, c, g, or t
  misc_feature (772)..(772): n is a, c, g, or t
  misc_feature (803)..(803): n is a, c, g, or t
cgggcgggatcagcgagcgtcgcgatgtgatgacgtcaggccccggacaggccgggagtggcgtgctgggcgtgcgcggctgcggtacggcgtgttggtcccagcggttcagctgaggtagggacgtgctgtaggccggaatgttaccggctgttggatctgcggatgaggaggaggatcctgcggaggaggattgtcctgaattggttcccattgagacgacgcaaagcgaggaggaggaaaagtctggcctcggcgccaagatcccagtcacaattatcaccgggtatttaggtgctgggaagacaacacttctgaactatattttgacagagcaacatagtaaaagagtagcggtcattttaaatgaatttggggaaggaagtgcgctggagaaatccttagctgtcagccaaggtggagagctctatgaagagtggctggaacttagaaacggttgcctctgctgttcagtgaaggacagtggccttagagctattgagaatttgatgcaaaagaaggggaaatttgattacatactgttagagaccactggattagcagaccctggtgcagtggcttctatgttttgggttgatgctgaattagggagtgatatttatcttgatggtatcataactattgtggattcaaaatatggattaaaacatttaacagaagagaaacctgatggccttatcaatgaagctactagacaagttgctttggcagaaattgggcccccccccaattttttttnccctttttcccnaaaattttttttttaaaaaaaaatttttttnaaa

SEQ ID NO: 290781 - DNA, 617 bp, Homo sapiens
cgggcgggatcagcgagcgtcgcgatgtgatgacgtcaggccccggacaggccgggagtggcgtgctgggcgtgcgcggctgcggtacggcgtgttggtcccagcggttcagctgaggtagggacgtgctgtaggccggaatgttaccggctgttggatctgcggatgaggaggaggatcctgcggaggaggattgtcctgaattggttcccattgagacgacgcaaagcgaggaggaggaaaagtctggcctcggcgccaagatcccagtcacaattatcaccgggtatttaggtaactaacgatcccagtcactggcgtgacctctggtgtcatgggattttgcgggctgccggtgcctcttctcctgaggcatggggcctcatgatcaagagcaaatgtcttcgaggtcggggctggtcattgcttctcgtatgggttgcctctcatcttgggagttaatgatgcccggccccctctgcgttagattcccattctcaagtgagatggaaattagcctttgaagcaaggctttgacgctaagacacgcccccctttgtctctgtgactcttaccagttatcttacttccgacgctcatctacctcactgaggagt

SEQ ID NO: 290782 - DNA, 222 bp, Homo sapiens
atatttaaaaagccttcttagtgttttatagttgccaaaaaatacatggagtctttaccttgaagttcctgacaaattcttttattaaattttgactttcattttctctaggttctgttcctaaaacatctgtgaagtgtatttctgtagattaaattctgttttccattgaatgttatcttaatttcagaaaatttctgtgcagggttattttattaagct

SEQ ID NO: 290783 - DNA, 1748 bp, Homo sapiens
cgggcgggatcagcgagcgtcgcgatgtgatgacgtcaggccccggacaggccgggagtggcgtgctgggcgtgcgcggctgcggtacggcgtgttggtcccagcggttcagctgaggtagggacgtgctgtaggccggaatgttaccggctgttggatctgcggatgaggaggaggatcctgcggaggaggattgtcctgaattggttcccattgagacgacgcaaagcgaggaggaggaaaagtctggcctcggcgccaagatcccagtcacaattatcaccgggtatttaggtgctgggaagacaacacttctgaactatattttgacagagcaacatagtaaaagagtagcggtcattttaaatgaatttggggaaggaagtgcgctggagaaatccttagctgtcagccaaggtggagagctctatgaagagtggctggaacttagaaacggttgcctctgctgttcagtgaaggacagtggccttagagctattgagaatttgatgcaaaagaaggggaaatttgattacatactgttagagaccactggattagcagaccctggtgcagtggcttctatgttttgggttgatgctgaattagggagtgatatttatcttgatggtatcataactattgtggattcaaaatatggattaaaacatttaacagaagagaaacctgatggccttatcaatgaagctactaggcaagttgctttggcagatgccattctcattaataaaacagacctggttccagaagaagatgtaaagaaattaagaacgacaattagatccataaatggactaggacaaatcttagaaacacaaagatcaagagttgatctctctaatgtattagatcttcatgcctttgatagtctctctggaataagtttgcagaaaaaacttcagcatgtgccaggaacacaacctcaccttgatcagagtattgttacaatcacatttgaagtaccaggaaatgcaaaggaagaacatcttaatatgtttattcagaatctcctgtgggaaaagaatgtgagaaacaaggacaatcactgcatggaggtcataaggctgaagggattggtgtcaatcaaagacaaatcacaacaagtgattgtccagggtgtccatgagctctatgatctggaggagactccagtgagctggaaggatgacactgagagaacaaatcgattggtcctccttggcagaaatttagataaggatatccttaaacagctgtttatagctactgtgacagaaacagaaaagcagtggacaacacgtttccaagaagatcaagtttgtacataacactagaggcatttcttatcaaaaggattggataataaaaataagtttctactgggtatatttcaagcatttatttattactttagttacgaattccaatatactttaaaatggtatttgttttacagcatacataaaatgtagcaaatcagtactgtaaaacatttaacattcatacagttatatataatatccttttttttaaagaatggtatttcacaaaaatatcttttgaaattggctttggagtttacatatactgaacatgaaagtttataataatgatgatacaactttcaacattgtcattttttcttagaacttcagctgattgcagagatataatgattacattgttattaaatttttttaacacaagtaagtgtcaccattttatgacatgaaataaaaggttatgac

SEQ ID NO: 290784 - DNA, 1484 bp, Homo sapiens
cgggcgggatcagcgagcgtcgcgatgtgatgacgtcaggccccggacaggccgggagtggcgtgctgggcgtgcgcggctgcggtacggcgtgttggtcccagcggttcagctgaggtagggacgtgctgtaggccggaatgttaccggctgttggatctgcggatgaggaggaggatcctgcggaggaggattgtcctgaattggttcccattgagacgacgcaaagcgaggaggaggaaaagtctggcctcggcgccaagatcccagtcacaattatcaccgggtatttagttattcagaggctgctctgctgagaagatgaacaaatttcttgtccaaaacaatgtatttcaaacgtgccgctcgggcctttcccgtattgctcactggtgctgggaagacaacacttctgaactatattttgacagagcaacatagtaaaagagtagcggtcattttaaatgaatttggggaaggaagtgcgctggagaaatccttagctgtcagccaaggtggagagctctatgaagagtggctggaacttagaaacggttgcctctgctgttcagtgaaggacagtggccttagagctattgagaatttgatgcaaaagaaggggaaatttgattacatactgttagagaccactggattagcagaccctggtgcagtggcttctatgttttgggttgatgctgaattagggagtgatatttatcttgatggtatcataactattgtggattcaaaatatggattaaaacatttaacagaagagaaacctgatggccttatcaatgaagctactaggcaagttgctttggcagatgccattctcattaataaaacagacctggttccagaagaagatgtaaagaaattaagaacgacaattagatccataaatggactaggacaaatcttagaaacacaaagatcaagagttgatctctctaatgtattagatcttcatgcctttgatagtctctctggaataagtttgcagaaaaaacttcagcatgtgccaggaacacaacctcaccttgatcagagtattgttacaatcacatttgaagtaccaggaaatgcaaaggaagaacatcttaatatgtttattcagaatctcctgtgggaaaagaatgtgagaaacaaggacaatcactgcatggaggtcataaggctgaagggattggtgtcaatcaaagacaaatcacaacaagtgattgtccagggtgtccatgagctctatgatctggaggagactccagtgagctggaaggatgacactgagagaacaaatcgattggtcctccttggcagaaatttagataaggatatccttaaacagctgtttatagctactgtgacagaaacagaaaagcagtggacaacacgtttccaagaagatcaagtttgtacataacactagaggcatttcttatcaaaaggattggataataaaaataagtttctactgggta

SEQ ID NO: 290785 - DNA, 1284 bp, Homo sapiens
cgggcgggatcagcgagcgtcgcgatgtgatgacgtcaggccccggacaggccgggagtggcgtgctgggcgtgcgcggctgcggtacggcgtgttggtcccagcggttcagctgaggtagggacgtgctgtaggccggaatgttaccggctgttggatctgcggatgaggaggaggatcctgcggaggaggattgtcctgaattggttcccattgagacgacgcaaagcgaggaggaggaaaagtctggcctcggcgccaagatcccagtcacaattatcaccgggtatttaggtgctgggaagacaacacttctgaactatattttgacagagcaacatagtaaaagagtagcggtcattttaaatgaatttggggaaggaagtgcgctggagaaatccttagctgtcagccaaggtggagagctctatgaagagtggctggaacttagaaacggttgcctctgctgttcagtgaaggacagtggccttagagctattgagaatttgatgcaaaagaaggggaaatttgattacatactgttagagaccactggattagcagaccctggtgcagtggcttctatgttttgggttgatgctgaattagggagtgatatttatcttgatggtatcataactattgtggattcaaaatatggattaaaacatttaacagaagagaaacctgatggccttatcaatgaagctactaggcaagttgctttggcagatgccattctcattaataaaacagacctggttccagaagaagatgtaaagaaattaagaacgacaattagtttgcagaaaaaacttcagcatgtgccaggaacacaacctcaccttgatcagagtattgttacaatcacatttgaagtaccaggaaatgcaaaggaagaacatcttaatatgtttattcagaatctcctgtgggaaaagaatgtgagaaacaaggacaatcactgcatggaggtcataaggctgaagggattggtgtcaatcaaagacaaatcacaacaagtgattgtccagggtgtccatgagctctatgatctggaggagactccagtgagctggaaggatgacactgagagaacaaatcgattggtcctccttggcagaaatttagataaggatatccttaaacagctgtttatagctactgtgacagaaacagaaaagcagtggacaacacgtttccaagaagatcaagtttgtacataacactagaggcatttcttatcaaaaggattggataataaaaataagtttctactgggta

SEQ ID NO: 290786 - DNA, 1302 bp, Homo sapiens
cgggcgggatcagcgagcgtcgcgatgtgatgacgtcaggccccggacaggccgggagtggcgtgctgggcgtgcgcggctgcggtacggcgtgttggtcccagcggttcagctgaggtagggacgtgctgtaggccggaatgttaccggctgttggatctgcggatgaggaggaggatcctgcggaggaggattgtcctgaattggttcccattgagacgacgcaaagcgaggaggaggaaaagtctggcctcggcgccaagatcccagtcacaattatcaccgggtatttaggtgctgggaagacaacacttctgaactatattttgacagagcaacatagtaaaagagtagcggtcattttaaatgaatttggggaaggaagtgcgctggagaaatccttagctgtcagccaaggtggagagctctatgaagagtggctggaacttagaaacggttgcctctgctgttcagtgaaggacagtggccttagagctattgagaatttgatgcaaaagaaggggaaatttgattacatactgttagagaccactggattagcagaccctggtgcagtggcttctatgttttgggttgatgctgaattagggagtgatatttatcttgatgtcataactatcgtggattcgaccaatatggcttcacaccatttaacaagaaggagaaacctgatggccttatcatgaagctactagatccatacatggactagggacaaatcttagaaacccaacagatcacgagttgatctctctaatgtattagatcttcatgcctttgatagtctctctggaataagtttgcagaaaaaacttcagcatgtgccaggaacacaacctcaccttgatcagagtattgttacaatcacatttgaagtaccaggaaatgcaaaggaagaacatcttaatatgtttattcagaatctcctgtgggaaaagaatgtgagaaacaaggacaatcactgcatggaggtcataaggctgaagggattggtgtcaatcaaagacaaatcacaacaagtgattgtccagggtgtccatgagctctatgatctggaggagactccagtgagctggaaggatgacactgagagaacaaatcgattggtcctccttggcagaaatttagataaggatatccttaaacagctgtttatagctactgtgacagaaacagaaaagcagtggacaacacgtttccaagaagatcaagtttgtacataacactagaggcatttcttatcaaaaggattggataataaaaataagtttctactgggta

SEQ ID NO: 290787 - DNA, 1321 bp, Homo sapiens
cgggcgggatcagcgagcgtcgcgatgtgatgacgtcaggccccggacaggccgggagtggcgtgctgggcgtgcgcggctgcggtacggcgtgttggtcccagcggttcagctgaggtagggacgtgctgtaggccggaatgttaccggctgttggatctgcggatgaggaggaggatcctgcggaggaggattgtcctgaattggttcccattgagacgacgcaaagcgaggaggaggaaaagtctggcctcggcgccaagatcccagtcacaattatcaccgggtatttaggtgctgggaagacaacacttctgaactatattttgacagagcaacatagtaaaagagtagcggtcattttaaatgaatttggggaaggaagtgcgctggagaaatccttagctgtcagccaaggtggagagctctatgaagagtggctggaacttagaaacggttgcctctgctgttcagtgaagtgaggaatgtgtttactgtgtacatggtttactagaaatgtttattgattatatttccagctttaattttcttgagtaatttaactgaatttacacagtttgcttcattgtattttcaaacaaatagaaaataaacttattaggaagcattttcttaaagtgtttcttgctgtcttttctatctgctctaatgttttggtccttttattgagtttttattgcttttgatgtcagggcttatttaatctctagtgcatgaaagtctcatatgtaaaaaatgattattctgaatttaatctgtcattggtcatacttctaagtgttcaatcttataaaaaaaataaatgactatcaaaaaagagaaaaaccttacgttatgttctactagttaagttttcaaggacagtgttcactagtctaccatagaccctagaagagttacccaacacatagtagcactcaaatatttgttgaatgaattataaaaatgactacttgtactgttaattttgtgtattctagtgaattaaatctcttcggcatcatttactcccttaggtatttgactttgtgtcaaatgttttggcaaggataaaattataacagactttcttgaacaaccaaaatataatctattaaggattttccttcacttttgataaaataagaaaaaaggaaattaaaaccttgcatcctaatgtaaaatagaattatatggtgtttaatatcagtgtctctttagctattatattaaactactatagttaatacattttatcattattttgtatgttggtttttaaaaatttcataaagctataaaaagatacttggtcagataa

SEQ ID NO: 290788 - DNA, 1057 bp, Homo sapiens
cgggcgggatcagcgagcgtcgcgatgtgatgacgtcaggccccggacaggccgggagtggcgtgctgggcgtgcgcggctgcggtacggcgtgttggtcccagcggttcagctgaggtagggacgtgctgtaggccggaatgttaccggctgttggatctgcggatgaggaggaggatcctgcggaggaggattgtcctgaattggttcccattgagacgacgcaaagcgaggaggaggaaaagtctggcctcggcgccaagatcccagtcacaattatcaccgggtatttaggtgctgggaagacaacacttctgaactatattttgacagagcaacatagtaaaagagtagcggtcattttaaatgaatttggggaaggaagtgcgctggagaaatccttagctgtcagccaaggtggagagctctatgaagagtggctggaacttagaaacggttgcctctgctgttcagtgaaggacagtggccttagagctattgagaatttgatgcaaaagaaggggaaatttgattacatactgttagagaccactggattagcagaccctggtaagaagtgagattattaataaccagaatatagttctgtgatatattgtaaatagatgtattagaggaatatctaaaatgaggattaaagcttttgttagtattaaaccaaaaactttttttggtttaaaagaggaaaagtactcggttgtcattttctttggcagttgaatgaatgaacagagtatttcttggtacttttaagctgttaatagaatttgaagttttattgattgacttaggattatttgtaagaacagaagttgttaaaaataaggacatgtaggaagagcagagacgttctacctctaagtacagttgtcccttggcatccatggggtattagttccggaatctctgaggataccaaaatctattaatgttcaagtcccttacataaaatggtgtagtatttgcctataagctatgcacatcctcccatatactttaaatcatctgtagattacttataatacctaatacaatg

SEQ ID NO: 290789 - DNA, 395 bp, Homo sapiens
attttctcagcttaagagtttgtattttttaagtgaatatcagtaattaatccattaacattgatgctctatttctgcttttaagtttgaactgaggctgattaatgttcagtcaattctcctttgagcagggattggtgtcaatcaaagacaaatcacaacaagtgattgtccagggtgtccatgagctctatgatctggaggagactccagtgagctggaaggatgacactgagagaacaaatcgattggtcctccttggtaagtctcaaaggattcacagttttaaaacaaagtgaaaaatatatttgaaagggatatcatgtgccacttaaacagattaaccattcaggtcctcttttaaaactaaataagcttgtggtcaatgtttcatc

SEQ ID NO: 290790 - DNA, 622 bp, Homo sapiens
atgtgatttattgtttgaaggaaaatcacaattattttttaaagcaagttttgtttttctgtttttaatttttttctggttccagatgtatttgggtatgcttatttcctgttttagaaacaatatactttgtatacttttttaaaaagttaatttttacttttaaactttgtcttcctcatttattatttatttcagatccataaatggactaggacaaatcttagaaacacaaagatcaaggtactttaaaaaagctattcctattaataacaaatcattttagttattaataataaacattaaataattgacaaatatgcttgattctaatataagaaagatctaagtgcatttaaaaagaattggatccaaaatgttgtttggaatgctcttaataagttagtttggcatatttggctagtacatttgcctgtcttcaaaactaagaatacaaagccatgataacactgtgtaagtgtttgcttaatgaggaagaaaagacttccaaacactcgagagggtaactcagtacagaaatctgaagtatattgaggaatcttaatttgaagtgtttaaatggctttttaatatttaaaaagccttcttagtgttttatagt

SEQ ID NO: 290791 - DNA, 398 bp, Homo sapiens
cagaagaggctgtaccggccacttacagcttcccgcacgttattctggatgctcctgggatcccacagcaagcccaggtgcagccccagccgcctcccctgtgcagcacgtcctggagtcacgggcagggccctcacccacagtggggtcgccatcggtgagcaggatgatgagtgagacactcccttcgggcagccgctcctcctggttgctgctgtccagcaactgcacagccatcagcattgcatcattgatgttggtccctgaggaacacgcactctcaagtatttcagatggtttatactaaaaagttcagacatcataaacctgacaaccatcaaaagagggaagacttcaaaaacatggagtaaaagggaagtataataacaatggcagaa

SEQ ID NO: 290792 - DNA, 2115 bp, Homo sapiens
  misc_feature (1529)..(1529): n is a, c, g, or t
gggggtcgctgtgcctgtccccgtgtgatccgaaaagtgctggcaaaatgcggctgctgcttcgcccgggggggacgtggggtgccctggtgaaattttctatcctggccaactcaaatgaggatggcaagagagtgagcccttggagagagaggctgagcatcatgaagagaagaccctgggagttccctggggaccctgagtctggagctggggcaaggccccccagggcccgtcagtggcctgaggagatggttggatcattccaaacattgtctcagtgtggaaactgaggcagacagtggtcaggcaggaccatatgagaactggatgttggagccagctctagccacaggagaggagctgccggaactgaccttgctgaccacactgttggagggccctggagataagacgcagccacctgaagaggagactttgtcccaagcccctgagagtgaggaggaacagaagaagaaggctctggaaaggagtatgtatgtcctgagtgaactggtagaaacagagaaaatgtacgtggacgacttggggcagattgtggagggttatatggccaccatggctgctcagggggtccccgagagtcttcgaggccgtgacaggattgtgtttgggaatatccagcaaatctatgagtggcaccgagactatttcttgcaagagctacaacggtgtctgaaagatcctgattggctggctcagctattcatcaaacacgagcgccggctgcatatgtatgtggtgtactgtcagaataagcccaagtcagagcatgtggtgtcagagtttggggacagctactttgaggagctccggcagcagctggggcaccgcctgcagctgaacgacctcctcatcaaacctgtgcagcggatcatgaaataccagctgctgctcaaggattttctcaagtattacaatagagctgggatggatactgcagacctagagcaagctgtggaggtcatgtgctttgtgcccaagcgctgcaacgatatgatgacgctggggagattgcggggatttgagggcaaactgactgctcaggggaagctcttgggccaggacactttctgggtcaccgagcctgaggctggagggctgctgtcttcccgaggtcgagagaggcgcgtcttcctctttgagcaaatcatcatcttcagtgaagccctgggaggaggagtgagaggtggaacacagcctggatatgtatacaagaacagcattaaggtgagctgcctgggactggaggggaacctccaaggtgacccttgccgctttgcactgacctccagagggccagagggtgggatccagcgctatgtcctgcaggctgcagaccctgctatcagtcaggcctggatcaagcatgtggctcagatcttggagagccaacgggacttcctcaacgcattgcagtcacccattgagtaccagagacgggagagccagaccaacagcctggggcggccaagagggcctggagtggggagccctggaagaattcngcttggagatcaggcccagggcagcacacacacacccatcaatggctctctcccctctctgctgctgtcacccaaaggggaggtggccagagccctcttgccactggataaacaggcccttggtgacatcccccaggctccccatgactctcctccagtctctccaactccaaaaacccctccctgccaagccagacttgccaagctggatgaagatgagctgtaactggtgaaaaccatgggggtggtgctgactcagccgcctattccccaaggagcttcagggcagtccttctggcactgctccagaattcctccttcttggtgtgtctggagggtgggcaaggctgggagggatatcaacttggaggagaacacctagacccaaggacttttttctgcccaaggaacacagtttccttcagctcccatccctatgcatgcatcatggtccccccaaaaggaggatatgtgggtgggtgggagggctggggcaggggccagatagaaattattggttttgttttttaattttgtttttcctgttttctgagaataaaggttttgttatatcaccaaaaaaaaa

SEQ ID NO: 290793 - DNA, 2085 bp, Homo sapiens
  misc_feature (1499)..(1499): n is a, c, g, or t
gggggtcgctgtgcctgtccccgtgtgatccgaaaagtgctggcaaaatgcggctgctgcttcgcccgggggggacgtgaatcctattccattgcgggcagtgaggggagtatatcggcttctgctgcctccggtctggctgccccctctggccccagctctggcctcagctctggcccctgttccccaggccccccagggcccgtcagtggcctgaggagatggttggatcattccaaacattgtctcagtgtggaaactgaggcagacagtggtcaggcaggaccatatgagaactggatgttggagccagctctagccacaggagaggagctgccggaactgaccttgctgaccacactgttggagggccctggagataagacgcagccacctgaagaggagactttgtcccaagcccctgagagtgaggaggaacagaagaagaaggctctggaaaggagtatgtatgtcctgagtgaactggtagaaacagagaaaatgtacgtggacgacttggggcagattgtggagggttatatggccaccatggctgctcagggggtccccgagagtcttcgaggccgtgacaggattgtgtttgggaatatccagcaaatctatgagtggcaccgagactatttcttgcaagagctacaacggtgtctgaaagatcctgattggctggctcagctattcatcaaacacgagcgccggctgcatatgtatgtggtgtactgtcagaataagcccaagtcagagcatgtggtgtcagagtttggggacagctactttgaggagctccggcagcagctggggcaccgcctgcagctgaacgacctcctcatcaaacctgtgcagcggatcatgaaataccagctgctgctcaaggattttctcaagtattacaatagagctgggatggatactgcagacctagagcaagctgtggaggtcatgtgctttgtgcccaagcgctgcaacgatatgatgacgctggggagattgcggggatttgagggcaaactgactgctcaggggaagctcttgggccaggacactttctgggtcaccgagcctgaggctggagggctgctgtcttcccgaggtcgagagaggcgcgtcttcctctttgagcaaatcatcatcttcagtgaagccctgggaggaggagtgagaggtggaacacagcctggatatgtatacaagaacagcattaaggtgagctgcctgggactggaggggaacctccaaggtgacccttgccgctttgcactgacctccagagggccagagggtgggatccagcgctatgtcctgcaggctgcagaccctgctatcagtcaggcctggatcaagcatgtggctcagatcttggagagccaacgggacttcctcaacgcattgcagtcacccattgagtaccagagacgggagagccagaccaacagcctggggcggccaagagggcctggagtggggagccctggaagaattcngcttggagatcaggcccagggcagcacacacacacccatcaatggctctctcccctctctgctgctgtcacccaaaggggaggtggccagagccctcttgccactggataaacaggcccttggtgacatcccccaggctccccatgactctcctccagtctctccaactccaaaaacccctccctgccaagccagacttgccaagctggatgaagatgagctgtaactggtgaaaaccatgggggtggtgctgactcagccgcctattccccaaggagcttcagggcagtccttctggcactgctccagaattcctccttcttggtgtgtctggagggtgggcaaggctgggagggatatcaacttggaggagaacacctagacccaaggacttttttctgcccaaggaacacagtttccttcagctcccatccctatgcatgcatcatggtccccccaaaaggaggatatgtgggtgggtgggagggctggggcaggggccagatagaaattattggttttgttttttaattttgtttttcctgttttctgagaataaaggttttgttatatcaccaaaaaaaaa

SEQ ID NO: 290794 - DNA, 2168 bp, Homo sapiens
  misc_feature (1582)..(1582): n is a, c, g, or t
gggggtcgctgtgcctgtccccgtgtgatccgaaaagtgctggcaaaatgcggctgctgcttcgcccgggggggacgtgaatcctattccattgcgggcagtgaggggagtatatcggcttctgctgcctccggtctggctgccccctctggccccagctctggcctcagctctggcccctgttccccaggccccccagggcccgtcagtggcctgaggagatggttggatcattccaaacattgtctcagtgtggaaactgaggcagacagtggtcaggcaggaccatatgagaactggatgttggagccagctctagccacaggagaggagctgccggaactgaccttgctgaccacactgttggagggccctggagataagacgcagccacctgaagaggagactttgtcccaagcccctgagagtgaggaggaacagaagaagaaggctctggaaaggagtatgtatgtcctgagtgaactggtagaaacagagaaaatgtacgtggacgacttggggcagattgtggagggttatatggccaccatggctgctcagggggtccccgagagtcttcgaggccgtgacaggattgtgtttgggaatatccagcaaatctatgagtggcaccgagactatttcttgcaagagctacaacggtgtctgaaagatcctgattggctggctcagctattcatcaaacacgagcgccggctgcatatgtatgtggtgtactgtcagaataagcccaagtcagagcatgtggtgtcagagtttggggacagctactttgaggtcagtagctgagatgtcttggtgggaaggaggacagaactggggctttccaggctgcataaccaccctgtccctgtccccaggagctccggcagcagctggggcaccgcctgcagctgaacgacctcctcatcaaacctgtgcagcggatcatgaaataccagctgctgctcaaggattttctcaagtattacaatagagctgggatggatactgcagacctagagcaagctgtggaggtcatgtgctttgtgcccaagcgctgcaacgatatgatgacgctggggagattgcggggatttgagggcaaactgactgctcaggggaagctcttgggccaggacactttctgggtcaccgagcctgaggctggagggctgctgtcttcccgaggtcgagagaggcgcgtcttcctctttgagcaaatcatcatcttcagtgaagccctgggaggaggagtgagaggtggaacacagcctggatatgtatacaagaacagcattaaggtgagctgcctgggactggaggggaacctccaaggtgacccttgccgctttgcactgacctccagagggccagagggtgggatccagcgctatgtcctgcaggctgcagaccctgctatcagtcaggcctggatcaagcatgtggctcagatcttggagagccaacgggacttcctcaacgcattgcagtcacccattgagtaccagagacgggagagccagaccaacagcctggggcggccaagagggcctggagtggggagccctggaagaattcngcttggagatcaggcccagggcagcacacacacacccatcaatggctctctcccctctctgctgctgtcacccaaaggggaggtggccagagccctcttgccactggataaacaggcccttggtgacatcccccaggctccccatgactctcctccagtctctccaactccaaaaacccctccctgccaagccagacttgccaagctggatgaagatgagctgtaactggtgaaaaccatgggggtggtgctgactcagccgcctattccccaaggagcttcagggcagtccttctggcactgctccagaattcctccttcttggtgtgtctggagggtgggcaaggctgggagggatatcaacttggaggagaacacctagacccaaggacttttttctgcccaaggaacacagtttccttcagctcccatccctatgcatgcatcatggtccccccaaaaggaggatatgtgggtgggtgggagggctggggcaggggccagatagaaattattggttttgttttttaattttgtttttcctgttttctgagaataaaggttttgttatatcaccaaaaaaaaa

SEQ ID NO: 290795 - DNA, 2494 bp, Homo sapiens
  misc_feature (1908)..(1908): n is a, c, g, or t
gggggtcgctgtgcctgtccccgtgtgatccgaaaagtgctggcaaaatgcggctgctgcttcgcccgggggggacgtgaatcctattccattgcgggcagtgaggggagtatatcggcttctgctgcctccggtctggctgccccctctggccccagctctggcctcagctctggcccctgttccccaggccccccagggcccgtcagtggcctgaggagatggttggatcattccaaacattgtctcagtgtggaaactgaggcagacagtggtcaggcaggaccatatgagaactggatgttggagccagctctagccacaggagaggagctgccggaactgaccttgctgaccacactgttggagggccctggagataagacgcagccacctgaagaggagactttgtcccaagcccctgagagtgaggaggaacagaagaagaaggctctggaaaggagtatgtatgtcctgagtgaactggtagaaacagagaaaatgtacgtggacgacttggggcagattgtggagggttatatggccaccatggctgctcagggggtccccgagagtcttcgaggccgtgacaggattgtgtttgggaatatccagcaaatctatgagtggcaccgagagtgagtggtggaactctgacagctaggtgctggagaggggccctcatctggttgtcctgtatcctaacatcagcccattgcgacttaaggaatgtttggagaagttttgtagggcacactaccagggcagacagctcgaaactgctgggagtgggcgaggtgggggttgtgaaatgtatttgacctgctgcttctctaccaacccctccagctatttcttgcaagagctacaacggtgtctgaaagatcctgattggctggctcagctattcatcaaacacgtgaggcttgagggggcagggcctggggcggggcttaggaatgggctgggattctctggagatgcgtcctccctccttgcccaccctgctctctcttaaacattacccctgttaggagcgccggctgcatatgtatgtggtgtactgtcagaataagcccaagtcagagcatgtggtgtcagagtttggggacagctactttgaggtcagtagctgagatgtcttggtgggaaggaggacagaactggggctttccaggctgcataaccaccctgtccctgtccccaggagctccggcagcagctggggcaccgcctgcagctgaacgacctcctcatcaaacctgtgcagcggatcatgaaataccagctgctgctcaaggattttctcaagtattacaatagagctgggatggatactgcagacctagagcaagctgtggaggtcatgtgctttgtgcccaagcgctgcaacgatatgatgacgctggggagattgcggggatttgagggcaaactgactgctcaggggaagctcttgggccaggacactttctgggtcaccgagcctgaggctggagggctgctgtcttcccgaggtcgagagaggcgcgtcttcctctttgagcaaatcatcatcttcagtgaagccctgggaggaggagtgagaggtggaacacagcctggatatgtatacaagaacagcattaaggtgagctgcctgggactggaggggaacctccaaggtgacccttgccgctttgcactgacctccagagggccagagggtgggatccagcgctatgtcctgcaggctgcagaccctgctatcagtcaggcctggatcaagcatgtggctcagatcttggagagccaacgggacttcctcaacgcattgcagtcacccattgagtaccagagacgggagagccagaccaacagcctggggcggccaagagggcctggagtggggagccctggaagaattcngcttggagatcaggcccagggcagcacacacacacccatcaatggctctctcccctctctgctgctgtcacccaaaggggaggtggccagagccctcttgccactggataaacaggcccttggtgacatcccccaggctccccatgactctcctccagtctctccaactccaaaaacccctccctgccaagccagacttgccaagctggatgaagatgagctgtaactggtgaaaaccatgggggtggtgctgactcagccgcctattccccaaggagcttcagggcagtccttctggcactgctccagaattcctccttcttggtgtgtctggagggtgggcaaggctgggagggatatcaacttggaggagaacacctagacccaaggacttttttctgcccaaggaacacagtttccttcagctcccatccctatgcatgcatcatggtccccccaaaaggaggatatgtgggtgggtgggagggctggggcaggggccagatagaaattattggttttgttttttaattttgtttttcctgttttctgagaataaaggttttgttatatcaccaaaaaaaaa

SEQ ID NO: 290796 - DNA, 2209 bp, Homo sapiens
  misc_feature (1623)..(1623): n is a, c, g, or t
gggggtcgctgtgcctgtccccgtgtgatccgaaaagtgctggcaaaatgcggctgctgcttcgcccgggggggacgtgaatcctattccattgcgggcagtgaggggagtatatcggcttctgctgcctccggtctggctgccccctctggccccagctctggcctcagctctggcccctgttccccaggccccccagggcccgtcagtggcctgaggagatggttggatcattccaaacattgtctcagtgtggaaactgaggcagacagtggtcaggcaggaccatatgagaactggatgttggagccagctctagccacaggagaggagctgccggaactgaccttgctgaccacactgttggagggccctggagataagacgcagccacctgaagaggagactttgtcccaagcccctgagagtgaggaggaacagaagaagaaggctctggaaaggagtatgtatgtcctgagtgaactggtagaaacagagaaaatgtacgtggacgacttggggcagattgtggagggttatatggccaccatggctgctcagggggtccccgagagtcttcgaggccgtgacaggattgtgtttgggaatatccagcaaatctatgagtggcaccgagactatttcttgcaagagctacaacggtgtctgaaagatcctgattggctggctcagctattcatcaaacacgagcgccggctgcatatgtatgtggtgtactgtcagaataagcccaagtcagagcatgtggtgtcagagtttggggacagctactttgaggagctccggcagcagctggggcaccgcctgcagctgaacgacctcctcatcaaacctgtgcagcggatcatgaaataccagctgctgctcaaggattttctcaagtattacaatagagctgggatggatactgcagacctagagcaagctgtggaggtcatgtgctttgtgcccaagcgctgcaacgatatgatgacgctggggagattgcggggatttgagggcaaactgactgctcaggggaagctcttgggccaggacactttctgggtcaccgagcctgaggctggagggctgctgtcttcccgaggtcgagagaggcgcgtcttcctctttgagcaaatcatcatcttcagtgaagccctgggaggaggagtgagaggtggaacacagcctggatatgtatacaagaacagcattaaggtggggagaaggccacgagggagggcttggagagagagagggcatgaggcctctgagaggatgtctcagaggagccagggagggcctgaggaatctgggggctgtctcctatctgccaattcaggtgagctgcctgggactggaggggaacctccaaggtgacccttgccgctttgcactgacctccagagggccagagggtgggatccagcgctatgtcctgcaggctgcagaccctgctatcagtcaggcctggatcaagcatgtggctcagatcttggagagccaacgggacttcctcaacgcattgcagtcacccattgagtaccagagacgggagagccagaccaacagcctggggcggccaagagggcctggagtggggagccctggaagaattcngcttggagatcaggcccagggcagcacacacacacccatcaatggctctctcccctctctgctgctgtcacccaaaggggaggtggccagagccctcttgccactggataaacaggcccttggtgacatcccccaggctccccatgactctcctccagtctctccaactccaaaaacccctccctgccaagccagacttgccaagctggatgaagatgagctgtaactggtgaaaaccatgggggtggtgctgactcagccgcctattccccaaggagcttcagggcagtccttctggcactgctccagaattcctccttcttggtgtgtctggagggtgggcaaggctgggagggatatcaacttggaggagaacacctagacccaaggacttttttctgcccaaggaacacagtttccttcagctcccatccctatgcatgcatcatggtccccccaaaaggaggatatgtgggtgggtgggagggctggggcaggggccagatagaaattattggttttgttttttaattttgtttttcctgttttctgagaataaaggttttgttatatcaccaaaaaaaaa

SEQ ID NO: 290797 - DNA, 1487 bp, Homo sapiens
  misc_feature (901)..(901): n is a, c, g, or t
aaacaggggaggttgtgtgtgggggtggttatatggccaccatggctgctcagggggtccccgagagtcttcgaggccgtgacaggattgtgtttgggaatatccagcaaatctatgagtggcaccgagactatttcttgcaagagctacaacggtgtctgaaagatcctgattggctggctcagctattcatcaaacacgagctccggcagcagctggggcaccgcctgcagctgaacgacctcctcatcaaacctgtgcagcggatcatgaaataccagctgctgctcaaggattttctcaagtattacaatagagctgggatggatactgcagacctagagcaagctgtggaggtcatgtgctttgtgcccaagcgctgcaacgatatgatgacgctggggagattgcggggatttgagggcaaactgactgctcaggggaagctcttgggccaggacactttctgggtcaccgagcctgaggctggagggctgctgtcttcccgaggtcgagagaggcgcgtcttcctctttgagcaaatcatcatcttcagtgaagccctgggaggaggagtgagaggtggaacacagcctggatatgtatacaagaacagcattaaggtgagctgcctgggactggaggggaacctccaaggtgacccttgccgctttgcactgacctccagagggccagagggtgggatccagcgctatgtcctgcaggctgcagaccctgctatcagtcaggcctggatcaagcatgtggctcagatcttggagagccaacgggacttcctcaacgcattgcagtcacccattgagtaccagagacgggagagccagaccaacagcctggggcggccaagagggcctggagtggggagccctggaagaattcngcttggagatcaggcccagggcagcacacacacacccatcaatggctctctcccctctctgctgctgtcacccaaaggggaggtggccagagccctcttgccactggataaacaggcccttggtgacatcccccaggctccccatgactctcctccagtctctccaactccaaaaacccctccctgccaagccagacttgccaagctggatgaagatgagctgtaactggtgaaaaccatgggggtggtgctgactcagccgcctattccccaaggagcttcagggcagtccttctggcactgctccagaattcctccttcttggtgtgtctggagggtgggcaaggctgggagggatatcaacttggaggagaacacctagacccaaggacttttttctgcccaaggaacacagtttccttcagctcccatccctatgcatgcatcatggtccccccaaaaggaggatatgtgggtgggtgggagggctggggcaggggccagatagaaattattggttttgttttttaattttgtttttcctgttttctgagaataaaggttttgttatatcaccaaaaaaaaa

SEQ ID NO: 290798 - DNA, 1235 bp, Homo sapiens
  misc_feature (649)..(649): n is a, c, g, or t
aatcagctcggtacctctacgtgaacgcagctgctgctcaggattttctcaagtattacaatagagctgggatggatactgcagacctagagcaagctgtggaggtcatgtgctttgtgcccaagcgctgcaacgatatgatgacgctggggagattgcggggatttgagggcaaactgactgctcaggggaagctcttgggccaggacactttctgggtcaccgagcctgaggctggagggctgctgtcttcccgaggtcgagagaggcgcgtcttcctctttgagcaaatcatcatcttcagtgaagccctgggaggaggagtgagaggtggaacacagcctggatatgtatacaagaacagcattaaggtgagctgcctgggactggaggggaacctccaaggtgacccttgccgctttgcactgacctccagagggccagagggtgggatccagcgctatgtcctgcaggctgcagaccctgctatcagtcaggcctggatcaagcatgtggctcagatcttggagagccaacgggacttcctcaacgcattgcagtcacccattgagtaccagagacgggagagccagaccaacagcctggggcggccaagagggcctggagtggggagccctggaagaattcngcttggagatcaggcccagggcagcacacacacacccatcaatggctctctcccctctctgctgctgtcacccaaaggggaggtggccagagccctcttgccactggataaacaggcccttggtgacatcccccaggctccccatgactctcctccagtctctccaactccaaaaacccctccctgccaagccagacttgccaagctggatgaagatgagctgtaactggtgaaaaccatgggggtggtgctgactcagccgcctattccccaaggagcttcagggcagtccttctggcactgctccagaattcctccttcttggtgtgtctggagggtgggcaaggctgggagggatatcaacttggaggagaacacctagacccaaggacttttttctgcccaaggaacacagtttccttcagctcccatccctatgcatgcatcatggtccccccaaaaggaggatatgtgggtgggtgggagggctggggcaggggccagatagaaattattggttttgttttttaattttgtttttcctgttttctgagaataaaggttttgttatatcaccaaaaaaaaa

SEQ ID NO: 290799 - DNA, 1220 bp, Homo sapiens
gggggtcgctgtgcctgtccccgtgtgatccgaaaagtgctggcaaaatgcggctgctgcttcgcccgggggggacgtgaatcctattccattgcgggcagtgaggggagtatatcggcttctgctgcctccggtctggctgccccctctggccccagctctggcctcagctctggcccctgttccccaggccccccagggcccgtcagtggcctgaggagatggttggatcattccaaacattgtctcagtgtggaaactgaggcagacagtggtcaggcaggaccatatgagaactggatgttggagccagctctagccacaggagaggagctgccggaactgaccttgctgaccacactgttggagggccctggagataagacgcagccacctgaagaggagactttgtcccaagcccctgagagtgaggaggaacagaagaagaaggctctggaaaggagtatgtatgtcctgagtgaactggtagaaacagagaaaatgtacgtggacgacttggggcagattgtggagggttatatggccaccatggctgctcagggggtccccgagagtcttcgaggccgtgacaggattgtgtttgggaatatccagcaaatctatgagtggcaccgagactatttcttgcaagagctacaacggtgtctgaaagatcctgattggctggctcagctattcatcaaacacgagcgccggctgcatatgtatgtggtgtactgtcagaataagcccttggtgacatcccccaggctccccatgactctcctccagtctctccaactccaaaaacccctccctgccaagccagacttgccaagctggatgaagatgagctgtaactggtgaaaaccatgggggtggtgctgactcagccgcctattccccaaggagcttcagggcagtccttctggcactgctccagaattcctccttcttggtgtgtctggagggtgggcaaggctgggagggatatcaacttggaggagaacacctagacccaaggacttttttctgcccaaggaacacagtttccttcagctcccatccctatgcatgcatcatggtccccccaaaaggaggatatgtgggtgggtgggagggctggggcaggggccagatagaaattattggttttgttttttaattttgtttttcctgttttctgagaataaaggttttgttatatcaccaaaaaaaaa

SEQ ID NO: 290800 - DNA, 1572 bp, Homo sapiens
gggggtcgctgtgcctgtccccgtgtgatccgaaaagtgctggcaaaatgcggctgctgcttcgcccgggggggacgtgaatcctattccattgcgggcagtgaggggagtatatcggcttctgctgcctccggtctggctgccccctctggccccagctctggcctcagctctggcccctgttccccaggccccccagggcccgtcagtggcctgaggagatggttggatcattccaaacattgtctcagtgtggaaactgaggcagacagtggtcaggcaggaccatatgagaactggatgttggagccagctctagccacaggagaggagctgccggaactgaccttgctgaccacactgttggagggccctggagataagacgcagccacctgaagaggagactttgtcccaagcccctgagagtgaggaggaacagaagaagaaggctctggaaaggagtatgtatgtcctgagtgaactggtagaaacagagaaaatgtacgtggacgacttggggcagattgtggagggttatatggccaccatggctgctcagggggtccccgagagtcttcgaggccgtgacaggattgtgtttgggaatatccagcaaatctatgagtggcaccgagactatttcttgcaagagctacaacggtgtctgaaagatcctgattggctggctcagctattcatcaaacacgagcgccggctgcatatgtatgtggtgtactgtcagaataagcccaagtcagagcatgtggtgtcagagtttggggacagctactttgaggagctccggcagcagctggggcaccgcctgcagctgaacgacctcctcatcaaacctgtgcagcggatcatgaaataccagctgctgctcaaggattttctcaagtattacaatagagctgggatggatactgcagacctagagcaagctgtggaggtcatgtgctttgtgcccaagcgctgcaacgatatgatgacgctggggagattgcggggatttgagggcaaactgactgctcaggggaagctcttgggccaggacactttctgggtcaccgagcctgaggctggagggctgctgtcttcccgaggtcgagagaggcgcgtcttcctctttgagcaaatcatcatcttcagtgaagccctgggaggaggagtgagaggtggaacacagctggatgaagatgagctgtaactggtgaaaaccatgggggtggtgctgactcagccgcctattccccaaggagcttcagggcagtccttctggcactgctccagaattcctccttcttggtgtgtctggagggtgggcaaggctgggagggatatcaacttggaggagaacacctagacccaaggacttttttctgcccaaggaacacagtttccttcagctcccatccctatgcatgcatcatggtccccccaaaaggaggatatgtgggtgggtgggagggctggggcaggggccagatagaaattattggttttgttttttaattttgtttttcctgttttctgagaataaaggttttgttatatcaccaaaaaaaaa

SEQ ID NO: 290801 - DNA, 1046 bp, Homo sapiens
gggggtcgctgtgcctgtccccgtgtgatccgaaaagtgctggcaaaatgcggctgctgcttcgcccgggggggacgtgaatcctattccattgcgggcagtgaggggagtatatcggcttctgctgcctccggtctggctgccccctctggccccagctctggcctcagctctggcccctgttccccaggccccccagggcccgtcagtggcctgaggagatggttggatcattccaaacattgtctcagtgtggaaactgaggcagacagtggtcaggcaggaccatatgagaactggatgttggagccagctctagccacaggagaggagctgccggaactgaccttgctgaccacactgttggagggccctggagataagacgcagccacctgaagaggagactttgtcccaagcccctgagagtgaggaggaacagaagaagaaggctctggaaaggagtatgtatgtcctgagtgaactggtagaaacagagaaaatgtacgtggacgacttggggcagattgtggagggttatatggccaccatggctgctcagggggtccccgagagtcttcgaggccgtgacaggattgtgtttgggaatatccagcaaatctatgagtggcaccgagactatttcttgcaagagctacaacggtgtctgaaagatcctgattggctggctcagctattcatcaaacacgagcgccggctgcatatgtatgtggtgtactgtcagaataagcccaagtcagagcatgtggtgtcagagtttggggacagctactttgaggagctccggcagcagctggggcaccgcctgcagctgaacgacctcctcatcaaacctgtgcagcggatcatgaaataccagctgctgctcaaggattttctcaagtattacaatagagctgggatggatactgcagacctagagcaagctgtggaggtcatgtgctttgtgcccaagcgctgcaacgatatgatgacgctggggagattgcggggatttgaggggaaaagacctgggtaccgagctcc

SEQ ID NO: 290802 - DNA, 427 bp, Homo sapiens
acgacctcctcatcaaacctgtgcagcggatcatgaaataccagctgctgctcaaggtcaggaccccctttttcctgggggcacagctggctggcacagctgtttcctcattcatctccccagggttcttagggctcccccagacttcctgagggccctcactggtgtcctcaggggaggatgtgagagcttctaagggtgtcctcgtgacctccctgagcatttcttctctctgtcttaggattttctcaagtattacaatagagctgggatggatactgcagacctagaggtgaggaccccagatcttccaggacacaccatgtgctccttatcctcctagtatctcatgggttcccccagccccttgggtggtttacagctgtctggtttttagggggaggctggttggggttgagataccgtc

SEQ ID NO: 290803 - DNA, 714 bp, Homo sapiens
ggcacagacgagatctcgatcgaaggcgagatggcggacgtgctagatcttcacgaggctgggggcgaagatttcgccatggatgaggatggggacgagagcattcacaaactgaaagaaaaagcgaagaaacggaagggtcgcggctttggctccgaagaggggtcccgagcgcggatgcgtgaggattatgacagcgtggagcaggatggcgatgaacccggaccacaacgctctgttgaaggctggattctctttgtaactggagtccatgaggaagccaccgaagaagacatacacgacaaattcgcagaatatggggaaattaaaaacattcatctcaacctcgacaggcgaacaggatatctgaaggggtatactctagttgaatatgaaacatacaaggaagcccaggctgctatggagggactcaatggccaggatttgatgggacagcccatcagcgttgactggtgttttgttcggggtccaccaaaaggcaagaggagaggtggccgaagacgcagcagaagtccagaccggagacgtcgctgacaggtcctctgttgtccaggtgttctcttcaagattccatttgaccatgcagccttggacaaataggactggggtggaacttgctgtgtttatatttaatctcttaccgtatatgcgtagtatttgagttgcgaataaatgttccatttttgttttcta

SEQ ID NO: 290804 - DNA, 499 bp, Homo sapiens
  misc_feature (26)..(26): n is a, c, g, or t
  misc_feature (38)..(38): n is a, c, g, or t
cggagcggatggcatgacccgtccanacgctcgaagcnggacccgtactggagtccatgaggaagccaccgaagaagacatacacgacaaattcgcagaatatggggaaattaaaaacattcatctcaacctcgacaggcgaacaggatatctgaaggggtatactctagttgaatatgaaacatacaaggaagcccaggctgctatggagggactcaatggccaggatttgatgggacagcccatcagcgttgactggtgttttgttcggggtccaccaaaaggcaagaggagaggtggccgaagacgcagcagaagtccagaccggagacgtcgctgacaggtcctctgttgtccaggtgttctcttcaagattccatttgaccatgcagccttggacaaataggactggggtggaacttgctgtgtttatatttaatctcttaccgtatatgcgtagtatttgagttgcgaataaatgttccatttttgttttcta

SEQ ID NO: 290805 - DNA, 318 bp, Homo sapiens
cgtcgacatcctggccattgagtccctccatagcagcctgggcaggatttgatgggacagcccatcagcgttgactggtgttttgttcggggtccaccaaaaggcaagaggagaggtggccgaagacgcagcagaagtccagaccggagacgtcgctgacaggtcctctgttgtccaggtgttctcttcaagattccatttgaccatgcagccttggacaaataggactggggtggaacttgctgtgtttatatttaatctcttaccgtatatgcgtagtatttgagttgcgaataaatgttccatttttgttttcta

SEQ ID NO: 290806 - DNA, 441 bp, Homo sapiens
acatattagaagtattatttttctttttccccctctagatttctagttccttttcagtattggattggatttgagatttgattaacctagtactcaggttcagatgctcgcctctttgcaattttaacactcattcgacaataaagtcagtaaaaaacacaaatttggttatgtcactctctttttactttagtgtctctccactgcactcagaataaagtacaattttattatttgtgatctggcttgctcttcccctctcagttcattactcaccattttctagtcctcagctttagtagcattgagatcctctatcctccatcctccctagcatttctcctattttaattggtctaacacctatctctgaagaatcaaattttaacatctggaaagcttttcctgactgcacggctgtgtcagacacccctatccact

SEQ ID NO: 290807 - DNA, 2789 bp, Homo sapiens
ggcacagacgagatctcgatcgaaggcgagatggcggacgtgctagatcttcacgaggctgggggcgaagatttcgccatggatgaggatggggacgagagcattcacaaactgaaagaaaaagcgaagaaacggaagggtcgcggctttggctccgaagaggggtcccgagcgcggatgcgtgaggattatgacagcgtggagcaggatggcgatgaacccggaccacaacgctctgttgaaggctggattctctttgtaactggagtccatgaggaagccaccgaagaagacatacacgacaaattcgcagaatatggggaaattaaaaacattcatctcaacctcgacaggcgaacaggatatctgaaggggtatactctagttgaatatgaaacatacaaggaagcccaggctgctatggagggactcaatggccaggatttgatgggacagcccatcagcgttgactggtgttttgttcggggtccaccaaaaggcaagaggagaggtggccgaagacgcagcagaagtccagaccggagacgtcgctgacaggtcctctgttgtccaggtgttctcttcaagattccatttgaccatgcagccttggacaaataggactggggtggaacttgctgtgtttatatttaatctcttaccgtatatgcgtagtatttgagttgcgaataaatgttccatttttgttttctacatttaatgttactttcctgtcctaaaattgaaagttctaaagcatagcaaggctgtatggatcattgtgaagatacttctagggactgaactctatgtatttcttttttttcttttttttgagatagagtcttgctgtgttacccagggtggattgcagctgatcatagctcactgcagcttcaaactcttgggctcaagccatccttctgcctcactgtccctagtagttgggattacaggcacatgccaccatgcccagctaaatttttaatatttttgtagagatggggtcttgctgtgttacctgggctagttatgtgagtttctatattagacatagtctcaagtttcaggtagggtttaaagtagagacactggtcagtatttcttttttggggggaactaggagagcaggagtagaagtgagatgttaagatcttatggcactaaagacttactattctgttcctacatactctgttaggatcagatagatgttatagaaatgccttttgtttctcctgcccttcttgatgtcacagttttttgtacttccagctgtctaaaggcatgaatctcctcttggagcattctcccagacccttctttagaagagtctatactaagttcttggtgccctcttcggcagccaagggtgaaggccccatagaggagaggatccaaaggagcattgaggaggcccaagaggaaaaggatgtggctcaggctgggagggacttcagttagcatggtgggggagaaccagtaccacatacccagtaggtaataaggtgtccagcagaggatgaaggtcagcaagataagcagggccagtctcagggcccggagacgaacacggggacaattgtcaaaggagcgggggagggcaaattcaccagcaggggctaggaatttagaaaatatactgtaattcagacactcagcttctgatctgagtatagggtgaattgatggaggggcatagctagtgagacagagctcgcctcctacaaggaggagaatgttgcaaaccgttttccccttcccaacctgggactatatgatttcttacccccagggattatgatagaaatatgaagccaccaagtctagacttgatggtgttcaagaataaataatactgattgcctccctagtccttgtccagctaactcagctgtttataattgaagggattcaacaaaattatctctagcatcaggtgctagacatggttagaatctcaccatggtttagtgactggtagatagctattaggtaggtagataaataaatgatgctagaggcaacaggtctagggttaaggattaaggcctgggaattggagtctcaccatggctccccttccttgtctggggcctggacacactgaggacaatgcggctatagcagatggccatggcagtcagtggcagcagaaagaggcagcagaaggtgaagaggttataggtggtctcttgccattgagccttgaagctgcctttggtgacacactgagtgaaagggactgggccagctcagtggaccgtgtggaacaggaacagctggagtggagttgaggactattagaactggttcccctcaccacccaacctacccacctatgtcatactgtctcctcccaattcatccttaattccaagtgaagcagcacagtgctgagaaacagttcatccatggtgccatgttaaagaagttggaaatatatcttgaaaatcctatcttccttttaggcttgaatatgatgctgaacagtaagtttgttaaatcttggaacttaaaacaatcctgctttctcaagtactattctaacattgcgctttataagggatgatatttctaccacctcactcatatttttagctgaaatgattttcctggtatgtctgttattttgtggaaaaagaaatattgtgtaaaatgggtgctgccaaaattccaggccattttgcagggactctgaagtgacctttagtagtaatagtcttatgtgcagtaactataatggtaaagaatgttaaataataaaatttaacattttccaaatgcta

SEQ ID NO: 290808 - DNA, 3148 bp, Homo sapiens
ggcacagacgagatctcgatcgaaggcgagatggcggacgtgctagatcttcacgaggctgggggcgaagatttcgccatggatgaggatggggacgagagcattcacaaactgaaagaaaaagcgaagaaacggaagggtcgcggctttggctccgaagaggggtcccgagcgcggatgcgtgaggattatgacagcgtggagcaggatggcgatgaacccggaccacaacgctctgttgaaggctggattctctttgtaactggagtccatgaggaagccaccgaagaagacatacacgacaaattcgcagaatatggggaaattaaaaacattcatctcaacctcgacaggcgaacaggatatctgaaggggtatactctagttgaatatgaaacatacaaggaagcccaggctgctatggagggactcaatggccaggatttgatgggacagcccatcagcgttgactggtgttttgttcggggtccaccaaaaggcaagaggagaggtggccgaagacgcagcagaagtccagaccggagacgtcgctgacaggtcctctgttgtccaggtgttctcttcaagattccatttgaccatgcagccttggacaaataggactggggtggaacttgctgtgtttatatttaatctcttaccgtatatgcgtagtatttgagttgcgaataaatgttccatttttgttttctacatttaatgttactttcctgtcctaaaattgaaagttctaaagcatagcaaggctgtatggatcattgtgaagatacttctagggactgaactctatgtatttcttttttttcttttttttgagatagagtcttgctgtgttacccagggtggattgcagctgatcatagctcactgcagcttcaaactcttgggctcaagccatccttctgcctcactgtccctagtagttgggattacaggcacatgccaccatgcccagctaaatttttaatatttttgtagagatggggtcttgctgtgttacctgggctagttatgtgagtttctatattagacatagtctcaagtttcaggtagggtttaaagtagagacactggtcagtatttcttttttggggggaactaggagagcaggagtagaagtgagatgttaagatcttatggcactaaagacttactattctgttcctacatactctgttaggatcagatagatgttatagaaatgccttttgtttctcctgcccttcttgatgtcacagttttttgtacttccagctgtctaaaggcatgaatctcctcttggagcattctcccagacccttctttagaagagtctatactaagttcttggtgccctcttcggcagccaagggtgaaggccccatagaggagaggatccaaaggagcattgaggaggcccaagaggaaaaggatgtggctcaggctgggagggacttcagttagcatggtgggggagaaccagtaccacatacccagtaggtaataaggtgtccagcagaggatgaaggtcagcaagataagcagggccagtctcagggcccggagacgaacacggggacaattgtcaaaggagcgggggagggcaaattcaccagcaggggctaggaatttagaaaatatactgtaattcagacactcagcttctgatctgagtatagggtgaattgatggaggggcatagctagtgagacagagctcgcctcctacaaggaggagaatgttgcaaaccgttttccccttcccaacctgggactatatgatttcttacccccagggattatgatagaaatatgaagccaccaagtctagacttgatggtgttcaagaataaataatactgattgcctccctagtccttgtccagctaactcagctgtttataattgaagggattcaacaaaattatctctagcatcaggtgctagacatggttagaatctcaccatggtttagtgactggtagatagctattaggtaggtagataaataaatgatgctagaggcaacaggtctagggttaaggattaaggcctgggaattggagtctcaccatggctccccttccttgtctggggcctggacacactgaggacaatgcggctatagcagatggccatggcagtcagtggcagcagaaagaggcagcagaaggtgaagaggttataggtggtctcttgccattgagccttgaagctgcctttggtgacacactgagtgaaagggactgggccagctcagtggaccgtgtggaacaggaacagctggagtggagttgaggactattagaactggttcccctcaccacccaacctacccacctatgtcatactgtctcctcccaattcatccttaattccaagtgaagcagcacagtgctgagaaacagttcatccatggtgccatgttaaagaagttggaaatatatcttgaaaatcctatcttccttttaggcttgaatatgatgctgaacagtaagtttgttaaatcttggaacttaaaacaatcctgctttctcaagtactattctaacattgcgctttataagggatgatatttctaccacctcactcatatttttagctgaaatgattttcctggtatgtctgttattttgtggaaaaagaaatattgtgtaaaatgggtgctgccaaaattccaggccattttgcagggactctgaagtgacctttagtagtaatagtcttatgtgcagtaactataatggtaaagaatgttaaataataaaatttaacattttccaaatgctattgggctgcccctccccctttttgttaaattgctgggttttccaactgaatcagtaaaaactatttctgtttagagctacaaggttaaagtgcctgctttccagtaatggagattgagtcactattaatttgataaaaggtaagctcagtaggcatcagattcctagatacaaggcatttgggaaagtgattttagcagacatgagggacatttaggaaagatgaatagtttcagcctaagagaattttgtgaactgtttggagttacgatcaggctactctgagctagttgggaaatggtctttcctcttcccatctcttgcattcatatatttctaagttttttttttttttttgtt

SEQ ID NO: 290809 - DNA, 2694 bp, Homo sapiens
ggcacagacgagatctcgatcgaaggcgagatggcggacgtgctagatcttcacgaggctgggggcgaagatttcgccatggatgaggatggggacgagagcattcacaaactgaaagaaaaagcgaagaaacggaagggtcgcggctttggctccgaagaggggtcccgagcgcggatgcgtgaggattatgacagcgtggagcaggatggcgatgaacccggaccacaacgctctgttgaaggctggattctctttgtaactggagtccatgaggaagccaccgaagaagacatacacgacaaattcgcagaatatggggaaattaaaaacattcatctcaacctcgacaggcgaacaggatatctgaaggggtatactctagttgaatatgaaacatacaaggaagcccaggctgctatggagggactcaatggccaggatttgatgggacagcccatcagcgttgactggtgttttgttcggggtccaccaaaaggcaagaggagaggtggccgaagacgcagcagaagtccagaccggagacgtcgctgacaggtcctctgttgtccaggtgttctcttcaagattccatttgaccatgcagccttggacaaataggactggggtggaacttgctgtgtttatatttaatctcttaccgtatatgcgtagtatttgagttgcgaataaatgttccatttttgttttctacatttaatgttactttcctgtcctaaaattgaaagttctaaagcatagcaaggctgtatggatcattgtgaagatacttctagggactgaactctatgtatttcttttttttcttttttttgagatagagtcttgctgtgttacccagggtggattgcagctgatcatagctcactgcagcttcaaactcttgggctcaagccatccttctgcctcactgtccctagtagttgggattacaggcacatgccaccatgcccagctaaatttttaatatttttgtagagatggggtcttgctgtgttacctgggctagttatgtgagtttctatattagacatagtctcaagtttcaggtagggtttaaagtagagacactggtcagtatttcttttttggggggaactaggagagcaggagtagaagtgagatgttaagatcttatggcactaaagacttactattctgttcctacatactctgttaggatcagatagatgttatagaaatgccttttgtttctcctgcccttcttgatgtcacagttttttgtacttccagctgtctaaaggcatgaatctcctcttggagcattctcccagacccttctttagaagagtctatactaagttcttggtgccctcttcggcagccaagggtgaaggccccatagaggagaggatccaaaggagcattgaggaggcccaagaggaaaaggatgtggctcaggctgggagggacttcagttagcatggtgggggagaaccagtaccacatacccagtaggtaataaggtgtccagcagaggatgaaggtcagcaagataagcagggccagtctcagggcccggagacgaacacggggacaattgtcaaaggagcgggggagggcaaattcaccagcaggggctaggaatttagaaaatatactgtaattcagacactcagcttctgatctgagtatagggtgaattgatggaggggcatagctagtgagacagagctcgcctcctacaaggaggagaatgttgcaaaccgttttccccttcccaacctgggactatatgatttcttacccccagggattatgatagaaatatgaagccaccaagtctagacttgatggtgttcaagaataaataatactgattgcctccctagtccttgtccagctaactcagctgtttataattgaagggattcaacaaaattatctctagcatcaggtgctagacatggttagaatctcaccatggtttagtgactggtagatagctattaggtaggtagataaataaatgatgctagaggcaacaggtctagggttaaggattaaggcctgggaattggagtctcaccatggctccccttccttgtctggggcctggacacactgaggacaatgcggctatagcagatggccatggcagtcagtggcagcagaaagaggcagcagaaggtgaagaggttataggtggtctcttgccattgagccttgaagctgcctttggtgacacactgagtgaaagggactgggccagctcagtggaccgtgtggaacaggaacagctggagtggagttgaggactattagaactggttcccctcaccacccaacctacccacctatgtcatactgtctcctcccaattcatccttaattccaagtgaagcagcacagtgctgagaaacagttcatccatggtgccatgttaaagaagttggaaatatatcttgaaaatcctatcttccttttaggcttgaatatgatgctgaacagtaagtttgttaaatcttggaacttaaaacaatcctgctttctcaagtactattctaacattgcgctttataagggatgatatttctaccacctcactcatatttttagctgaaatgattttcctggtatgtctgttattttgtggaaaaagaaatattgtaagaatgttaaataataaaatttaacattttccaaatgcta

SEQ ID NO: 290810 - DNA, 2735 bp, Homo sapiens
ggcacagacgagatctcgatcgaaggcgagatggcggacgtgctagatcttcacgaggctgggggcgaagatttcgccatggatgaggatggggacgagagcattcacaaactgaaagaaaaagcgaagaaacggaagggtcgcggctttggctccgaagaggggtcccgagcgcggatgcgtgaggattatgacagcgtggagcaggatggcgatgaacccggaccacaacgctctgttgaaggctggattctctttgtaactggagtccatgaggaagccaccgaagaagacatacacgacaaattcgcagaatatggggaaattaaaaacattcatctcaacctcgacaggcgaacaggatatctgaaggggtatactctagttgaatatgaaacatacaaggaagcccaggctgctatggagggactcaatggccaggatttgatgggacagcccatcagcgttgactggtgttttgttcggggtccaccaaaaggcaagaggagaggtggccgaagacgcagcagaagtccagaccggagacgtcgctgacaggtcctctgttgtccaggtgttctcttcaagattccatttgaccatgcagccttggacaaataggactggggtggaacttgctgtgtttatatttaatctcttaccgtatatgcgtagtatttgagttgcgaataaatgttccatttttgttttctacatttaatgttactttcctgtcctaaaattgaaagttctaaagcatagcaaggctgtatggatcattgtgaagatacttctagggactgaactctatgtatttcttttttttcttttttttgagatagagtcttgctgtgttacccagggtggattgcagctgatcatagctcactgcagcttcaaactcttgggctcaagccatccttctgcctcactgtccctagtagttgggattacaggcacatgccaccatgcccagctaaatttttaatatttttgtagagatggggtcttgctgtgttacctgggctagttatgtgagtttctatattagacatagtctcaagtttcaggtagggtttaaagtagagacactggtcagtatttcttttttggggggaactaggagagcaggagtagaagtgagatgttaagatcttatggcactaaagacttactattctgttcctacatactctgttaggatcagatagatgttatagaaatgccttttgtttctcctgcccttcttgatgtcacagttttttgtacttccagctgtctaaaggcatgaatctcctcttggagcattctcccagacccttctttagaagagtctatactaagttcttggtgccctcttcggcagccaagggtgaaggccccatagaggagaggatccaaaggagcattgaggaggcccaagaggaaaaggatgtggctcaggctgggagggacttcagttagcatggtgggggagaaccagtaccacatacccagtaggtaataaggtgtccagcagaggatgaaggtcagcaagataagcagggccagtctcagggcccggagacgaacacggggacaattgtcaaaggagcgggggagggcaaattcaccagcaggggctaggaatttagaaaatatactgtaattcagacactcagcttctgatctgagtatagggtgaattgatggaggggcatagctagtgagacagagctcgcctcctacaaggaggagaatgttgcaaaccgttttccccttcccaacctgggactatatgatttcttacccccagggattatgatagaaatatgaagccaccaagtctagacttgatggtgttcaagaataaataatactgattgcctccctagtccttgtccagctaactcagctgtttataattgaagggattcaacatgactggtagatagctattaggtaggtagataaataaatgatgctagaggcaacaggtctagggttaaggattaaggcctgggaattggagtctcaccatggctccccttccttgtctggggcctggacacactgaggacaatgcggctatagcagatggccatggcagtcagtggcagcagaaagaggcagcagaaggtgaagaggttataggtggtctcttgccattgagccttgaagctgcctttggtgacacactgagtgaaagggactgggccagctcagtggaccgtgtggaacaggaacagctggagtggagttgaggactattagaactggttcccctcaccacccaacctacccacctatgtcatactgtctcctcccaattcatccttaattccaagtgaagcagcacagtgctgagaaacagttcatccatggtgccatgttaaagaagttggaaatatatcttgaaaatcctatcttccttttaggcttgaatatgatgctgaacagtaagtttgttaaatcttggaacttaaaacaatcctgctttctcaagtactattctaacattgcgctttataagggatgatatttctaccacctcactcatatttttagctgaaatgattttcctggtatgtctgttattttgtggaaaaagaaatattgtgtaaaatgggtgctgccaaaattccaggccattttgcagggactctgaagtgacctttagtagtaatagtcttatgtgcagtaactataatggtaaagaatgttaaataataaaatttaacattttccaaatgcta

SEQ ID NO: 290811 - DNA, 2635 bp, Homo sapiens
cccagcaaagatgccccagacaggaaggtgatcccagtgacagcgtggagcaggatggcgatgaacccggaccacaacgctctgttgaaggctggattctctttgtaactggagtccatgaggaagccaccgaagaagacatacacgacaaattcgcagaatatggggaaattaaaaacattcatctcaacctcgacaggcgaacaggatatctgaaggggtatactctagttgaatatgaaacatacaaggaagcccaggctgctatggagggactcaatggccaggatttgatgggacagcccatcagcgttgactggtgttttgttcggggtccaccaaaaggcaagaggagaggtggccgaagacgcagcagaagtccagaccggagacgtcgctgacaggtcctctgttgtccaggtgttctcttcaagattccatttgaccatgcagccttggacaaataggactggggtggaacttgctgtgtttatatttaatctcttaccgtatatgcgtagtatttgagttgcgaataaatgttccatttttgttttctacatttaatgttactttcctgtcctaaaattgaaagttctaaagcatagcaaggctgtatggatcattgtgaagatacttctagggactgaactctatgtatttcttttttttcttttttttgagatagagtcttgctgtgttacccagggtggattgcagctgatcatagctcactgcagcttcaaactcttgggctcaagccatccttctgcctcactgtccctagtagttgggattacaggcacatgccaccatgcccagctaaatttttaatatttttgtagagatggggtcttgctgtgttacctgggctagttatgtgagtttctatattagacatagtctcaagtttcaggtagggtttaaagtagagacactggtcagtatttcttttttggggggaactaggagagcaggagtagaagtgagatgttaagatcttatggcactaaagacttactattctgttcctacatactctgttaggatcagatagatgttatagaaatgccttttgtttctcctgcccttcttgatgtcacagttttttgtacttccagctgtctaaaggcatgaatctcctcttggagcattctcccagacccttctttagaagagtctatactaagttcttggtgccctcttcggcagccaagggtgaaggccccatagaggagaggatccaaaggagcattgaggaggcccaagaggaaaaggatgtggctcaggctgggagggacttcagttagcatggtgggggagaaccagtaccacatacccagtaggtaataaggtgtccagcagaggatgaaggtcagcaagataagcagggccagtctcagggcccggagacgaacacggggacaattgtcaaaggagcgggggagggcaaattcaccagcaggggctaggaatttagaaaatatactgtaattcagacactcagcttctgatctgagtatagggtgaattgatggaggggcatagctagtgagacagagctcgcctcctacaaggaggagaatgttgcaaaccgttttccccttcccaacctgggactatatgatttcttacccccagggattatgatagaaatatgaagccaccaagtctagacttgatggtgttcaagaataaataatactgattgcctccctagtccttgtccagctaactcagctgtttataattgaagggattcaacaaaattatctctagcatcaggtgctagacatggttagaatctcaccatggtttagtgactggtagatagctattaggtaggtagataaataaatgatgctagaggcaacaggtctagggttaaggattaaggcctgggaattggagtctcaccatggctccccttccttgtctggggcctggacacactgaggacaatgcggctatagcagatggccatggcagtcagtggcagcagaaagaggcagcagaaggtgaagaggttataggtggtctcttgccattgagccttgaagctgcctttggtgacacactgagtgaaagggactgggccagctcagtggaccgtgtggaacaggaacagctggagtggagttgaggactattagaactggttcccctcaccacccaacctacccacctatgtcatactgtctcctcccaattcatccttaattccaagtgaagcagcacagtgctgagaaacagttcatccatggtgccatgttaaagaagttggaaatatatcttgaaaatcctatcttccttttaggcttgaatatgatgctgaacagtaagtttgttaaatcttggaacttaaaacaatcctgctttctcaagtactattctaacattgcgctttataagggatgatatttctaccacctcactcatatttttagctgaaatgattttcctggtatgtctgttattttgtggaaaaagaaatattgtgtaaaatgggtgctgccaaaattccaggccattttgcagggactctgaagtgacctttagtagtaatagtcttatgtgcagtaactataatggtaaagaatgttaaataataaaatttaacattttccaaatgcta

SEQ ID NO: 290812 - DNA, 2825 bp, Homo sapiens
cccagcaaagatgccccagacaggaaggtgatcccagtgacagcgtggagcaggatggcgatgaacccggaccacaacgctgtgagtaataatggaacctgtgaggtatccgtgtctgtggtagtagttagaaaccaataaaatagttaaacgcagtaggaatgggttcagagatagcttaaacaatctgagtccgcactcactctattcctgtgagcctgcttaaagtgtctctcatgtactcatacaacttccccccgtcccccaacagctgttgaaggctggattctctttgtaactggagtccatgaggaagccaccgaagaagacatacacgacaaattcgcagaatatggggaaattaaaaacattcatctcaacctcgacaggcgaacaggatatctgaaggggtatactctagttgaatatgaaacatacaaggaagcccaggctgctatggagggactcaatggccaggatttgatgggacagcccatcagcgttgactggtgttttgttcggggtccaccaaaaggcaagaggagaggtggccgaagacgcagcagaagtccagaccggagacgtcgctgacaggtcctctgttgtccaggtgttctcttcaagattccatttgaccatgcagccttggacaaataggactggggtggaacttgctgtgtttatatttaatctcttaccgtatatgcgtagtatttgagttgcgaataaatgttccatttttgttttctacatttaatgttactttcctgtcctaaaattgaaagttctaaagcatagcaaggctgtatggatcattgtgaagatacttctagggactgaactctatgtatttcttttttttcttttttttgagatagagtcttgctgtgttacccagggtggattgcagctgatcatagctcactgcagcttcaaactcttgggctcaagccatccttctgcctcactgtccctagtagttgggattacaggcacatgccaccatgcccagctaaatttttaatatttttgtagagatggggtcttgctgtgttacctgggctagttatgtgagtttctatattagacatagtctcaagtttcaggtagggtttaaagtagagacactggtcagtatttcttttttggggggaactaggagagcaggagtagaagtgagatgttaagatcttatggcactaaagacttactattctgttcctacatactctgttaggatcagatagatgttatagaaatgccttttgtttctcctgcccttcttgatgtcacagttttttgtacttccagctgtctaaaggcatgaatctcctcttggagcattctcccagacccttctttagaagagtctatactaagttcttggtgccctcttcggcagccaagggtgaaggccccatagaggagaggatccaaaggagcattgaggaggcccaagaggaaaaggatgtggctcaggctgggagggacttcagttagcatggtgggggagaaccagtaccacatacccagtaggtaataaggtgtccagcagaggatgaaggtcagcaagataagcagggccagtctcagggcccggagacgaacacggggacaattgtcaaaggagcgggggagggcaaattcaccagcaggggctaggaatttagaaaatatactgtaattcagacactcagcttctgatctgagtatagggtgaattgatggaggggcatagctagtgagacagagctcgcctcctacaaggaggagaatgttgcaaaccgttttccccttcccaacctgggactatatgatttcttacccccagggattatgatagaaatatgaagccaccaagtctagacttgatggtgttcaagaataaataatactgattgcctccctagtccttgtccagctaactcagctgtttataattgaagggattcaacaaaattatctctagcatcaggtgctagacatggttagaatctcaccatggtttagtgactggtagatagctattaggtaggtagataaataaatgatgctagaggcaacaggtctagggttaaggattaaggcctgggaattggagtctcaccatggctccccttccttgtctggggcctggacacactgaggacaatgcggctatagcagatggccatggcagtcagtggcagcagaaagaggcagcagaaggtgaagaggttataggtggtctcttgccattgagccttgaagctgcctttggtgacacactgagtgaaagggactgggccagctcagtggaccgtgtggaacaggaacagctggagtggagttgaggactattagaactggttcccctcaccacccaacctacccacctatgtcatactgtctcctcccaattcatccttaattccaagtgaagcagcacagtgctgagaaacagttcatccatggtgccatgttaaagaagttggaaatatatcttgaaaatcctatcttccttttaggcttgaatatgatgctgaacagtaagtttgttaaatcttggaacttaaaacaatcctgctttctcaagtactattctaacattgcgctttataagggatgatatttctaccacctcactcatatttttagctgaaatgattttcctggtatgtctgttattttgtggaaaaagaaatattgtgtaaaatgggtgctgccaaaattccaggccattttgcagggactctgaagtgacctttagtagtaatagtcttatgtgcagtaactataatggtaaagaatgttaaataataaaatttaacattttccaaatgcta

SEQ ID NO: 290813 - DNA, 2631 bp, Homo sapiens
ggcacagacgagatctcgatcgaaggcgagatggcggacgtgctagatcttcacgaggctgggggcgaagatttcgccatggatgaggatggggacgagagcattcacaaactgaaagaaaaagcgaagaaacggaagggtcgcggctttggctccgaagaggggtcccgagcgcggatgcgtgaggattatgacagcgtggagcaggatggcgatgaacccggaccacaacgctctgttgaaggctggattctctttgtaactggagtccatgaggaagccaccgaagaagacatacacgacaaattcgcagaatatggggaaattaaaaacattcatctcaacctcgacaggcgaacaggatatctgaaggggtatactctagttgaatatgaaacatacaaggaagcccaggctgctatggagggactcaatggccaggatttgatgggacagcccatcagcgttgactggtgttttgttcggggtccaccaaaaggcaagaggagaggtggccgaagacgcagcagaagtccagaccggagacgtcgctgacaggtcctctgttgtccaggtgttctcttcaagattccatttgaccatgcagccttggacaaataggactggggtggaacttgctgtgtttatatttaatctcttaccgtatatgcgtagtatttgagttgcgaataaatgttccatttttgttttctacatttaatgttactttcctgtcctaaaattgaaagttctaaagcatagcaaggctgtatggatcattgtgaagatacttctagggactgaactctatgtatttcttttttttcttttttttgagatagagtcttgctgtgttacccagggtggattgcagctgatcatagctcactgcagcttcaaactcttgggctcaagccatccttctgcctcactgtccctagtagttgggattacaggcacatgccaccatgcccagctaaatttttaatatttttgtagagatggggtcttgctgtgttacctgggctagttatgtgagtttctatattagacatagtctcaagtttcaggtagggtttaaagtagagacactggtcagtatttcttttttggggggaactaggagagcaggagtagaagtgagatgttaagatcttatggcactaaagacttactattctgttcctacatactctgttaggatcagatagatgttatagaaatgccttttgtttctcctgcccttcttgatgtcacagttttttgtacttccagctgtctaaaggcatgaatctcctcttggagcattctcccagacccttctttagaagagtctatactaagttcttggtgccctcttcggcagccaagggtgaaggccccatagaggagaggatccaaaggagcattgaggaggcccaagaggaaaaggatgtggctcaggctgggagggacttcagttagcatggtgggggagaaccagtaccacatacccagtaggtaataaggtgtccagcagaggatgaaggtcagcaagataagcagggccagtctcagggcccggagacgaacacggggacaattgtcaaaggagcgggggagggcaaattcaccagcaggggctaggaatttagaaaatatactgtaattcagacactcagcttctgatctgagtatagggtgaattgatggaggggcatagctagtgagacagagctcgcctcctacaaggaggagaatgttgcaaaccgttttccccttcccaacctgggactatatgatttcttacccccagggattatgatagaaatatgaagccaccaagtctagacttgatggtgttcaagaataaataatatccaagtgaagcagcacagtgctgagaaacagttcatccatggtgccatgttaaagaagttggaaatatatcttgaaaatcctatcttccttttaggcttgaatatgatgctgaacagtaagtttgttaaatcttggaacttaaaacaatcctgctttctcaagtactattctaacattgcgctttataagggatgatatttctaccacctcactcatatttttagctgaaatgattttcctggtatgtctgttattttgtggaaaaagaaatattgtgtaaaatgggtgctgccaaaattccaggccattttgcagggactctgaagtgacctttagtagtaatagtcttatgtgcagtaactataatggtaaagaatgttaaataataaaatttaacattttccaaatgctattgggctgcccctccccctttttgttaaattgctgggttttccaactgaatcagtaaaaactatttctgtttagagctacaaggttaaagtgcctgctttccagtaatggagattgagtcactattaatttgataaaaggtaagctcagtaggcatcagattcctagatacaaggcatttgggaaagtgattttagcagacatgagggacatttaggaaagatgaatagtttcagcctaagagaattttgtgaactgtttggagttacgatcaggctactctgagctagttgggaaatggtctttcctcttcccatctcttgcattcatatatttctaagttttttttttttttttgtt

SEQ ID NO: 290814 - DNA, 3093 bp, Homo sapiens
ggcacagacgagatctcgatcgaaggcgagatggcggacgtgctagatcttcacgaggctgggggcgaagatttcgccatggatgaggatggggacgagagcattcacaaactgaaagaaaaagcgaagaaacggaagggtcgcggctttggctccgaagaggggtcccgagcgcggatgcgtgaggattatgacagcgtggagcaggatggcgatgaacccggaccacaacgctctgttgaaggctggattctctttgtaactggagtccatgaggaagccaccgaagaagacatacacgacaaattcgcagaatatggggaaattaaaaacattcatctcaacctcgacaggcgaacaggatatctgaaggtatcctaagtgacactttattgcctcctttctttcataagccttaggtagcattcgtagttctgtgtttgctgtggttggccaagagcaaagttgaaataaaatgacattggaaatctatgttttgtcagacacgccaaagagacagaaacggagatgatgtatatatacagtagagatatatgatgtacattcattgtttaaagtgtgtagatttttctgagtttagatttgaggaaaaagatactcagtgatacttggggaaataggagggttttcatatctgtcttttcactttccccaggggtatactctagttgaatatgaaacatacaaggaagcccaggctgctatggagggactcaatggccaggatttgatgggacagcccatcagcgttgactggtgttttgttcggggtccaccaaaaggcaagaggagaggtggccgaagacgcagcagaagtccagaccggagacgtcgctgacaggtcctctgttgtccaggtgttctcttcaagattccatttgaccatgcagccttggacaaataggactggggtggaacttgctgtgtttatatttaatctcttaccgtatatgcgtagtatttgagttgcgaataaatgttccatttttgttttctacatttaatgttactttcctgtcctaaaattgaaagttctaaagcatagcaaggctgtatggatcattgtgaagatacttctagggactgaactctatgtatttcttttttttcttttttttgagatagagtcttgctgtgttacccagggtggattgcagctgatcatagctcactgcagcttcaaactcttgggctcaagccatccttctgcctcactgtccctagtagttgggattacaggcacatgccaccatgcccagctaaatttttaatatttttgtagagatggggtcttgctgtgttacctgggctagttatgtgagtttctatattagacatagtctcaagtttcaggtagggtttaaagtagagacactggtcagtatttcttttttggggggaactaggagagcaggagtagaagtgagatgttaagatcttatggcactaaagacttactattctgttcctacatactctgttaggatcagatagatgttatagaaatgccttttgtttctcctgcccttcttgatgtcacagttttttgtacttccagctgtctaaaggcatgaatctcctcttggagcattctcccagacccttctttagaagagtctatactaagttcttggtgccctcttcggcagccaagggtgaaggccccatagaggagaggatccaaaggagcattgaggaggcccaagaggaaaaggatgtggctcaggctgggagggacttcagttagcatggtgggggagaaccagtaccacatacccagtaggtaataaggtgtccagcagaggatgaaggtcagcaagataagcagggccagtctcagggcccggagacgaacacggggacaattgtcaaaggagcgggggagggcaaattcaccagcaggggctaggaatttagaaaatatactgtaattcagacactcagcttctgatctgagtatagggtgaattgatggaggggcatagctagtgagacagagctcgcctcctacaaggaggagaatgttgcaaaccgttttccccttcccaacctgggactatatgatttcttacccccagggattatgatagaaatatgaagccaccaagtctagacttgatggtgttcaagaataaataatactgattgcctccctagtccttgtccagctaactcagctgtttataattgaagggattcaacaaaattatctctagcatcaggtgctagacatggttagaatctcaccatggtttagtgactggtagatagctattaggtaggtagataaataaatgatgctagaggcaacaggtctagggttaaggattaaggcctgggaattggagtctcaccatggctccccttccttgtctggggcctggacacactgaggacaatgcggctatagcagatggccatggcagtcagtggcagcagaaagaggcagcagaaggtgaagaggttataggtggtctcttgccattgagccttgaagctgcctttggtgacacactgagtgaaagggactgggccagctcagtggaccgtgtggaacaggaacagctggagtggagttgaggactattagaactggttcccctcaccacccaacctacccacctatgtcatactgtctcctcccaattcatccttaattccaagtgaagcagcacagtgctgagaaacagttcatccatggtgccatgttaaagaagttggaaatatatcttgaaaatcctatcttccttttaggcttgaatatgatgctgaacagtaagtttgttaaatcttggaacttaaaacaatcctgctttctcaagtactattctaacattgcgctttataagggatgatatttctaccacctcactcatatttttagctgaaatgattttcctggtatgtctgttattttgtggaaaaagaaatattgtgtaaaatgggtgctgccaaaattccaggccattttgcagggactctgaagtgacctttagtagtaatagtcttatgtgcagtaactataatggtaaagaatgttaaataataaaatttaacattttccaaatgcta

SEQ ID NO: 290815 - DNA, 1642 bp, Homo sapiens
ggcacagacgagatctcgatcgaaggcgagatggcggacgtgctagatcttcacgaggctgggggcgaagatttcgccatggatgaggatggggacgagagcattcacaaactgaaagaaaaagcgaagaaacggaagggtcgcggctttggctccgaagaggggtcccgagcgcggatgcgtgaggattatgacagcgtggagcaggatggcgatgaacccggaccacaacgctctgttgaaggctggattctctttgtaactggagtccatgaggaagccaccgaagaagacatacacgacaaattcgcagaatatggggaaattaaaaacattcatctcaacctcgacaggcgaacaggatatctgaaggggtatactctagttgaatatgaaacatacaaggaagcccaggctgctatggagggactcaatggccaggatttgatgggacagcccatcagcgttgactggtgttttgttcggggtccaccaaaaggcaagaggagaggtggccgaagacgcagcagaagtccagaccggagacgtcgctgacaggtcctctgttgtccaggtgttctcttcaagattccatttgaccatgcagccttggacaaataggactggggtggaacttgctgtgtttatatttaatctcttaccgtatatgcgtagtatttgagttgcgaataaatgttccatttttgttttctacatttaatgttactttcctgtcctaaaattgaaagttctaaagcatagcaaggctgtatggatcattgtgaagatacttctagggactgaactctatgtatttcttttttttcttttttttgagatagagtcttgctgtgttacccagggtggattgcagctgatcatagctcactgcagcttcaaactcttgggctcaagccatccttctgcctcactgtccctagtagttgggattacaggcttgagccaccaggcctttctttgttcttaggagtatagtcagactaacttctagtagttatatttctaataattgaggatgtaagtaaggatcaaatcttaaatcagtataatgcattgtcattccagagataaatcctagacccttcttggcctccttctgacataattctaatcctacagtctcagagatgctgttgtatcctgccccccaaccccatgatagtgatagtggtttttgccttgaaggaattgctttgtatttagcttttccccctctagatttctagttccttttcagtattggattggatttgagatttgattaacctagtactcaggttcagatgctcgcctctttgcaattttaacactcattcgacaataaagtcagtaaaaaacacaaatttggttatgtcactctctttttactttagtgtctctccactgcactcagaataaagtacaattttattatttgtgatctggcttgctcttcccctctcagttcattactcaccattttctagtcctcagctttagtagcattgagatcctctatcctccatcctccctagcatttctcctattttaattggtctaacacctatctctgaagaatcaaattttaacatctggaaagcttttcctgactgcacggctgtgtcagacacccctatccact

SEQ ID NO: 290816 - DNA, 2309 bp, Homo sapiens
  misc_feature (17)..(17): n is a, c, g, or t
tgttttggtccgggggncccaccaaaaagaggtggccgaagacgcagcagaagtccagaccggagacgtcgctgacaggtcctctgttgtccaggtgttctcttcaagattccatttgaccatgcagccttggacaaataggactggggtggaacttgctgtgtttatatttaatctcttaccgtatatgcgtagtatttgagttgcgaataaatgttccatttttgttttctacatttaatgttactttcctgtcctaaaattgaaagttctaaagcatagcaaggctgtatggatcattgtgaagatacttctagggactgaactctatgtatttcttttttttcttttttttgagatagagtcttgctgtgttacccagggtggattgcagctgatcatagctcactgcagcttcaaactcttgggctcaagccatccttctgcctcactgtccctagtagttgggattacaggcacatgccaccatgcccagctaaatttttaatatttttgtagagatggggtcttgctgtgttacctgggctagttatgtgagtttctatattagacatagtctcaagtttcaggtagggtttaaagtagagacactggtcagtatttcttttttggggggaactaggagagcaggagtagaagtgagatgttaagatcttatggcactaaagacttactattctgttcctacatactctgttaggatcagatagatgttatagaaatgccttttgtttctcctgcccttcttgatgtcacagttttttgtacttccagctgtctaaaggcatgaatctcctcttggagcattctcccagacccttctttagaagagtctatactaagttcttggtgccctcttcggcagccaagggtgaaggccccatagaggagaggatccaaaggagcattgaggaggcccaagaggaaaaggatgtggctcaggctgggagggacttcagttagcatggtgggggagaaccagtaccacatacccagtaggtaataaggtgtccagcagaggatgaaggtcagcaagataagcagggccagtctcagggcccggagacgaacacggggacaattgtcaaaggagcgggggagggcaaattcaccagcaggggctaggaatttagaaaatatactgtaattcagacactcagcttctgatctgagtatagggtgaattgatggaggggcatagctagtgagacagagctcgcctcctacaaggaggagaatgttgcaaaccgttttccccttcccaacctgggactatatgatttcttacccccagggattatgatagaaatatgaagccaccaagtctagacttgatggtgttcaagaataaataatactgattgcctccctagtccttgtccagctaactcagctgtttataattgaagggattcaacaaaattatctctagcatcaggtgctagacatggttagaatctcaccatggtttagtgactggtagatagctattaggtaggtagataaataaatgatgctagaggcaacaggtctagggttaaggattaaggcctgggaattggagtctcaccatggctccccttccttgtctggggcctggacacactgaggacaatgcggctatagcagatggccatggcagtcagtggcagcagaaagaggcagcagaaggtgaagaggttataggtggtctcttgccattgagccttgaagctgcctttggtgacacactgagtgaaagggactgggccagctcagtggaccgtgtggaacaggaacagctggagtggagttgaggactattagaactggttcccctcaccacccaacctacccacctatgtcatactgtctcctcccaattcatccttaattccaagtgaagcagcacagtgctgagaaacagttcatccatggtgccatgttaaagaagttggaaatatatcttgaaaatcctatcttccttttaggcttgaatatgatgctgaacagtaagtttgttaaatcttggaacttaaaacaatcctgctttctcaagtactattctaacattgcgctttataagggatgatatttctaccacctcactcatatttttagctgaaatgattttcctggtatgtctgttattttgtggaaaaagaaatattgtgtaaaatgggtgctgccaaaattccaggccattttgcagggactctgaagtgacctttagtagtaatagtcttatgtgcagtaactataatggtaaagaatgttaaataataaaatttaacattttccaaatgcta

SEQ ID NO: 290817 - DNA, 790 bp, Homo sapiens
  misc_feature (790)..(790): n is a, c, g, or t
ggcacagacgagatctcgatcgaaggcgagatggcggacgtgctagatcttcacgaggctgggggcgaagatttcgccatggatgaggatggggacgagagcattcacaaactgaaagaaaaagcgaagaaacggaagggtcgcggctttggctccgaagaggggtcccgagcgcggatgcgtgaggattatgacagcgtggagcaggatggcgatgaacccggaccacaacgctctgttgaaggctggattctctttgtaactggagtccatgaggaagccaccgaagaagacatacacgacaaattcgcagaatatggggaaattaaaaacattcatctcaacctcgacaggcgaacaggatatctgaaggggtatactctagttgaatatgaaacatacaaggaagcccaggctgctatggagggactcaatggccaggatttgatgggacagcccatcagcgttgactggtgttttgttcggggtccaccaaaaggcaagaggagaggtggccgaagacgcagcagaagtccagaccggagacgtcgctgacaggtcctctgttgtccaggtgttctcttcaagattccatttgaccatgcagccttggacaaataggactggggtggaacttgctgtgtttatatttaatctcttaccgtatatgcgtagtatttgagttgcgaataaatgttccatttttgttttctaaaaaaaaaaatcggactcgctggccctaacggaggagctcttgcgaccagtttctcttaaagaggcaccccatgan

SEQ ID NO: 290818 - DNA, 787 bp, Homo sapiens
  misc_feature (759)..(759): n is a, c, g, or t
  misc_feature (775)..(775): n is a, c, g, or t
  misc_feature (781)..(781): n is a, c, g, or t
ggcacagacgagatctcgatcgaaggcgagatggcggacgtgctagatcttcacgaggctgggggcgaagatttcgccatggatgaggatggggacgagagcattcacaaactgaaagaaaaagcgaagaaacggaagggtcgcggctttggctccgaagaggggtcccgagcgcggatgcgtgaggattatgacagcgtggagcaggatggcgatgaacccggaccacaacgctctgttgaaggctggattctctttgtaactggagtccatgaggaagccaccgaagaagacatacacgacaaattcgcagaatatggggaaattaaaaacattcatctcaacctcgacaggcgaacaggatatctgaaggggtatactctagttgaatatgaaacatacaaggaagcccaggctgctatggagggactcaatggccaggatttgatgggacagcccatcagcgttgactggtgttttgttcggggtccaccaaaaggcaagaggagaggtggccgaagacgcagcagaagtccagaccggagacgtcgctgacaggtcctctgttgtccaggtgttctcttcaagattccatttgaccatgcagccttggacaaataggactggggtggaacttgctgtgtttatatttaatctcttaccgtatatgcgtagtatttgagttgcgaataaatgttccatttttgttttctaaaaaaaaaaaaaaaaaaaaaaaaaaaaaaaaaaaaaaaaaaaaanacacaagcaacaaacnaacaangacaca

SEQ ID NO: 290819 - DNA, 750 bp, Homo sapiens
cccagcaaagatgccccagacaggaaggtgatcccagtgacagcgtggagcaggatggcgatgaacccggaccacaacgctgtgagtaataatggaacctgtgaggtatccgtgtctgtggtagtagttagaaaccaataaaatagttaaacgcagtaggaatgggttcagagatagcttaaacaatctgagtccgcactcactctattcctgtgagcctgcttaaagtgtctctcatgtactcatacaacttccccccgtcccccaacagctgttgaaggctggattctctttgtaactggagtccatgaggaagccaccgaagaagacatacacgacaaattcgcagaatatggggaaattaaaaacattcatctcaacctcgacaggcgaacaggatatctgaaggggtatactctagttgaatatgaaacatacaaggaagcccaggctgctatggagggactcaatggccaggatttgatgggacagcccatcagcgttgactggtgttttgttcggggtccaccaaaaggcaagaggagaggtggccgaagacgcagcagaagtccagaccggagacgtcgctgacaggtcctctgttgtccaggtgttctcttcaagattccatttgaccatgcagccttggacaaataggactggggtggaacttgctgtgtttatatttaatctcttaccgtatatgcgtagtatttgagttgcgaataaatgttccatttttgttttcta

SEQ ID NO: 290820 - DNA, 725 bp, Homo sapiens
  misc_feature (696)..(696): n is a, c, g, or t
ggcacagacgagatctcgatcgaaggcgagatggcggacgtgctagatcttcacgaggctgggggcgaagatttcgccatggatgaggatggggacgagagcattcacaaactgaaagaaaaagcgaagaaacggaagggtcgcggctttggctccgaagaggggtcccgagcgcggatgcgtgaggattatgacagcgtggagcaggatggcgatgaacccggaccacaacgctctgttgaaggctggattctctttgtaactggagtccatgaggaagccaccgaagaagacatacacgacaaattcgcagaatatggggaaattaaaaacattcatctcaacctcgacaggcgaacaggatatctgaaggggtatactctagttgaatatgaaacatacaaggaagcccaggctgctatggagggactcaatggccaggatttgatgggacagcccatcagcgttgactggtgttttgttcggggtccaccaaaaggcaagaggagacaagcaaacttacccggttgcaaagaggctttcttgcagaagggtcagaatggcggcagtggagcatcgtcattcttcaggattgccctagtggccctacctcacagctgaaactttaaaaaacaggatgggccaacagacacctcctccaactcaaaaaattctataattgataactccctgagnctaaagaacacttccgagtgtgtgctcta

SEQ ID NO: 290821 - DNA, 823 bp, Homo sapiens
  misc_feature (795)..(795): n is a, c, g, or t
  misc_feature (811)..(811): n is a, c, g, or t
  misc_feature (817)..(817): n is a, c, g, or t
cccagcaaagatgccccagacaggaaggtgatcccagtgacagcgtggagcaggatggcgatgaacccggaccacaacgctgtgagtaataatggaacctgtgaggtatccgtgtctgtggtagtagttagaaaccaataaaatagttaaacgcagtaggaatgggttcagagatagcttaaacaatctgagtccgcactcactctattcctgtgagcctgcttaaagtgtctctcatgtactcatacaacttccccccgtcccccaacagctgttgaaggctggattctctttgtaactggagtccatgaggaagccaccgaagaagacatacacgacaaattcgcagaatatggggaaattaaaaacattcatctcaacctcgacaggcgaacaggatatctgaaggggtatactctagttgaatatgaaacatacaaggaagcccaggctgctatggagggactcaatggccaggatttgatgggacagcccatcagcgttgactggtgttttgttcggggtccaccaaaaggcaagaggagaggtggccgaagacgcagcagaagtccagaccggagacgtcgctgacaggtcctctgttgtccaggtgttctcttcaagattccatttgaccatgcagccttggacaaataggactggggtggaacttgctgtgtttatatttaatctcttaccgtatatgcgtagtatttgagttgcgaataaatgttccatttttgttttctaaaaaaaaaaaaaaaaaaaaaaaaaaaaaaaaaaaaaaaaaaaaanacacaagcaacaaacnaacaangacaca

SEQ ID NO: 290822 - DNA, 1018 bp, Homo sapiens
ggcacagacgagatctcgatcgaaggcgagatggcggacgtgctagatcttcacgaggctgggggcgaagatttcgccatggatgaggatggggacgagagcattcacaaactgaaagaaaaagcgaagaaacggaagggtcgcggctttggctccgaagaggggtcccgagcgcggatgcgtgaggattatgacagcgtggagcaggatggcgatgaacccggaccacaacgctctgttgaaggctggattctctttgtaactggagtccatgaggaagccaccgaagaagacatacacgacaaattcgcagaatatggggaaattaaaaacattcatctcaacctcgacaggcgaacaggatatctgaaggtatcctaagtgacactttattgcctcctttctttcataagccttaggtagcattcgtagttctgtgtttgctgtggttggccaagagcaaagttgaaataaaatgacattggaaatctatgttttgtcagacacgccaaagagacagaaacggagatgatgtatatatacagtagagatatatgatgtacattcattgtttaaagtgtgtagatttttctgagtttagatttgaggaaaaagatactcagtgatacttggggaaataggagggttttcatatctgtcttttcactttccccaggggtatactctagttgaatatgaaacatacaaggaagcccaggctgctatggagggactcaatggccaggatttgatgggacagcccatcagcgttgactggtgttttgttcggggtccaccaaaaggcaagaggagaggtggccgaagacgcagcagaagtccagaccggagacgtcgctgacaggtcctctgttgtccaggtgttctcttcaagattccatttgaccatgcagccttggacaaataggactggggtggaacttgctgtgtttatatttaatctcttaccgtatatgcgtagtatttgagttgcgaataaatgttccatttttgttttcta

SEQ ID NO: 290823 - DNA, 788 bp, Homo sapiens
  misc_feature (215)..(215): n is a, c, g, or t
  misc_feature (391)..(391): n is a, c, g, or t
  misc_feature (396)..(396): n is a, c, g, or t
ctgtattcaaaaagttttttaaattagcttgttatcccttcatgtgataattaatctcaaatactttttcgatacctcagagcattattttcataatgactgtgttcacaatctttttaggttaactcgttttctctttgtgattaaggagaaacactttgatattctgatagagtggccttcattttagtatttttcaagaccacttttcaacnactcactttaggataagttttaggtaaaatgtgcatcattatcctgaattatttcagttaagcatgttagttggtggcataagagaaaactcaatcagatagtgctgaagacaggactgtggagacaccttagaaggacagattctgttccgaatcaccgatgcggcgtcagcagnactgncctagcggaggctctgggagggtggctgccaggcccggcctgggctttgggtctccccggactacccagagctgggatgcgtggcttctgctgccgggccgactggctgctcaggccccagcccttgttaatggacttggaggaatgattccatgccaaagctttgcaaggctcgcagtgaccaggcgcccgacatggttggctgcagaaggtccgaagaaagaggagttactggaggaaaaagtggttcagaggtgactattcaaccgcataagagatggtgaaaattaacctatcaccactgctaatgaacatcaccctatggagaaccgagacacaaaagggaagattcagaatgtgtgacttgtataaaataaaaccagtttcccccg

SEQ ID NO: 290824 - DNA, 2778 bp, Homo sapiens
  misc_feature (7)..(8): n is a, c, g, or t
tcattannagtaagtcaccagaacagtccacactcaaggggaggggattcttaagggcatgagtaccaggaagtgggagtcactgggatcatcttagaggctgcctaccagactcagtttacagctttcccaggtatcatccccttaaagatctcgactaatttctcatcaccttccctcctaaagacacaaaaaatccaagttcactgatcctggaatggggaacctcacctacagcaacccctcctaccgaacatccacacaggaagtgaagattgaagcaatccccaaaccagccatgtacaaccagctgtgctataagaaagagggagggcctgaccataactacaccaaggagaagatcaagatcgtagagggaatctgcctcctgtctggggatgatgctgagtgggatgacctcaagcaactgcgaagctcacgggggggcctcctccgggatcatgtatgcatgaagacagacacggtgtccatccaggccagctctggctccctggatgacacagagacggagcagctgttacaggaagagcagtctgagtgtagcagcgtccatactgcagccactccagaaagacgaggctctctgccagacacgggctggaaacatgaacgcaagctctcctcagagagccaggtctaaatgcccacattctcttccctgcctgcctgttccttctcctttatggacgtctagtccttgtgctcgcttacaccgcaggccccgcttctgtgtgcttgtcctcctcctcctcccaccccataactgttcctaagccttcaccggagctgtttaccacgtgagtccataactacctgtgcacaagaaatgatggcacatcacgagaatttagacctggattttaccatgaacctcacatcttgtactccatcctgggccccctgaaactgcttattcgtgattcctcaccagcgtagagctccacctcccctttccccagtaccctcagtgcctgcttctcagtgctgatgcagctgatgacccaggactgcgctctgccccatcacagccagcatgactgcttctctgagagaacttgcccatcaggggctgggacatgggggtgtgggtaaagacagggatgaaggatagaggctgagagaagaaggaagaatcagcccagcaggtatgggcatctgggaaacctccagcctcaagtgtgttggtaacatgaaaaagctctggggggtagttggatctgggtgtctggtccattgctggcagtggacattattcttgccctaagagacactgcctttttcagcagcagatactggtgagatgggggtggctcaggctgttcttcctcctcctagaatgtctggagctgtttctacattcagataactgggtcccctatcacaaggctactggctaataggaattccctcctggtgccaccactggccagtacctttcctaagtctttgctcaaattaaccaggttgtgagccagtggcttgagtgaatgttaggccttgggggctgagtctctgaaaagtctaagaagctctgcctagaccaaatatggtatacctcctgacccctctctccctcatgtcctgggattctggggaagagacctagaaacaagctttcaaagaaaaaccagaagttgtcataaatggtcagaaagaacgatcaggttggagacttgggaaacccagggcctaaagagaagtatccatgagggtcaaacttcctgttgaacttcctatgttctttctcaagtgctcagggatctaagttagtggacagcaagcctgtggctacggggtggtgatgttcctcttccagctgtcccctcagctaaggggcttagtttccatgtgggatgccatcacttggttcatgctcattcacacaaagggcacgtgtctcagcctggtatcagggaaattgagacttatttttgccctaaaacgtctccctagctgttcttcgtggggtttttttgtttgtttttttgcctaatttgctttttctgaccaagccttgtggcaccagcaatctccaaagtcctgtggtgggagggctgaataaataaaaatacaaagaggtgggtaaggagtaggaaggtagagagcaccactgatgaggccctcctagcccatggcagacccagacctcttctcccccaggaattagaagtggcaggagagaacaacaggggctgggaatggaggggagaatttctaggggaagtttcctgagttgaaacttctcctgtggttactggtattgagaaatcagctaccaaagtgaaaaaggacaagatcaattcttttctagtcagttctaagactgctagagagagataccaggcccttagccttgctctcagtagcgtcagccccagttctgagcctccccacattacacttaacaagcagtaaaggagtgagcactttgggtccttagactcatgtctggggaggaagagcaagtagaaaagtggcattttcttgattggaaagggggaaggatcttattgcacttgggctgttcagaatgtagaaaggacatatttgaggaagtatctatttgagcactgatttactctgtaaaaagcaaaatctctctgtcctaaactaatggaagcgattctcccatgctcatgtgtaatggttttaacgttactcactggagagattggactttctggagttatttaaccactatgttcagtattttaggactttatgataatttaatataaatttagcttttcttaatca

SEQ ID NO: 290825 - DNA, 554 bp, Homo sapiens
gcggccgctcccacttcagattggtaagcaatctccaaagtcctgtggttactggtattgagaaatcagctaccaaagtgaaaaaggacaagatcaattcttttctagtcagttctaagactgctagagagagataccaggcccttagccttgctctcagtagcgtcagccccagttctgagcctccccacattacacttaacaagcagtaaaggagtgagcactttgggtccttagactcatgtctggggaggaagagcaagtagaaaagtggcattttcttgattggaaagggggaaggatcttattgcacttgggctgttcagaatgtagaaaggacatatttgaggaagtatctatttgagcactgatttactctgtaaaaagcaaaatctctctgtcctaaactaatggaagcgattctcccatgctcatgtgtaatggttttaacgttactcactggagagattggactttctggagttatttaaccactatgttcagtattttaggactttatgataatttaatataaatttagcttttcttaatca

SEQ ID NO: 290826 - DNA, 453 bp, Homo sapiens
ccactcagctctgtggaacttctccccagtggcctaaatgctgattcctgggacagttccaaatataggttccccactcccgctttataggaaccagtttaccaagacctggaggccaccactatgtctcatgcctttctttctgcatcctgcacattctcagtaccttccagactcttgccaagatgcaggcatgtctttccctgctgctccaggggaaggacttcatatcagctacgccattggtggactcctcagtattctgctgattttggtggtgattgcagctttgatgctgtacaggtaacttcagtcttgctacaggggccacatgctcattggtcttcatgagcatgtctgggatctcccgaagctctgcagttcactgaatcaagctctgaccagccttattgcaaggttgggtgcctggtcagagcagcagggaggaaaggg

SEQ ID NO: 290827 - DNA, 648 bp, Homo sapiens
acatctatcatgctgggtgctgaggaatgtactcatagatacctggtctctatccctgtggagcttacagttcagtggggtccagttatgggaacatgggttaaagttctactctattctgggtcagtctggttgctcatccaacactgggctctccccaaggcgagcagacctgaacggcagcaacatggagacagtgatcgggcgagggctgaagaccactgacgggctggcagtggactgggtggccaggaacctgtactggacagacacaggtcgaaataccattgaggcgtccaggctggatggttcctgccgcaaagtactgatcaacaatagcctggatgagccccgggccattgctgttttccccaggaaggggtacctcttctggacagactggggccacattgccaagatcgaacgggcaaacttggatggttctgagcggaaggtcctcatcaacacagacctgggttggcccaatggccttaccctggactatgatacccgcaggatctactgggtggatgcgcatctggaccggatcgagagtgctgacctcaatgggaaactgcggcaggtcttggtcggccatgtgtcccacccctttgccctcacacaggcaggactcaaggcagagaggta

SEQ ID NO: 290828 - DNA, 3784 bp, Homo sapiens
acctacctgctcttctccagccgtggctccatccggcgtatctcactggacaccagtgaccacaccgatgtgcatgtccctgttcctgagctcaacaatgtcatctccctggactatgacagcgtggatggaaaggtctattacacagatgtgttcctggatgttatcaggcgagcagacctgaacggcagcaacatggagacagtgatcgggcgagggctgaagaccactgacgggctggcagtggactgggtggccaggaacctgtactggacagacacaggtcgaaataccattgaggcgtccaggctggatggttcctgccgcaaagtactgatcaacaatagcctggatgagccccgggccattgctgttttccccaggaaggggtacctcttctggacagactggggccacattgccaagatcgaacgggcaaacttggatggttctgagcggaaggtcctcatcaacacagacctgggttggcccaatggccttaccctggactatgatacccgcaggatctactgggtggatgcgcatctggaccggatcgagagtgctgacctcaatgggaaactgcggcaggtcttggtcggccatgtgtcccacccctttgccctcacacagcaagacaggtggatctactggacagactggcagaccaagtcaatccagcgtgttgacaaatactcaggccggaacaaggagacagtgctggcaaatgtggaaggactcatggatatcatcgtggtttcccctcagcggcagacagggaccaatgcctgtggtgtgaacaatggtggctgcacccacctctgctttgccagagcctcggacttcgtatgtgcctgtcctgacgaacctgatagccagccctgctcccttgtgcctggcctggtaccaccagctcctagggctactggcatgagtgaaaagagcccagtgctacccaacacaccacctaccaccttgtattcttcaaccacccggacccgcacgtctctggaggaggtggaaggaagatgctctgaaagggatgccaggctgggcctctgtgcacgttccaatgacgctgttcctgctgctccaggggaaggacttcatatcagctacgccattggtggactcctcagtattctgctgattttggtggtgattgcagctttgatgctgtacaggtaacttcacacaaaaaatccaagttcactgatcctggaatggggaacctcacctacagcaacccctcctaccgaacatccacacaggaagtgaagattgaagcaatccccaaaccagccatgtacaaccagctgtgctataagaaagagggagggcctgaccataactacaccaaggagaagatcaagatcgtagagggaatctgcctcctgtctggggatgatgctgagtgggatgacctcaagcaactgcgaagctcacgggggggcctcctccgggatcatgtatgcatgaagacagacacggtgtccatccaggccagctctggctccctggatgacacagagacggagcagctgttacaggaagagcagtctgagtgtagcagcgtccatactgcagccactccagaaagacgaggctctctgccagacacgggctggaaacatgaacgcaagctctcctcagagagccaggtctaaatgcccacattctcttccctgcctgcctgttccttctcctttatggacgtctagtccttgtgctcgcttacaccgcaggccccgcttctgtgtgcttgtcctcctcctcctcccaccccataactgttcctaagccttcaccggagctgtttaccacgtgagtccataactacctgtgcacaagaaatgatggcacatcacgagaatttagacctggattttaccatgaacctcacatcttgtactccatcctgggccccctgaaactgcttattcgtgattcctcaccagcgtagagctccacctcccctttccccagtaccctcagtgcctgcttctcagtgctgatgcagctgatgacccaggactgcgctctgccccatcacagccagcatgactgcttctctgagagaacttgcccatcaggggctgggacatgggggtgtgggtaaagacagggatgaaggatagaggctgagagaagaaggaagaatcagcccagcaggtatgggcatctgggaaacctccagcctcaagtgtgttggtaacatgaaaaagctctggggggtagttggatctgggtgtctggtccattgctggcagtggacattattcttgccctaagagacactgcctttttcagcagcagatactggtgagatgggggtggctcaggctgttcttcctcctcctagaatgtctggagctgtttctacattcagataactgggtcccctatcacaaggctactggctaataggaattccctcctggtgccaccactggccagtacctttcctaagtctttgctcaaattaaccaggttgtgagccagtggcttgagtgaatgttaggccttgggggctgagtctctgaaaagtctaagaagctctgcctagaccaaatatggtatacctcctgacccctctctccctcatgtcctgggattctggggaagagacctagaaacaagctttcaaagaaaaaccagaagttgtcataaatggtcagaaagaacgatcaggttggagacttgggaaacccagggcctaaagagaagtatccatgagggtcaaacttcctgttgaacttcctatgttctttctcaagtgctcagggatctaagttagtggacagcaagcctgtggctacggggtggtgatgttcctcttccagctgtcccctcagctaaggggcttagtttccatgtgggatgccatcacttggttcatgctcattcacacaaagggcacgtgtctcagcctggtatcagggaaattgagacttatttttgccctaaaacgtctccctagctgttcttcgtggggtttttttgtttgtttttttgcctaatttgctttttctgaccaagccttgtggcaccagcaatctccaaagtcctgtggtgggagggctgaataaataaaaatacaaagaggtgggtaaggagtaggaaggtagagagcaccactgatgaggccctcctagcccatggcagacccagacctcttctcccccaggaattagaagtggcaggagagaacaacaggggctgggaatggaggggagaatttctaggggaagtttcctgagttgaaacttctcctgtggttactggtattgagaaatcagctaccaaagtgaaaaaggacaagatcaattcttttctagtcagttctaagactgctagagagagataccaggcccttagccttgctctcagtagcgtcagccccagttctgagcctccccacattacacttaacaagcagtaaaggagtgagcactttgggtccttagactcatgtctggggaggaagagcaagtagaaaagtggcattttcttgattggaaagggggaaggatcttattgcacttgggctgttcagaatgtagaaaggacatatttgaggaagtatctatttgagcactgatttactctgtaaaaagcaaaatctctctgtcctaaactaatggaagcgattctcccatgctcatgtgtaatggttttaacgttactcactggagagattggactttctggagttatttaaccactatgttcagtattttaggactttatgataatttaatataaatttagcttttcttaatca

SEQ ID NO: 290829 - DNA, 2215 bp, Homo sapiens
cggacgcgtgggtcgaccacgcgtcggaaagacgaggctctctgccagacacgggctggaaacatgaacgcaagctctcctcagagagccaggtctaaatgcccacattctcttccctgcctgcctgttccttctcctttatggacgtctagtccttgtgctcgcttacaccgcaggccccgcttctgtgtgcttgtcctcctcctcctcccaccccataactgttcctaagccttcaccggagctgtttaccacgtgagtccataactacctgtgcacaagaaatgatggcacatcacgagaatttagacctggattttaccatgaacctcacatcttgtactccatcctgggccccctgaaactgcttattcgtgattcctcaccagcgtagagctccacctcccctttccccagtaccctcagtgcctgcttctcagtgctgatgcagctgatgacccaggactgcgctctgccccatcacagccagcatgactgcttctctgagagaacttgcccatcaggggctgggacatgggggtgtgggtaaagacagggatgaaggatagaggctgagagaagaaggaagaatcagcccagcaggtatgggcatctgggaaacctccagcctcaagtgtgttggtaacatgaaaaagctctggggggtagttggatctgggtgtctggtccattgctggcagtggacattattcttgccctaagagacactgcctttttcagcagcagatactggtgagatgggggtggctcaggctgttcttcctcctcctagaatgtctggagctgtttctacattcagataactgggtcccctatcacaaggctactggctaataggaattccctcctggtgccaccactggccagtacctttcctaagtctttgctcaaattaaccaggttgtgagccagtggcttgagtgaatgttaggccttgggggctgagtctctgaaaagtctaagaagctctgcctagaccaaatatggtatacctcctgacccctctctccctcatgtcctgggattctggggaagagacctagaaacaagctttcaaagaaaaaccagaagttgtcataaatggtcagaaagaacgatcaggttggagacttgggaaacccagggcctaaagagaagtatccatgagggtcaaacttcctgttgaacttcctatgttctttctcaagtgctcagggatctaagttagtggacagcaagcctgtggctacggggtggtgatgttcctcttccagctgtcccctcagctaaggggcttagtttccatgtgggatgccatcacttggttcatgctcattcacacaaagggcacgtgtctcagcctggtatcagggaaattgagacttatttttgccctaaaacgtctccctagctgttcttcgtggggtttttttgtttgtttttttgcctaatttgctttttctgaccaagccttgtggcaccagcaatctccaaagtcctgtggtgggagggctgaataaataaaaatacaaagaggtgggtaaggagtaggaaggtagagagcaccactgatgaggccctcctagcccatggcagacccagacctcttctcccccaggaattagaagtggcaggagagaacaacaggggctgggaatggaggggagaatttctaggggaagtttcctgagttgaaacttctcctgtggttactggtattgagaaatcagctaccaaagtgaaaaaggacaagatcaattcttttctagtcagttctaagactgctagagagagataccaggcccttagccttgctctcagtagcgtcagccccagttctgagcctccccacattacacttaacaagcagtaaaggagtgagcactttgggtccttagactcatgtctggggaggaagagcaagtagaaaagtggcattttcttgattggaaagggggaaggatcttattgcacttgggctgttcagaatgtagaaaggacatatttgaggaagtatctatttgagcactgatttactctgtaaaaagcaaaatctctctgtcctaaactaatggaagcgattctcccatgctcatgtgtaatggttttaacgttactcactggagagattggactttctggagttatttaaccactatgttcagtattttaggactttatgataatttaatataaatttagcttttcttaatca

SEQ ID NO: 290830 - DNA, 4160 bp, Homo sapiens
acctacctgctcttctccagccgtggctccatccggcgtatctcactggacaccagtgaccacaccgatgtgcatgtccctgttcctgagctcaacaatgtcatctccctggactatgacagcgtggatggaaaggtctattacacagatgtgttcctggatgttatcaggcgagcagacctgaacggcagcaacatggagacagtgatcgggcgagggctgaagaccactgacgggctggcagtggactgggtggccaggaacctgtactggacagacacaggtcgaaataccattgaggcgtccaggctggatggttcctgccgcaaagtactgatcaacaatagcctggatgagccccgggccattgctgttttccccaggaaggggtacctcttctggacagactggggccacattgccaagatcgaacgggcaaacttggatggttctgagcggaaggtcctcatcaacacagacctgggttggcccaatggccttaccctggactatgatacccgcaggatctactgggtggatgcgcatctggaccggatcgagagtgctgacctcaatgggaaactgcggcaggtcttggtcggccatgtgtcccacccctttgccctcacacagcaagacaggtggatctactggacagactggcagaccaagtcaatccagcgtgttgacaaatactcaggccggaacaaggagacagtgctggcaaatgtggaaggactcatggatatcatcgtggtttcccctcagcggcagacagggaccaatgcctgtggtgtgaacaatggtggctgcacccacctctgctttgccagagcctcggacttcgtatgtgcctgtcctgacgaacctgatagccagccctgctcccttgtgcctggcctggtaccaccagctcctagggctactggcatgagtgaaaagagcccagtgctacccaacacaccacctaccaccttgtattcttcaaccacccggacccgcacgtctctggaggaggtggaaggaagatgctctgaaagggatgccaggctgggcctctgtgcacgttccaatgacgctgttcctgctgctccaggggaaggacttcatatcagctacgccattggtggactcctcagtattctgctgattttggtggtgattgcagctttgatgctgtacaggtaacttcacacaaaaaatccaagttcactgatcctggaatggggaacctcacctacagcaacccctcctaccgaacatccacacaggaagtgaagattgaagcaatccccaaaccagccatgtacaaccagctgtgctataagaaagagggagggcctgaccataactacaccaaggagaagatcaagatcgtagagggaatctgcctcctgtctggggatgatgctgagtgggatgacctcaagcaactgcgaagctcacgggggggcctcctccgggatcatgtatgcatgaagacagacacggtgtccatccaggccagctctggctccctggatgacacagagacggagcagctgttacaggaagagcagtctgagtgtagcagcgtccatactgcagccactccagaaagacgaggctctctgccagacacgggctggaaacatgaacgcaagctctcctcagagagccaggtctaaatgcccacattctcttccctgcctgcctgttccttctcctttatggacgtctagtccttgtgctcgcttacaccgcaggccccgcttctgtgtgcttgtcctcctcctcctcccaccccataactgttcctaagccttcaccggagctgtttaccacgtgagtccataactacctgtgcacaagaaatgatggcacatcacgagaatttagacctggattttaccatgaacctcacatcttgtactccatcctgggccccctgaaactgcttattcgtgattcctcaccagcgtagagctccacctcccctttccccagtaccctcagtgcctgcttctcagtgctgatgcagctgatgacccaggactgcgctctgccccatcacagccagcatgactgcttctctgagagaacttgcccatcaggggctgggacatgggggtgtgggtaaagacagggatgaaggatagaggctgagagaagaaggaagaatcagcccagcaggtatgggcatctgggaaacctccagcctcaagtgtgttggtaacatgaaaaagctctggggggtagttggatctgggtgtctggtccattgctggcagtggacattattcttgccctaagagacactgcctttttcagcagcagatactggtgagatgggggtggctcaggctgttcttcctcctcctagaatgtctggagctgtttctacattcagataactgggtcccctatcacaaggctactggctaataggaattccctcctggtgccaccactggccagtacctttcctaagtctttgctcaaattaaccaggttgtgagccagtggcttgagtgaatgttaggccttgggggctgagtctctgaaaagtctaagaagctctgcctagaccaaatatggtatacctcctgacccctctctccctcatgtcctgggattctggggaagagacctagaaacaagctttcaaagaaaaaccagaagttgtcataaatggtcagaaagaacgatcaggttggagacttgggaaacccagggcctaaagagaagtatccatgagggtcaaacttcctgttgaacttcctatgttctttctcaagtgctcagggatctaagttagtggacagcaagcctgtggctacggggtggtgatgttcctcttccagctgtcccctcagctaaggggcttagtttccatgtgggatgccatcacttggttcatgctcattcacacaaagggcacgtgtctcagcctggtatcagggaaattgagacttatttttgccctaaaacgtctccctagctgttcttcgtggggtttttttgtttgtttttttgcctaatttgctttttctgaccaagccttgtggcaccagcaatctccaaagtcctgtggtgggagggctgaataaataaaaatacaaagaggtgggtaaggagtaggaaggtagagagcaccactgatgaggccctcctagcccatggcagacccagacctcttctcccccaggaattagaagtggcaggagagaacaacaggggctgggaatggaggggagaatttctaggggaagtttcctgagttgaaacttctcctgtggttactggtattgagaaatcagctaccaaagtgaaaaaggacaagatcaattcttttctagtcagttctaagactgctagagagagataccaggcccttagccttgctctcagtagcgtcagccccagttctgagcctccccacattacacttaacaagcagtaaaggagtgagcactttgggtccttagactcatgtctggggaggaagagcaagtagaaaagtggcattttcttgattggaaagggggaaggatcttattgcacttgggctgttcagaatgtagaaaggacatatttgaggaagtatctatttgagcactgatttactctgtaaaaagcaaaatctctctgtcctaaactaatggaagcgattctcccatgctcatgtgtaatggttttaacgttactcactggagagattggactttctggagttatttaaccactatgttcagtattttaggactttatgataatttaatataaatttagcttttcttaatcaccttgcctggcttggagtcatgactaatcctgcacctgctctgtctggcagacccatgctgtggaaaacctgcttacagacatcacttttaagtcctttgtggatgtgggcacagtgaagagcaataaagagtgtgaggttcctgctggagttttcagctcatctggagaagacaggtcgaggccagagttccttgactgatgaaacctttatttcctctggaagaggaatggtagatgggtttcctcttgagtgctgactctgactggttggtagtggctgcctgagggcctattcgcacccaatgggaagaatgtcatatggctagtgacatctcttctgtgcactggaaggaaatgtcatggcatgtatacca

SEQ ID NO: 290831 - DNA, 3532 bp, Homo sapiens
acctacctgctcttctccagccgtggctccatccggcgtatctcactggacaccagtgaccacaccgatgtgcatgtccctgttcctgagctcaacaatgtcatctccctggactatgacagcgtggatggaaaggtctattacacagatgtgttcctggatgttatcaggcgagcagacctgaacggcagcaacatggagacagtgatcgggcgagggctgaagaccactgacgggctggcagtggactgggtggccaggaacctgtactggacagacacaggtcgaaataccattgaggcgtccaggctggatggttcctgccgcaaagtactgatcaacaatagcctggatgagccccgggccattgctgttttccccaggaaggggtacctcttctggacagactggggccacattgccaagatcgaacgggcaaacttggatggttctgagcggaaggtcctcatcaacacagacctgggttggcccaatggccttaccctggactatgatacccgcaggatctactgggtggatgcgcatctggaccggatcgagagtgctgacctcaatgggaaactgcggcaggtcttggtcggccatgtgtcccacccctttgccctcacacagcaagacaggtggatctactggacagactggcagaccaagtcaatccagcgtgttgacaaatactcaggccggaacaaggagacagtgctggcaaatgtggaaggactcatggatatcatcgtggtttcccctcagcggcagacagggaccaatgcctgtggtgtgaacaatggtggctgcacccacctctgctttgccagagcctcggacttcgtatgtgcctgtcctgacgaacctgatagccagccctgctcccttgtgcctggcctggtaccaccagctcctagggctactggcatgagtgaaaagagcccagtgctacccaacacaccacctaccaccttgtattcttcaaccacccggacccgcacgtctctggaggaggtggaaggaagatgctctgaaagggatgccaggctgggcctctgtgcacgttccaatgacgctgttcctgctgctccaggggaaggacttcatatcagctacgccattggtggactcctcagtattctgctgattttggtggtgattgcagctttgatgctgtacaggtaacttcacacaaaaaatccaagttcactgatcctggaatggggaacctcacctacagcaacccctcctaccgaacatccacacaggaagtgaagattgaagcaatccccaaaccagccatgtacaaccagctgtgctataagaaagagggagggcctgaccataactacaccaaggagaagatcaagatcgtagagggaatctgcctcctgtctggggatgatgctgagtgggatgacctcaagcaactgcgaagctcacgggggggcctcctccgggatcatgtatgcatgaagacagacacggtgtccatccaggccagctctggctccctggatgacacagagacggagcagctgttacaggaagagcagtctgagtgtagcagcgtccatactgcagccactccagaaagacgaggctctctgccagacacgggctggaaacatgaacgcaagctctcctcagagagccaggtctaaatgcccacattctcttccctgcctgcctgttccttctcctttatggacgtctagtccttgtgctcgcttacaccgcaggccccgcttctgtgtgcttgtcctcctcctcctcccaccccataactgttcctaagccttcaccggagctgtttaccacgtgagtccataactacctgtgcacaagaaatgatggcacatcacgagaatttagacctggattttaccatgaacctcacatcttgtactccatcctgggccccctgaaactgcttattcgtgattcctcaccagcgtagagctccacctcccctttccccagtaccctcagtgcctgcttctcagtgctgatgcagctgatgacccaggactgcgctctgccccatcacagccagcatgactgcttctctgagagaacttgcccatcaggggctgggacatgggggtgtgggtaaagacagggatgaaggatagaggctgagagaagaaggaagaatcagcccagcaggtatgggcatctgggaaacctccagcctcaagtgtgttggtaacatgaaaaagctctggggggtagttggatctgggtgtctggtccattgctggcagtggacattattcttgccctaagagacactgcctttttcagcagcagatactggtgagatgggggtggctcaggctgttcttcctcctcctagaatgtctggagctgtttctacattcagataactgggtcccctatcacaaggctactggctaataggaattccctcctggtgccaccactggccagtacctttcctaagtctttgctcaaattaaccaggttgtgagccagtggcttgagtgaatgttaggccttgggggctgagtctctgaaaagtctaagaagctctgcctagaccaaatatggtatacctcctgacccctctctccctcatgtcctgggattctggggaagagacctagaaacaagctttcaaagaaaaaccagaagttgtcataaatggtcagaaagaacgatcaggttggagacttgggaaacccagggcctaaagagaagtatccatgagggtcaaacttcctgttgaacttcctatgttctttctcaagtgctcagggatctaagttagtggacagcaagcctgtggctacggggtggtgatgttcctcttccagctgtcccctcagctaaggggcttagtttccatgtgggatgccatcacttggttcatgctcattcacacaaagggcacgtgtctcagcctggtatcagggaaattgagacttatttttgccctaaaacgtctccctagctgttcttcgtggggtttttttgtttgtttttttgcctaatttgctttttctgaccaagccttgtggcaccagcaatctccaaagtcctgtggtgggagggctgaataaataaaaatacaaagaggtgggtaaggagtaggaaggtagagagcaccactgatgaggccctcctagcccatggcagacccagacctcttctcccccaggaattagaagtggcaggagagaacaacaggggctgggaatggaggaagagcaagtagaaaagtggcattttcttgattggaaagggggaaggatcttattgcacttgggctgttcagaatgtagaaaggacatatttgaggaagtatctatttgagcactgatttactctgtaaaaagcaaaatctctctgtcctaaactaatggaagcgattctcccatgctcatgtgtaatggttttaacgttactcactggagagattggactttctggagttatttaaccactatgttcagtattttaggactttatgataatttaatataaatttagcttttcttaatca

SEQ ID NO: 290832 - DNA, 2311 bp, Homo sapiens
acctacctgctcttctccagccgtggctccatccggcgtatctcactggacaccagtgaccacaccgatgtgcatgtccctgttcctgagctcaacaatgtcatctccctggactatgacagcgtggatggaaaggtctattacacagatgtgttcctggatgttatcaggcgagcagacctgaacggcagcaacatggagacagtgatcgggcgagggctgaagaccactgacgggctggcagtggactgggtggccaggaacctgtactggacagacacaggtcgaaataccattgaggcgtccaggctggatggttcctgccgcaaagtactgatcaacaatagcctggatgagccccgggccattgctgttttccccaggaaggggtacctcttctggacagactggggccacattgccaagatcgaacgggcaaacttggatggttctgagcggaaggtcctcatcaacacagacctgggttggcccaatggccttaccctggactatgatacccgcaggatctactgggtggatgcgcatctggaccggatcgagagtgctgacctcaatgggaaactgcggcaggtcttggtcggccatgtgtcccacccctttgccctcacacagcaagacaggtggatctactggacagactggcagaccaagtcaatccagcgtgttgacaaatactcaggccggaacaaggagacagtgctggcaaatgtggaaggactcatggatatcatcgtggtttcccctcagcggcagacagggaccaatgcctgtggtgtgaacaatggtggctgcacccacctctgctttgccagagcctcggacttcgtatgtgcctgtcctgacgaacctgatagccagccctgctcccttgtgcctggcctggtaccaccagctcctagggctactggcatgagtgaaaagagcccagtgctacccaacacaccacctaccaccttgtattcttcaaccacccggacccgcacgtctctggaggaggtggaaggaagatgctctgaaagggatgccaggctgggcctctgtgcacgttccaatgacgctgttcctgctgctccaggggaaggacttcatatcagctacgccattggtggactcctcagtattctgctgattttggtggtgattgcagctttgatgctgtacaggtaacttcacacaaaaaatccaagttcactgatcctggaatggggaacctcacctacagcaacccctcctaccgaacatccacacaggaagtgaagattgaagcaatccccaaaccagccatgtacaaccagctgtgctataagaaagagggagggcctgaccataactacaccaaggagaagatcaagatcgtagagggaatctgcctcctgtctggggatgatgctgagtgggatgacctcaagcaactgcgaagctcacgggggggcctcctccgggatcatgtatgcatgaagacagacacggtgtccatccaggccagctctggctccctggatgacacagagacggagcagctgttacaggaagagcagtctgagtgtagcagcgtccatactgcagccactccagaaagacgaggctctctgccagacacgggctggaaacatgaacgcaagctctcctcagagagccaggtctaaatgcccacattctcttccctgcctgcctgttccttctcctttatggacgtctagtccttgtgctcgcttacaccgcaggccccgcttctgtgtgcttgtcctcctcctcctcccaccccataactgttcctaagccttcaccggagctgtttaccacgtgagtccataactacctgtgcacaagaaatgatggcacatcacgagaatttagacctggattttaccatgaacctcacatcttgtactccatcctgggccccctgaaactgcttattcgtgattcctcaccagcgtagagctccacctcccctttccccagtaccctcagtgcctgcttctcagtgctgatgcagctgatgacccaggactgcgctctgccccatcacagccagcatgactgcttctctgagagaacttgcccatcaggggctgggacatgggggtgtgggtaaagacagggatgaaggatagaggctgagagaagaaggaagaatcagcccagcaggtatgggcatctgggaaacctccagcctcaagtgtgttggtaacatgaaaaagctctggggggtagttggatctggatggacttagcattcccccaccttgaccatattttcattcccccggatacttggacctttccc

SEQ ID NO: 290833 - DNA, 456 bp, Homo sapiens
ctagaggatcccggtcaatttctacacagagagagataccaggcccttagccttgctctcagtagcgtcagccccagttctgagcctccccacattacacttaacaagcagtaaaggagtgagcactttgggtccttagactcatgtctggggaggaagagcaagtagaaaagtggcattttcttgattggaaagggggaaggatcttattgcacttgggctgttcagaatgtagaaaggacatatttgaggaagtatctatttgagcactgatttactctgtaaaaagcaaaatctctctgtcctaaactaatggaagcgattctcccatgctcatgtgtaatggttttaacgttactcactggagagattggactttctggagttatttaaccactatgttcagtattttaggactttatgataatttaatataaatttagcttttcttaatca

SEQ ID NO: 290834 - DNA, 1945 bp, Homo sapiens
acctacctgctcttctccagccgtggctccatccggcgtatctcactggacaccagtgaccacaccgatgtgcatgtccctgttcctgagctcaacaatgtcatctccctggactatgacagcgtggatggaaaggtctattacacagatgtgttcctggatgttatcaggcgagcagacctgaacggcagcaacatggagacagtgatcgggcgagggctgaagaccactgacgggctggcagtggactgggtggccaggaacctgtactggacagacacaggtcgaaataccattgaggcgtccaggctggatggttcctgccgcaaagtactgatcaacaatagcctggatgagccccgggccattgctgttttccccaggaaggggtacctcttctggacagactggggccacattgccaagatcgaacgggcaaacttggatggttctgagcggaaggtcctcatcaacacagacctgggttggcccaatggccttaccctggactatgatacccgcaggatctactgggtggatgcgcatctggaccggatcgagagtgctgacctcaatgggaaactgcggcaggtcttggtcggccatgtgtcccacccctttgccctcacacagcaagacaggtggatctactggacagactggcagaccaagtcaatccagcgtgttgacaaatactcaggccggaacaaggagacagtgctggcaaatgtggaaggactcatggatatcatcgtggtttcccctcagcggcagacagggaccaatgcctgtggtgtgaacaatggtggctgcacccacctctgctttgccagagcctcggacttcgtatgtgcctgtcctgacgaacctgatagccagccctgctcccttgtgcctggcctggtaccaccagctcctagggctactggcatgagtgaaaagagcccagtgctacccaacacaccacctaccaccttgtattcttcaaccacccggacccgcacgtctctggaggaggtggaaggaagatgctctgaaagggatgccaggctgggcctctgtgcacgttccaatgacgctgttcctgctgctccaggggaaggacttcatatcagctacgccattggtggactcctcagtattctgctgattttggtggtgattgcagctttgatgctgtacaggtaacttcacacaaaaaatccaagttcactgatcctggaatggggaacctcacctacagcaacccctcctaccgaacatccacacaggaagtgaagattgaagcaatccccaaaccagccatgtacaaccagctgtgctataagaaagagggagggcctgaccataactacaccaaggagaagatcaagatcgtagagggaatctgcctcctgtctggggatgatgctgagtgggatgacctcaagcaactgcgaagctcacgggggggcctcctccgggatcatgtatgcatgaagacagacacggtgtccatccaggccagctctggctccctggatgacacagagacggagcagctgttacaggaagagcagtctgagtgtagcagcgtccatactgcagccactccagaaagacgaggcttctgtctggcagacccatgctgtggaaaacctgcttacagacatcacttttaagtcctttgtggatgtgggcacagtgaagagcaataaagagtgtgaggttcctgctggagttttcagctcatctggagaagacaggtcgaggccagagttccttgactgatgaaacctttatttcctctggaagaggaatggtagatgggtttcctcttgagtgctgactctgactggttggtagtggctgcctgagggcctattcgcacccaatgggaagaatgtcatatggctagtgacatctcttctgtgcactggaaggaaatgtcatggcatgtatacca

SEQ ID NO: 290835 - DNA, 1224 bp, Homo sapiens
acctacctgctcttctccagccgtggctccatccggcgtatctcactggacaccagtgaccacaccgatgtgcatgtccctgttcctgagctcaacaatgtcatctccctggactatgacagcgtggatggaaaggtctattacacagatgtgttcctggatgttatcaggcgagcagacctgaacggcagcaacatggagacagtgatcgggcgagggctgaagaccactgacgggctggcagtggactgggtggccaggaacctgtactggacagacacaggtcgaaataccattgaggcgtccaggctggatggttcctgccgcaaagtactgatcaacaatagcctggatgagccccgggccattgctgttttccccaggaaggggtacctcttctggacagactggggccacattgccaagatcgaacgggcaaacttggatggttctgagcggaaggtcctcatcaacacagacctgggttggcccaatggccttaccctggactatgatacccgcaggatctactgggtggatgcgcatctggaccggatcgagagtgctgacctcaatgggaaactgcggcaggtcttggtcggccatgtgtcccacccctttgccctcacacagcaagacaggtggatctactggacagactggcagaccaagtcaatccagcgtgttgacaaatactcaggccggaacaaggagacagtgctggcaaatgtggaaggactcatggatatcatcgtggtttcccctcagcggcagacagggaccaatgcctgtggtgtgaacaatggtggctgcacccacctctgctttgccagagcctcggacttcgtatgtgcctgtcctgacgaacctgatagccagccctgctcccttgtgcctggcctggtaccaccagctcctagggctactggcatgagtgaaaagagcccagtgctacccaacacaccacctaccaccttgtattcttcaaccacccggacccgcacgtctctggaggaggtggaaggaagatgctctgaaagggatgccaggctgggcctctgtgcacgttccaatgacgctgttcctgctgctccaggggaaggacttcatatcagctacgccattggtggactcctcagtattctgctgattttggtggtgattgcagctttgatgctgtacaggtaacttcgtgaagtcttgctggtggaaggaccgagctga

SEQ ID NO: 290836 - DNA, 737 bp, Homo sapiens
acctacctgctcttctccagccgtggctccatccggcgtatctcactggacaccagtgaccacaccgatgtgcatgtccctgttcctgagctcaacaatgtcatctccctggactatgacagcgtggatggaaaggtctattacacagatgtgttcctggatgttatcaggcgagcagacctgaacggcagcaacatggagacagtgatcgggcgagggctgaagaccactgacgggctggcagtggactgggtggccaggaacctgtactggacagacacaggtcgaaataccattgaggcgtccaggctggatggttcctgccgcaaagtactgatcaacaatagcctggatgagccccgggccattgctgttttccccaggaaggggtaagtttatggccagcagaagagagatccagggaagaagggctgggtggaaagatggtgttagtgggtcctctgtgttctctcaacctctgggtgctgtcttcccatgccttgatgatgatggcactgttgtgtctcaggtacctcttctggacagactggggccacattgccaagatcgaacgggcaaacttggatggttctgagcggaaggtcctcatcaacacagacctgggttggcccaatggccttaccctggactatgatacccgcaggtgggagtcttgcatcaaacagcctccgagtttttttgtttttgatatgccatgcgacgcacccccatcgccc

SEQ ID NO: 290837 - DNA, 2248 bp, Homo sapiens
  misc_feature (1056)..(1056): n is a, c, g, or t
  misc_feature (1178)..(1178): n is a, c, g, or t
  misc_feature (1206)..(1206): n is a, c, g, or t
ctgggatcaggcaaccctctcacctcagcctcccaagtagctgggactacaggtgcacgctaccatgcctggctaatttttttgtacttttagtaaagacggggttttgtcatgttgctcgggctagcctcaaactcctgggctcaagcgatcctccctcctcggcctcccaaagtgctgggattacaggcttgagccaccgcacctggccttccccatttttctcttaatccatatctcagacaggaatctgtatctctcactctacagatcattctgtaggcactatgctaaactgacaccagtttcaaatttagtccttaattgatcttggcctttaggtgagcaaagttacagtggtaaattacgctccttcgcttacaaaatctcttgcttggtatttattccccaggggttacatagaatagagtggaggcagtagacatggagaaatcctatcttttaagaaagaaaaaaatgggcatttttctcatggggaaggatttttatttttcaaataggtgtttgaactgtaatgatttcatgacatctgcctaacggttttgtttctttgtcttacagaaacaaacagtcgttgctgtcaaaaaagagatcatgtattaccaacaggccttgatgaggtccacagtgaagtcttctgtgtccctgggagggattgtgaaatacagtgagcagttctcatccaacgatgccatcatgtcaggctgcctccccagcaacccctggatcaccgatgacacccagttctgggacttaaatgccaaattggtggaaatcccaaccaagatgcgagtggaacgatgggccttcaacttcagcgaattgatccgagaccccaaaggtcgacagagcttccagtacttcctcaagaaagaattcagtggagagaatctgggattctgggaagcctgcgaggatctgaagtatggagatcagtccaaagtcaaggagaaagcagaggagatttacaagctgttcctggccccgggggcgaggcgctggatcaacatagatggcaaaaccatggacatcacngtgaaggggctgaagcacccccaccgctatgtgctggacgccgcacaaacccacatttacatgctcatgaagaaggattcttatgctcgctatttaaaatctccgatctataaggacatgcnggccaaagctattgaacctcaggaaacnaccaagaaaagctccaccctcccttttatgcggcgtcacctgcgctccagcccaagccctgtcatcctgagacagctggaagaggaagccaaggcccgagaagcagccaacactgtggacatcacccagccgggccagcacatggctcccagcccccatctgaccgtgtacaccgggacctgcatgcccccgtctccttctagccccttctcctcctcctgccgctcccccaggaagcctttcgcctcacccagccgcttcatccggcgacccagcaccaccatctgcccctcacccatcagagtggccttggagagctcatcgggcttggagcagaaaggggagtgcagcgggtccatggccccccgtgggccctctgtcaccgagagcagcgaggcctccctcgacacctcctggcctcgcagccggcccagggcccctcctaaggcccgcatggctctgtccttcagcaggtttctgagacgaggctgtctggcctcacctgtctttgccaggctctcacccaagtgccctgctgtgtcccacgggagggtgcagcccctgggggacgtgggccagcagctgccacgattgaaatccaagagagtagcaaactttttccagatcaaaatggatgtgcccacggggagcgggacctgcttgatggactcggaggatgctggaacaggagagtcgggtgaccgggccacagaaaaggaggtcatctgcccctgggagagcctgtaaggaaagaggcaggctgagctgggggctctggaccaggaagatgctctgacagatgccatggtatgggccacaggacacacttgctcgagaaccaaagtgcatttgggtgacatttgaagattggggagacaagatggggtagattgtggcaaagaatgctctggctggttaccaggggccaactccttctcctcttcctgaccctccctcccctgggcagaagaaacgcatgtggaccagaagactttccctgctgccttaaaaccaataaaaggttaactttaagtttcttgga

SEQ ID NO: 290838 - DNA, 2399 bp, Homo sapiens
  misc_feature (1207)..(1207): n is a, c, g, or t
  misc_feature (1329)..(1329): n is a, c, g, or t
  misc_feature (1357)..(1357): n is a, c, g, or t
aggctgcctttcgaacttggggggcttctcctcttgtctcccactggtgctctggctgtgaatccatccaggggccaggatgacaatccgacaccaaggccagcagtacaggccgaggatggcatttctccaaaagattgaagcgctcgtgaaggacatgcagaacccagagacaggggtccgaatgcagaaccagagggtcctggtcaccagcgttcctcatgccatgacaggaagtgatgttctgcaatggatcgtccagcggctttggatctccagtctggaggcacagaacttgggcaactttattgtcaggtatggctacatttaccccctgcaagaccccaagaatctcattctcaagcctgatggcagcctctacagatttcagacaccgtatttctggcccacccagcagtggccagctgaagataccgattacgccatctatctggccaagcgaaatatcaaaaagaaagggattttggaagaatatgaaaaggaaaattacaatttcttgaaccaaaaaatgaactataagtgggactttgtcattatgcaggccaaagagcagtacagggctggaaaggagaggaacaaagcagacagatatgccctggactgccaggagaaggcatactggctggtgcaccgatgccctcctggaatggacaatgtgctggactacggcctggaccgagtgaccaatccgaatgaagtcaaggtaaaccagaaacaaacagtcgttgctgtcaaaaaagagatcatgtattaccaacaggccttgatgaggtccacagtgaagtcttctgtgtccctgggagggattgtgaaatacagtgagcagttctcatccaacgatgccatcatgtcaggctgcctccccagcaacccctggatcaccgatgacacccagttctgggacttaaatgccaaattggtggaaatcccaaccaagatgcgagtggaacgatgggccttcaacttcagcgaattgatccgagaccccaaaggtcgacagagcttccagtacttcctcaagaaagaattcagtggagagaatctgggattctgggaagcctgcgaggatctgaagtatggagatcagtccaaagtcaaggagaaagcagaggagatttacaagctgttcctggccccgggggcgaggcgctggatcaacatagatggcaaaaccatggacatcacngtgaaggggctgaagcacccccaccgctatgtgctggacgccgcacaaacccacatttacatgctcatgaagaaggattcttatgctcgctatttaaaatctccgatctataaggacatgcnggccaaagctattgaacctcaggaaacnaccaagaaaagctccaccctcccttttatgcggcgtcacctgcgctccagcccaagccctgtcatcctgagacagctggaagaggaagccaaggcccgagaagcagccaacactgtggacatcacccagccgggccagcacatggctcccagcccccatctgaccgtgtacaccgggacctgcatgcccccgtctccttctagccccttctcctcctcctgccgctcccccaggaagcctttcgcctcacccagccgcttcatccggcgacccagcaccaccatctgcccctcacccatcagagtggccttggagagctcatcgggcttggagcagaaaggggagtgcagcgggtccatggccccccgtgggccctctgtcaccgagagcagcgaggcctccctcgacacctcctggcctcgcagccggcccagggcccctcctaaggcccgcatggctctgtccttcagcaggtttctgagacgaggctgtctggcctcacctgtctttgccaggctctcacccaagtgccctgctgtgtcccacgggagggtgcagcccctgggggacgtgggccagcagctgccacgattgaaatccaagagagtagcaaactttttccagatcaaaatggatgtgcccacggggagcgggacctgcttgatggactcggaggatgctggaacaggagagtcgggtgaccgggccacagaaaaggaggtcatctgcccctgggagagcctgtaaggaaagaggcaggctgagctgggggctctggaccaggaagatgctctgacagatgccatggtatgggccacaggacacacttgctcgagaaccaaagtgcatttgggtgacatttgaagattggggagacaagatggggtagattgtggcaaagaatgctctggctggttaccaggggccaactccttctcctcttcctgaccctccctcccctgggcagaagaaacgcatgtggaccagaagactttccctgctgccttaaaaccaataaaaggttaactttaagtttcttgga

SEQ ID NO: 290839 - DNA, 457 bp, Homo sapiens
cattactggctttcctcttgcacctgaagctttttccagatcaaaatggatgtgcccacggggagcgggacctgcttgatggactcggaggatgctggaacaggagagtcgggtgaccgggccacagaaaaggaggtcatctgcccctgggagagcctgtaaggaaagaggcaggctgagctgggggctctggaccaggaagatgctctgacagatgccatggtatgggccacaggacacacttgctcgagaaccaaagtgcatttgggtgacatttgaagattggggagacaagatggggtagattgtggcaaagaatgctctggctggttaccaggggccaactccttctcctcttcctgaccctccctcccctgggcagaagaaacgcatgtggaccagaagactttccctgctgccttaaaaccaataaaaggttaactttaagtttcttgga

SEQ ID NO: 290840 - DNA, 280 bp, Homo sapiens
atggcgtctgaagccagaggccccacggaggccgttctgccgcttacttaaaattgagagagcagtctgaaggcacttcagcagatcctcagatgctccgtccgcacgatcgacacttgacacagagcttactgctgcctcttgcagacccaaagggcctatagaggcttctctaggccttccttaaccatcacccgctgcagcagaccacgtgtggtttctgttaacatccagatttcctagttcccatctagacttattgagttgtcactcctgggga

SEQ ID NO: 290841 - DNA, 364 bp, Homo sapiens
cccgagatgcaggcagaggtgagcttgggatagaagttggcaataaacatgatgctccttgctcattcttggagtgacaaagtgtctgttggtccaacagagacattttcttcccagtcctgtgacctttcccagacccaaagggcctatagaggcttctctaggccttccttaaccatcacccgctgcagcagaccacgtgtggtttctgttaacatccagatttcctagttcccatctagacttattgagttgtcactcctggggataagacctgggaggtcctccttttagcgtgcaacccagctcacgcttgtccacagccaagttcagcaaccagtgtcctcactgctcatgagatgca

SEQ ID NO: 290842 - DNA, 388 bp, Homo sapiens
atccagatttcctagttcccatctagacttattgagttgtcactcctggggataagacctgggaggtcctccttttagcgtgcaacccagctcacgcttgtccacagccaagttcagcaaccagtgtcctcactgctcatgagatgcagtgctgttaggaaggggcacctgtcctggagtttggggtgccgtgggggccggcaatgagctcctgtctcagccctgctcttaacatccatgtctgaactgcttttcccagaggcacagaacttgggcaactttattgtcaggtatggctacatttaccccctgcaagaccccaagaatctcattctcaagcctgatggcagcctctacagatttcaggtgagtcttggccttgaccctg

SEQ ID NO: 290843 - DNA, 550 bp, Homo sapiens
cgatctgtaaaatggggatcacacctcactgggttttctaagaattaaaggacttgaaacatgtgaagcacttacaatagggcctagcacacagtaaatactcaatatatgttaggaattactgttactactcctactacttatactgagagatgaattttaaaagataccatgcccgtcagcccagaatgtgcatctttcattccttctgccttcggaaggcaggaggcagctacagctggaggctgcaccccagccccctccagacctggggtgccagcttctcccagttcatcctacctggaatctgacccactacccacctgcaacaagtcttccagaggcaggaagataggccctgccctggcaggatgggttggggtcacttgacccctgctccccctttgaggggaaaggggtggaactaagatgggtttataactggaacctccaatgaccagatgtatatagagatttacaaagatttttatattaatttaataaaacaaattcttaaatagaacaaaataaacacctaatgagccactta

SEQ ID NO: 290844 - DNA, 4411 bp, Homo sapiens
actctgctctcggcctcccgggctgcggggacgggacggctgccggcgcggactttgcgggccgggagccgagtccaggacagagccggaaccgccgagggaggcgagagggcagtgcgcggagatggcggccgcggcggcggaggaagggatggagccacgggcgctgcagtacgagcagaccctgatgtatggccggtacactcaggaccttggggcctttgccaaagaggaagctgctcggattcgcctgggagggcctgaaccctggaaaggtcccccttcctctcgggctgccccagagctcttggaatatggacggagccgttgcgcccgatgccgcgtctgttctgtccgctgccacaagttcctagtatccagggttggtgaagattggatcttcctggtcctgctggggcttctcatggcattggtcagctgggtcatggactatgccattgctgcctgtctgcaagcccagcagtggatgtcccggggcttgaacaccagcatcttgctccagtacctggcctgggtcacctaccctgttgtcctcatcactttctcagccggattcacacagatcctggcccctcaggctgtcggctctggcatccctgagatgaagaccatcttgcggggagtggtgctgaaagaatacctcacactcaagacctttatagctaaggtcattgggctgacctgcgccctaggcagcgggatgccgcttggcaaagagggcccttttgtgcatatcgcaagcatgtgtgctgcccttctcagcaagttcctctccctctttgggggtatctatgagaatgaatcccggaacacagagatgctggctgccgcctgtgccgtgggggtgggctgctgcttcgcggcacctattggaggcgtcctcttcagcatcgaggtcacctccaccttctttgcagtgcggaactactggcggggcttcttcgctgccaccttcagtgccttcatcttccgggtcttggcagtctggaaccgggatgaagagactattacagccctcttcaaaacccgattccggctcgacttcccctttgacctgcaggagctgccagcctttgctgtcattggtattgctagtggcttcggtggagccctctttgtctacctgaaccggaagattgtccaggtgatgcggaagcagaaaaccatcaatcgcttcctcatgaggaaacgcctgctcttcccggctctggtgaccctgctcatctccacgctgaccttcccccctggctttggacagttcatggctggacagctctcacagaaagagacgctggtcaccctgtttgacaatcggacgtgggtccgccagggcctggtggaggagctagaaccacccagcacctcacaggcctggaacccaccacgtgccaacgtcttcctcaccctggtcatcttcattctcatgaagttctggatgtctgcactggccaccaccatcccagttccctgtggggccttcatgcctgtctttgtcattggagcagcatttgggcgtctggtgggtgaaagcatggctgcctggttcccagatggaattcatacggacagcagcacctaccggattgtgcctgggggctacgctgtggtcggggcagctgcgctggcaggagcggtgacacacacagtgtccacggctgtgatcgtgttcgagctcacaggccagattgcccacatcctgcctgtcatgatcgccgtcatcctggccaacgctgtcgcccagagtctgcagccctccctctatgacagcatcatccgaatcaagaaactgccctacctgcctgagctcggctggggccgccaccagcagtaccgggtgcgtgtggaggacatcatggtgcgggatgttccccatgtggccctcagctgcaccttccgggacctgcgtttggcactgcacaggaccaagggccgaatgctggccctagtggagtcccctgagtccatgattctgctgggctccatcgagcgttcacaggtggtggcattgttgggggcccagctgagcccagcccgccggcggcagcacatgcaggagcgcagagccacccagacctctccactatctgatcaggagggtccccctagccctgaggcttctgtctgcttccaggtgaacacagaagactcagccttcccagcagcccggggggagacccacaagcccctaaagcctgcactcaagagggggcccagtgtcaccaggaacctcggagagagtcccacagggagcgcagagtcggcaggcatcgccctccggagcctcttctgtggcagtccaccccctgaggctgcttcggagaagttggaatcctgtgagaagcgcaagctgaagcgtgtccgaatctccctggcaagtgacgcggacctggaaggcgagatgagccctgaagagattctggagtgggaggagcagcaactagatgaacctgtcaacttcagtgactgcaaaattgatcctgctcccttccagctggtggagcggacctctttgcacaagactcacactatcttctcactgctgggagtggaccatgcttatgtcaccagtattggcagactcattggaatcgttactctaaaggagctccggaaggccatcgagggctctgtcacagcacagggtgtgaaagtccggccgcccctcgccagcttccgagacagtgccaccagcagcagtgacacggagaccactgaggtgcatgcactctgggggccccactcccgtcatggcctcccccgggagggcagcccttccgacagcgacgacaaatgccaatgagcccctcgtgggtggcctaggatggtgctagccatgcccgtcagcccagaatgtgcatctttcattccttctgccttcggaaggcaggaggcagctacagctggaggctgcaccccagccccctccagacctggggtgccagcttctcccagttcatcctacctggaatctgacccactacccacctgcaacaagtcttccagaggcaggaagataggccctgccctggcaggatgggttggggtcacttgacccctgctccccctttgaggggaaaggggtggaactaagatgggtttataactggaacctccaatgaccagatgtatatagagatttacaaagatttttatattaatttaataaaacaaattcttaaatagaacaaaataaacacctaatgagccacttatatatagaatgcttgtgcccgttggctctcgttcttaccttgggccctcttacctgccaaagcctacaaggcccttaattctaaagccacccacccttcccacaaccataaaaacgtacagtccagtgaccttggaatgcaggatctgccagaggcctccactacgtgggcattaacaccctggctggggtggggccctgtactgtagccttggcctttcattcagacagaaaggctctaccttctttcctccccaagaagagacactccctcatgactgtcactcactggcacaattcctgcctctcagcaggcatcagctgacaactcccggccacccctgtggccctcttgtggccctctctagaagaacatgaagtcccagctctgtggcaaccagagccatcctttcttccacctcccgctcagagagctctgcgtgaatgggcagcccggctggctgtgaggcgccagcacactgcccgcacatcctaggaggggttgggaaagggcccaggccccattagggggccaggaaaagggtggagggtacatgctttcatcattccaaagcctcccagagaagagaagatccgactgaaaaaacagaccaaaaaccttctgtctttaggaaaaaagaggaagatttagagacgatggagaggtgaatgaagcacagcacgagcccagctgggcaggggcccttgagggacggctcaacccataggctccgggagggcaggagccagcccctccaggtgggggtgattctatcaagcactgcacatggactcggaagtgagaagaaaagcagagaagagagaggcatggggagggtggggggttgctgggcccctcccaccccaccctcacacagcccagtaacaacccccttagtggttcacattatccgaggaggaaatgtgtgtgtggcattttaagaacatgaacatcactgtctgccacagctgtagccatgccccagaggccccgggcaacccccggcaagccccgggagtgggggcaggacatgcgcccccagcccagcccctgcctcctctccaaacactttcatgcaaaacacacaacggagaagcgagcgctcccaggagccctctaggctgtggagctctgctgggagccttgagcccacacttgggcacagaggctctgcccct

SEQ ID NO: 290845 - DNA, 3233 bp, Homo sapiens
actctgctctcggcctcccgggctgcggggacgggacggctgccggcgcggactttgcgggccgggagccgagtccaggacagagccggaaccgccgagggaggcgagagggcagtgcgcggagatggcggccgcggcggcggaggaagggatggagccacgggcgctgcagtacgagcagaccctgatgtatggccggtacactcaggaccttggggcctttgccaaagaggaagctgctcggattcgcctgggagggcctgaaccctggaaaggtcccccttcctctcgggctgccccagagctcttggaatatggacggagccgttgcgcccgatgccgcgtctgttctgtccgctgccacaagttcctagtatccagggttggtgaagattggatcttcctggtcctgctggggcttctcatggcattggtcagctgggtcatggactatgccattgctgcctgtctgcaagcccagcagtggatgtcccggggcttgaacaccagcatcttgctccagtacctggcctgggtcacctaccctgttgtcctcatcactttctcagccggattcacacagatcctggcccctcaggctgtcggctctggcatccctgagatgaagaccatcttgcggggagtggtgctgaaagaatacctcacactcaagacctttatagctaaggtcattgggctgacctgcgccctaggcagcgggatgccgcttggcaaagagggcccttttgtgcatatcgcaagcatgtgtgctgcccttctcagcaagttcctctccctctttgggggtatctatgagaatgaatcccggaacacagagatgctggctgccgcctgtgccgtgggggtgggctgctgcttcgcggcacctattggaggcgtcctcttcagcatcgaggtcacctccaccttctttgcagtgcggaactactggcggggcttcttcgctgccaccttcagtgccttcatcttccgggtcttggcagtctggaaccgggatgaagagactattacagccctcttcaaaacccgattccggctcgacttcccctttgacctgcaggagctgccagcctttgctgtcattggtattgctagtggcttcggtggagccctctttgtctacctgaaccggaagattgtccaggtgatgcggaagcagaaaaccatcaatcgcttcctcatgaggaaacgcctgctcttcccggctctggtgaccctgctcatctccacgctgaccttcccccctggctttggacagttcatggctggacagctctcacagaaagagacgctggtcaccctgtttgacaatcggacgtgggtccgccagggcctggtggaggagctagaaccacccagcacctcacaggcctggaacccaccacgtgccaacgtcttcctcaccctggtcatcttcattctcatgaagttctggatgtctgcactggccaccaccatcccagttccctgtggggccttcatgcctgtctttgtcattggagcagcatttgggcgtctggtgggtgaaagcatggctgcctggttcccagatggaattcatacggacagcagcacctaccggattgtgcctgggggctacgctgtggtcggggcagctgcgctggcaggagcggtgacacacacagtgtccacggctgtgatcgtgttcgagctcacaggccagattgcccacatcctgcctgtcatgatcgccgtcatcctggccaacgctgtcgcccagagtctgcagccctccctctatgacagcatcatccgaatcaagaaactgccctacctgcctgagctcggctggggccgccaccagcagtaccgggtgcgtgtggaggacatcatggtgcgggatgttccccatgtggccctcagctgcaccttccgggacctgcgtttggcactgcacaggaccaagggccgaatgctggccctagtggagtcccctgagtccatgattctgctgggctccatcgagcgttcacaggtggtggcattgttgggggcccagctgagcccagcccgccggcggcagcacatgcaggagcgcagagccacccagacctctccactatctgatcaggagggtccccctagccctgaggcttctgtctgcttccaggtgaacacagaagactcagccttcccagcagcccggggggagacccacaagcccctaaagcctgcactcaagagggggcccagtgtcaccaggaacctcggagagagtcccacagggagcgcagagtcggcaggcatcgccctccggagcctcttctgtggcagtccaccccctgaggctgcttcggagaagttggaatcctgtgagaagcgcaagctgaagcgtgtccgaatctccctggcaagtgacgcggacctggaaggcgagatgagccctgaagagattctggagtgggaggagcagcaactagatgaacctgtcaacttcagtgactgcaaaattgatcctgctcccttccagctggtggagcggacctctttgcacaagactcacactatcttctcactgctgggagtggaccatgcttatgtcaccagtattggcagactcattggaatcgttactctaaaggagctccggaaggccatcgagggctctgtcacagcacagggtgtgaaagtccggccgcccctcgccagcttccgagacagtgccaccagcagcagtgacacggagaccactgaggtgcatgcactctgggggccccactcccgtcatggcctcccccgggagggcagcccttccgacagcgacgacaaatgccaatgagcccctcgtgggtggcctaggatggtgctagccatgcccgtcagcccagaatgtgcatctttcattccttctgccttcggaaggcaggaggcagctacagctggaggctgcaccccagccccctccagacctggggtgccagcttctcccagttcatcctacctggaatctgacccactacccacctgcaacaagtcttccagaggcaggaagataggccctgccctggcaggatgggttggggtcacttgacccctgctccccctttgaggggaaaggggtggaactaagatgggtttataactggaacctccaatgaccagatgtatatagagatttacaaagatttttatattaatttaataaaacaaattcttaaatagaacaaaataaacacctaatgagccactta

SEQ ID NO: 290846 - DNA, 3404 bp, Homo sapiens
  misc_feature (3247)..(3247): n is a, c, g, or t
  misc_feature (3272)..(3273): n is a, c, g, or t
actctgctctcggcctcccgggctgcggggacgggacggctgccggcgcggactttgcgggccgggagccgagtccaggacagagccggaaccgccgagggaggcgagagggcagtgcgcggagatggcggccgcggcggcggaggaagggatggagccacgggcgctgcagtacgagcagaccctgatgtatggccggtacactcaggaccttggggcctttgccaaagaggaagctgctcggattcgcctgggagggcctgaaccctggaaaggtcccccttcctctcgggctgccccagagctcttggaatatggacggagccgttgcgcccgatgccgcgtctgttctgtccgctgccacaagttcctagtatccagggttggtgaagattggatcttcctggtcctgctggggcttctcatggcattggtcagctgggtcatggactatgccattgctgcctgtctgcaagcccagcagtggatgtcccggggcttgaacaccagcatcttgctccagtacctggcctgggtcacctaccctgttgtcctcatcactttctcagccggattcacacagatcctggcccctcaggctgtcggctctggcatccctgagatgaagaccatcttgcggggagtggtgctgaaagaatacctcacactcaagacctttatagctaaggtcattgggctgacctgcgccctaggcagcgggatgccgcttggcaaagagggcccttttgtgcatatcgcaagcatgtgtgctgcccttctcagcaagttcctctccctctttgggggtatctatgagaatgaatcccggaacacagagatgctggctgccgcctgtgccgtgggggtgggctgctgcttcgcggcacctattggaggcgtcctcttcagcatcgaggtcacctccaccttctttgcagtgcggaactactggcggggcttcttcgctgccaccttcagtgccttcatcttccgggtcttggcagtctggaaccgggatgaagagactattacagccctcttcaaaacccgattccggctcgacttcccctttgacctgcaggagctgccagcctttgctgtcattggtattgctagtggcttcggtggagccctctttgtctacctgaaccggaagattgtccaggtgatgcggaagcagaaaaccatcaatcgcttcctcatgaggaaacgcctgctcttcccggctctggtgaccctgctcatctccacgctgaccttcccccctggctttggacagttcatggctggacagctctcacagaaagagacgctggtcaccctgtttgacaatcggacgtgggtccgccagggcctggtggaggagctagaaccacccagcacctcacaggcctggaacccaccacgtgccaacgtcttcctcaccctggtcatcttcattctcatgaagttctggatgtctgcactggccaccaccatcccagttccctgtggggccttcatgcctgtctttgtcattggagcagcatttgggcgtctggtgggtgaaagcatggctgcctggttcccagatggaattcatacggacagcagcacctaccggattgtgcctgggggctacgctgtggtcggggcagctgcgctggcaggagcggtgacacacacagtgtccacggctgtgatcgtgttcgagctcacaggccagattgcccacatcctgcctgtcatgatcgccgtcatcctggccaacgctgtcgcccagagtctgcagccctccctctatgacagcatcatccgaatcaagaaactgccctacctgcctgagctcggctggggccgccaccagcagtaccgggtgcgtgtggaggacatcatggtgcgggatgttccccatgtggccctcagctgcaccttccgggacctgcgtttggcactgcacaggaccaagggccgaatgctggccctagtggagtcccctgagtccatgattctgctgggctccatcgagcgttcacaggtggtggcattgttgggggcccagctgagcccagcccgccggcggcagcacatgcaggagcgcagagccacccagacctctccactatctgatcaggagggtccccctagccctgaggcttctgtctgcttccaggtgaacacagaagactcagccttcccagcagcccggggggagacccacaagcccctaaagcctgcactcaagagggggcccagtgtcaccaggaacctcggagagagtcccacagggagcgcagagtcggcaggcatcgccctccggagcctcttctgtggcagtccaccccctgaggctgcttcggagaagttggaatcctgtgagaagcgcaagctgaagcgtgtccgaatctccctggcaagtgacgcggacctggaaggcgagatgagccctgaagagattctggagtgggaggagcagcaactagatgaacctgtcaacttcagtgactgcaaaattgatcctgctcccttccagctggtggagcggacctctttgcacaagactcacactatcttctcactgctgggagtggaccatgcttatgtcaccagtattggcagactcattggaatcgttactctaaaggagctccggaaggccatcgagggctctgtcacagcacagggtgtgaaagtccggccgcccctcgccagcttccgagacagtgccaccagcagcagtgacacggagaccactgaggtgcatgcactctgggggccccactcccgtcatggcctcccccgggagggcagcccttccgacagcgacgacaaatgccaatgagcccctcgtgggtggcctaggatggtgctagccatgcccgtcagcccagaatgtgcatctttcattccttctgccttcggaaggcaggaggcagctacagctggaggctgcaccccagccccctccagacctggggtgccagcttctcccagttcatcctacctggaatctgacccactacccacctgcaacaagtcttccagaggcaggaagataggccctgccctggcaggatgggttggggtcacttgacccctgctccccctttgaggggaaaggggtggaactaagatgggtttataactggaacctccaatgaccagatgtatatagagatttacaaagatttttatattaatttaataaaacaaattcttaaatagaacaaaataaacacctaatgagccacttaaaaaaaaaaaaaanataaaaaaaaaaaaaaaaaaaaaannaaaaaaaaaaaaaaaaaaaaatcaatgcccggcggtttacaactttgtgattgggaaaacctggcgtacccaactatgcttggagcacattccccttcgcccgttggcttaccggctcgaccgtttccttt

SEQ ID NO: 290847 - DNA, 4341 bp, Homo sapiens
actctgctctcggcctcccgggctgcggggacgggacggctgccggcgcggactttgcgggccgggagccgagtccaggacagagccggaaccgccgagggaggcgagagggcagtgcgcggagatggcggccgcggcggcggaggaagggatggagccacgggcgctgcagtacgagcagaccctgatgtatggccggtacactcaggaccttggggcctttgccaaagaggaagctgctcggattcgcctgggagggcctgaaccctggaaaggtcccccttcctctcgggctgccccagagctcttggaatatggacggagccgttgcgcccgatgccgcgtctgttctgtccgctgccacaagttcctagtatccagggttggtgaagattggatcttcctggtcctgctggggcttctcatggcattggtcagctgggtcatggactatgccattgctgcctgtctgcaagcccagcagtggatgtcccggggcttgaacaccagcatcttgctccagtacctggcctgggtcacctaccctgttgtcctcatcactttctcagccggattcacacagatcctggcccctcaggctgtcggctctggcatccctgagatgaagaccatcttgcggggagtggtgctgaaagaatacctcacactcaagacctttatagctaaggtcattgggctgacctgcgccctaggcagcgggatgccgcttggcaaagagggcccttttgtgcatatcgcaagcatgtgtgctgcccttctcagcaagttcctctccctctttgggggtatctatgagaatgaatcccggaacacagagatgctggctgccgcctgtgccgtgggggtgggctgctgcttcgcggcacctattggaggcgtcctcttcagcatcgaggtcacctccaccttctttgcagtgcggaactactggcggggcttcttcgctgccaccttcagtgccttcatcttccgggtcttggcagtctggaaccgggatgaagagactattacagccctcttcaaaacccgattccggctcgacttcccctttgacctgcaggagctgccagcctttgctgtcattggtattgctagtggcttcggtggagccctctttgtctacctgaaccggaagattgtccaggtgatgcggaagcagaaaaccatcaatcgcttcctcatgaggaaacgcctgctcttcccggctctggtgaccctgctcatctccacgctgaccttcccccctggctttggacagttcatggctggacagctctcacagaaagagacgctggtcaccctgtttgacaatcggacgtgggtccgccagggcctggtggaggagctagaaccacccagcacctcacaggcctggaacccaccacgtgccaacgtcttcctcaccctggtcatcttcattctcatgaaggagcagcatttgggcgtctggtgggtgaaagcatggctgcctggttcccagatggaattcatacggacagcagcacctaccggattgtgcctgggggctacgctgtggtcggggcagctgcgctggcaggagcggtgacacacacagtgtccacggctgtgatcgtgttcgagctcacaggccagattgcccacatcctgcctgtcatgatcgccgtcatcctggccaacgctgtcgcccagagtctgcagccctccctctatgacagcatcatccgaatcaagaaactgccctacctgcctgagctcggctggggccgccaccagcagtaccgggtgcgtgtggaggacatcatggtgcgggatgttccccatgtggccctcagctgcaccttccgggacctgcgtttggcactgcacaggaccaagggccgaatgctggccctagtggagtcccctgagtccatgattctgctgggctccatcgagcgttcacaggtggtggcattgttgggggcccagctgagcccagcccgccggcggcagcacatgcaggagcgcagagccacccagacctctccactatctgatcaggagggtccccctagccctgaggcttctgtctgcttccaggtgaacacagaagactcagccttcccagcagcccggggggagacccacaagcccctaaagcctgcactcaagagggggcccagtgtcaccaggaacctcggagagagtcccacagggagcgcagagtcggcaggcatcgccctccggagcctcttctgtggcagtccaccccctgaggctgcttcggagaagttggaatcctgtgagaagcgcaagctgaagcgtgtccgaatctccctggcaagtgacgcggacctggaaggcgagatgagccctgaagagattctggagtgggaggagcagcaactagatgaacctgtcaacttcagtgactgcaaaattgatcctgctcccttccagctggtggagcggacctctttgcacaagactcacactatcttctcactgctgggagtggaccatgcttatgtcaccagtattggcagactcattggaatcgttactctaaaggagctccggaaggccatcgagggctctgtcacagcacagggtgtgaaagtccggccgcccctcgccagcttccgagacagtgccaccagcagcagtgacacggagaccactgaggtgcatgcactctgggggccccactcccgtcatggcctcccccgggagggcagcccttccgacagcgacgacaaatgccaatgagcccctcgtgggtggcctaggatggtgctagccatgcccgtcagcccagaatgtgcatctttcattccttctgccttcggaaggcaggaggcagctacagctggaggctgcaccccagccccctccagacctggggtgccagcttctcccagttcatcctacctggaatctgacccactacccacctgcaacaagtcttccagaggcaggaagataggccctgccctggcaggatgggttggggtcacttgacccctgctccccctttgaggggaaaggggtggaactaagatgggtttataactggaacctccaatgaccagatgtatatagagatttacaaagatttttatattaatttaataaaacaaattcttaaatagaacaaaataaacacctaatgagccacttatatatagaatgcttgtgcccgttggctctcgttcttaccttgggccctcttacctgccaaagcctacaaggcccttaattctaaagccacccacccttcccacaaccataaaaacgtacagtccagtgaccttggaatgcaggatctgccagaggcctccactacgtgggcattaacaccctggctggggtggggccctgtactgtagccttggcctttcattcagacagaaaggctctaccttctttcctccccaagaagagacactccctcatgactgtcactcactggcacaattcctgcctctcagcaggcatcagctgacaactcccggccacccctgtggccctcttgtggccctctctagaagaacatgaagtcccagctctgtggcaaccagagccatcctttcttccacctcccgctcagagagctctgcgtgaatgggcagcccggctggctgtgaggcgccagcacactgcccgcacatcctaggaggggttgggaaagggcccaggccccattagggggccaggaaaagggtggagggtacatgctttcatcattccaaagcctcccagagaagagaagatccgactgaaaaaacagaccaaaaaccttctgtctttaggaaaaaagaggaagatttagagacgatggagaggtgaatgaagcacagcacgagcccagctgggcaggggcccttgagggacggctcaacccataggctccgggagggcaggagccagcccctccaggtgggggtgattctatcaagcactgcacatggactcggaagtgagaagaaaagcagagaagagagaggcatggggagggtggggggttgctgggcccctcccaccccaccctcacacagcccagtaacaacccccttagtggttcacattatccgaggaggaaatgtgtgtgtggcattttaagaacatgaacatcactgtctgccacagctgtagccatgccccagaggccccgggcaacccccggcaagccccgggagtgggggcaggacatgcgcccccagcccagcccctgcctcctctccaaacactttcatgcaaaacacacaacggagaagcgagcgctcccaggagccctctaggctgtggagctctgctgggagccttgagcccacacttgggcacagaggctctgcccct

SEQ ID NO: 290848 - DNA, 4477 bp, Homo sapiens
actctgctctcggcctcccgggctgcggggacgggacggctgccggcgcggactttgcgggccgggagccgagtccaggacagagccggaaccgccgagggaggcgagagggcagtgcgcggagatggcggccgcggcggcggaggaagggatggagccacgggcgctgcagtacgagcagaccctgatgtatggccggtacactcaggaccttggggcctttgccaaagaggaagctgctcggattcgcctgggagggcctgaaccctggaaaggtcccccttcctctcgggctgccccagagctcttggaatatggacggagccgttgcgcccgatgccgcgtctgttctgtccgctgccacaagttcctagtatccagggttggtgaagattggatcttcctggtcctgctggggcttctcatggcattggtcagctgggtcatggactatgccattgctgcctgtctgcaagcccagcagtggatgtcccggggcttgaacaccagcatcttgctccagtacctggcctgggtcacctaccctgttgtcctcatcactttctcagccggattcacacagatcctggcccctcaggctgtcggctctggcatccctgagatgaagaccatcttgcggggagtggtgctgaaagaatacctcacactcaagacctttatagctaaggtcattgggctgacctgcgccctaggcagcgggatgccgcttggcaaagagggcccttttgtgcatatcgcaagcatgtgtgctgcccttctcagcaagttcctctccctctttgggggtatctatgagaatgaatcccggaacacagagatgctggctgccgcctgtgccgtgggggtgggctgctgcttcgcggcacctattggaggcgtcctcttcagcatcgaggtcacctccaccttctttgcagtgcggaactactggcggggcttcttcgctgccaccttcagtgccttcatcttccgggtcttggcagtctggaaccgggatgaagagactattacagccctcttcaaaacccgattccggctcgacttcccctttgacctgcaggagctgccagcctttgctgtcattggtattgctagtggcttcggtggagccctctttgtctacctgaaccggaagattgtccaggtgatgcggaagcagaaaaccatcaatcgcttcctcatgaggaaccctgagatatgcgaggccacccagcccttggccacccacgactgatgtgaaacctacgactctagacgcctgctcttcccggctctggtgaccctgctcatctccacgctgaccttcccccctggctttggacagttcatggctggacagctctcacagaaagagacgctggtcaccctgtttgacaatcggacgtgggtccgccagggcctggtggaggagctagaaccacccagcacctcacaggcctggaacccaccacgtgccaacgtcttcctcaccctggtcatcttcattctcatgaagttctggatgtctgcactggccaccaccatcccagttccctgtggggccttcatgcctgtctttgtcattggagcagcatttgggcgtctggtgggtgaaagcatggctgcctggttcccagatggaattcatacggacagcagcacctaccggattgtgcctgggggctacgctgtggtcggggcagctgcgctggcaggagcggtgacacacacagtgtccacggctgtgatcgtgttcgagctcacaggccagattgcccacatcctgcctgtcatgatcgccgtcatcctggccaacgctgtcgcccagagtctgcagccctccctctatgacagcatcatccgaatcaagaaactgccctacctgcctgagctcggctggggccgccaccagcagtaccgggtgcgtgtggaggacatcatggtgcgggatgttccccatgtggccctcagctgcaccttccgggacctgcgtttggcactgcacaggaccaagggccgaatgctggccctagtggagtcccctgagtccatgattctgctgggctccatcgagcgttcacaggtggtggcattgttgggggcccagctgagcccagcccgccggcggcagcacatgcaggagcgcagagccacccagacctctccactatctgatcaggagggtccccctagccctgaggcttctgtctgcttccaggtgaacacagaagactcagccttcccagcagcccggggggagacccacaagcccctaaagcctgcactcaagagggggcccagtgtcaccaggaacctcggagagagtcccacagggagcgcagagtcggcaggcatcgccctccggagcctcttctgtggcagtccaccccctgaggctgcttcggagaagttggaatcctgtgagaagcgcaagctgaagcgtgtccgaatctccctggcaagtgacgcggacctggaaggcgagatgagccctgaagagattctggagtgggaggagcagcaactagatgaacctgtcaacttcagtgactgcaaaattgatcctgctcccttccagctggtggagcggacctctttgcacaagactcacactatcttctcactgctgggagtggaccatgcttatgtcaccagtattggcagactcattggaatcgttactctaaaggagctccggaaggccatcgagggctctgtcacagcacagggtgtgaaagtccggccgcccctcgccagcttccgagacagtgccaccagcagcagtgacacggagaccactgaggtgcatgcactctgggggccccactcccgtcatggcctcccccgggagggcagcccttccgacagcgacgacaaatgccaatgagcccctcgtgggtggcctaggatggtgctagccatgcccgtcagcccagaatgtgcatctttcattccttctgccttcggaaggcaggaggcagctacagctggaggctgcaccccagccccctccagacctggggtgccagcttctcccagttcatcctacctggaatctgacccactacccacctgcaacaagtcttccagaggcaggaagataggccctgccctggcaggatgggttggggtcacttgacccctgctccccctttgaggggaaaggggtggaactaagatgggtttataactggaacctccaatgaccagatgtatatagagatttacaaagatttttatattaatttaataaaacaaattcttaaatagaacaaaataaacacctaatgagccacttatatatagaatgcttgtgcccgttggctctcgttcttaccttgggccctcttacctgccaaagcctacaaggcccttaattctaaagccacccacccttcccacaaccataaaaacgtacagtccagtgaccttggaatgcaggatctgccagaggcctccactacgtgggcattaacaccctggctggggtggggccctgtactgtagccttggcctttcattcagacagaaaggctctaccttctttcctccccaagaagagacactccctcatgactgtcactcactggcacaattcctgcctctcagcaggcatcagctgacaactcccggccacccctgtggccctcttgtggccctctctagaagaacatgaagtcccagctctgtggcaaccagagccatcctttcttccacctcccgctcagagagctctgcgtgaatgggcagcccggctggctgtgaggcgccagcacactgcccgcacatcctaggaggggttgggaaagggcccaggccccattagggggccaggaaaagggtggagggtacatgctttcatcattccaaagcctcccagagaagagaagatccgactgaaaaaacagaccaaaaaccttctgtctttaggaaaaaagaggaagatttagagacgatggagaggtgaatgaagcacagcacgagcccagctgggcaggggcccttgagggacggctcaacccataggctccgggagggcaggagccagcccctccaggtgggggtgattctatcaagcactgcacatggactcggaagtgagaagaaaagcagagaagagagaggcatggggagggtggggggttgctgggcccctcccaccccaccctcacacagcccagtaacaacccccttagtggttcacattatccgaggaggaaatgtgtgtgtggcattttaagaacatgaacatcactgtctgccacagctgtagccatgccccagaggccccgggcaacccccggcaagccccgggagtgggggcaggacatgcgcccccagcccagcccctgcctcctctccaaacactttcatgcaaaacacacaacggagaagcgagcgctcccaggagccctctaggctgtggagctctgctgggagccttgagcccacacttgggcacagaggctctgcccct

SEQ ID NO: 290849 - DNA, 4213 bp, Homo sapiens
gaggactgggaataaacctcctgcgtccatgccacactcgtctagacatggaggaaggcgtcttggcttcttggccactgaccactttccccagccagtctgactgcccagattcaggcatcatctcggccactcccacagggcacagcttcttgcatcccctctccaagtgatcctcttgcctagattgcgctttgtcccagtgaataccctcagggaccctttccttcacccatgccctgactctgtgtggtactccctgggacagcctgtcgtatcagcgtggtccactggccaggcaggcagtgggtgtgtgcactgggggtccagcaggtcctcttcccacagcccagcagtggatgtcccggggcttgaacaccagcatcttgctccagtacctggcctgggtcacctaccctgttgtcctcatcactttctcagccggattcacacagatcctggcccctcaggctgtcggctctggcatccctgagatgaagaccatcttgcggggagtggtgctgaaagaatacctcacactcaagacctttatagctaaggtcattgggctgacctgcgccctaggcagcgggatgccgcttggcaaagagggcccttttgtgcatatcgcaagcatgtgtgctgcccttctcagcaagttcctctccctctttgggggtatctatgagaatgaatcccggaacacagagatgctggctgccgcctgtgccgtgggggtgggctgctgcttcgcggcacctattggaggcgtcctcttcagcatcgaggtcacctccaccttctttgcagtgcggaactactggcggggcttcttcgctgccaccttcagtgccttcatcttccgggtcttggcagtctggaaccgggatgaagagactattacagccctcttcaaaacccgattccggctcgacttcccctttgacctgcaggagctgccagcctttgctgtcattggtattgctagtggcttcggtggagccctctttgtctacctgaaccggaagattgtccaggtgatgcggaagcagaaaaccatcaatcgcttcctcatgaggaaacgcctgctcttcccggctctggtgaccctgctcatctccacgctgaccttcccccctggctttggacagttcatggctggacagctctcacagaaagagacgctggtcaccctgtttgacaatcggacgtgggtccgccagggcctggtggaggagctagaaccacccagcacctcacaggcctggaacccaccacgtgccaacgtcttcctcaccctggtcatcttcattctcatgaaggagcagcatttgggcgtctggtgggtgaaagcatggctgcctggttcccagatggaattcatacggacagcagcacctaccggattgtgcctgggggctacgctgtggtcggggcagctgcgctggcaggagcggtgacacacacagtgtccacggctgtgatcgtgttcgagctcacaggccagattgcccacatcctgcctgtcatgatcgccgtcatcctggccaacgctgtcgcccagagtctgcagccctccctctatgacagcatcatccgaatcaagaaactgccctacctgcctgagctcggctggggccgccaccagcagtaccgggtgcgtgtggaggacatcatggtgcgggatgttccccatgtggccctcagctgcaccttccgggacctgcgtttggcactgcacaggaccaagggccgaatgctggccctagtggagtcccctgagtccatgattctgctgggctccatcgagcgttcacaggtggtggcattgttgggggcccagctgagcccagcccgccggcggcagcacatgcaggagcgcagagccacccagacctctccactatctgatcaggagggtccccctagccctgaggcttctgtctgcttccaggtgaacacagaagactcagccttcccagcagcccggggggagacccacaagcccctaaagcctgcactcaagagggggcccagtgtcaccaggaacctcggagagagtcccacagggagcgcagagtcggcaggcatcgccctccggagcctcttctgtggcagtccaccccctgaggctgcttcggagaagttggaatcctgtgagaagcgcaagctgaagcgtgtccgaatctccctggcaagtgacgcggacctggaaggcgagatgagccctgaagagattctggagtgggaggagcagcaactagatgaacctgtcaacttcagtgactgcaaaattgatcctgctcccttccagctggtggagcggacctctttgcacaagactcacactatcttctcactgctgggagtggaccatgcttatgtcaccagtattggcagactcattggaatcgttactctaaaggagctccggaaggccatcgagggctctgtcacagcacagggtgtgaaagtccggccgcccctcgccagcttccgagacagtgccaccagcagcagtgacacggagaccactgaggtgcatgcactctgggggccccactcccgtcatggcctcccccgggagggcagcccttccgacagcgacgacaaatgccaatgagcccctcgtgggtggcctaggatggtgctagccatgcccgtcagcccagaatgtgcatctttcattccttctgccttcggaaggcaggaggcagctacagctggaggctgcaccccagccccctccagacctggggtgccagcttctcccagttcatcctacctggaatctgacccactacccacctgcaacaagtcttccagaggcaggaagataggccctgccctggcaggatgggttggggtcacttgacccctgctccccctttgaggggaaaggggtggaactaagatgggtttataactggaacctccaatgaccagatgtatatagagatttacaaagatttttatattaatttaataaaacaaattcttaaatagaacaaaataaacacctaatgagccacttatatatagaatgcttgtgcccgttggctctcgttcttaccttgggccctcttacctgccaaagcctacaaggcccttaattctaaagccacccacccttcccacaaccataaaaacgtacagtccagtgaccttggaatgcaggatctgccagaggcctccactacgtgggcattaacaccctggctggggtggggccctgtactgtagccttggcctttcattcagacagaaaggctctaccttctttcctccccaagaagagacactccctcatgactgtcactcactggcacaattcctgcctctcagcaggcatcagctgacaactcccggccacccctgtggccctcttgtggccctctctagaagaacatgaagtcccagctctgtggcaaccagagccatcctttcttccacctcccgctcagagagctctgcgtgaatgggcagcccggctggctgtgaggcgccagcacactgcccgcacatcctaggaggggttgggaaagggcccaggccccattagggggccaggaaaagggtggagggtacatgctttcatcattccaaagcctcccagagaagagaagatccgactgaaaaaacagaccaaaaaccttctgtctttaggaaaaaagaggaagatttagagacgatggagaggtgaatgaagcacagcacgagcccagctgggcaggggcccttgagggacggctcaacccataggctccgggagggcaggagccagcccctccaggtgggggtgattctatcaagcactgcacatggactcggaagtgagaagaaaagcagagaagagagaggcatggggagggtggggggttgctgggcccctcccaccccaccctcacacagcccagtaacaacccccttagtggttcacattatccgaggaggaaatgtgtgtgtggcattttaagaacatgaacatcactgtctgccacagctgtagccatgccccagaggccccgggcaacccccggcaagccccgggagtgggggcaggacatgcgcccccagcccagcccctgcctcctctccaaacactttcatgcaaaacacacaacggagaagcgagcgctcccaggagccctctaggctgtggagctctgctgggagccttgagcccacacttgggcacagaggctctgcccct

SEQ ID NO: 290850 - DNA, 2366 bp, Homo sapiens
actctgctctcggcctcccgggctgcggggacgggacggctgccggcgcggactttgcgggccgggagccgagtccaggacagagccggaaccgccgagggaggcgagagggcagtgcgcggagatggcggccgcggcggcggaggaagggatggagccacgggcgctgcagtacgagcagaccctgatgtatggccggtacactcaggaccttggggcctttgccaaagaggaagctgctcggattcgcctgggagggcctgaaccctggaaaggtcccccttcctctcgggctgccccagagctcttggaatatggacggagccgttgcgcccgatgccgcgtctgttctgtccgctgccacaagttcctagtatccagggttggtgaagattggatcttcctggtcctgctggggcttctcatggcattggtcagctgggtcatggactatgccattgctgcctgtctgcaagcccagcagtggatgtcccggggcttgaacaccagcatcttgctccagtacctggcctgggtcacctaccctgttgtcctcatcactttctcagccggattcacacagatcctggcccctcaggctgtcggctctggcatccctgagatgaagaccatcttgcggggagtggtgctgaaagaatacctcacactcaagacctttatagctaaggtcattgggctgacctgcgccctaggcagcgggatgccgcttggcaaagagggcccttttgtgcatatcgcaagcatgtgtgctgcccttctcagcaagttcctctccctctttgggggtatctatgagaatgaatcccggaacacagagatgctggctgccgcctgtgccgtgggggtgggctgctgcttcgcggcacctattggaggcgtcctcttcagcatcgaggtcacctccaccttctttgcagtgcggaactactggcggggcttcttcgctgccaccttcagtgccttcatcttccgggtcttggcagtctggaaccgggatgaagagactattacagccctcttcaaaacccgattccggctcgacttcccctttgacctgcaggagctgccagcctttgctgtcattggtattgctagtggcttcggtggagccctctttgtctacctgaaccggaagattgtccaggtgatgcggaagcagaaaaccatcaatcgcttcctcatgaggaaacgcctgctcttcccggctctggtgaccctgctcatctccacgctgaccttcccccctggctttggacagttcatggctggacagctctcacagaaagagacgctggtcaccctgtttgacaatcggacgtgggtccgccagggcctggtggaggagctagaaccacccagcacctcacaggcctggaacccaccacgtgccaacgtcttcctcaccctggtcatcttcattctcatgaaggagcagcatttgggcgtctggtgggtgaaagcatggctgcctggttcccagatggaattcatacggacagcagcacctaccggattgtgcctgggggctacgctgtggtcggggcagctgcgctggcaggagcggtgacacacacagtgtccacggctgtgatcgtgttcgagctcacaggccagattgcccacatcctgcctgtcatgatcgccgtcatcctggccaacgctgtcgcccagagtctgcagccctccctctatgacagcatcatccgaatcaagaaactgccctacctgcctgagctcggctggggccgccaccagcagtaccgggtgcgtgtggaggacatcatggtgcgggatgttccccatgtggccctcagctgcaccttccgggacctgcgtttggcactgcacaggaccaagggccgaatgctggccctagtggagtcccctgagtccatgattctgctgggctccatcgagcgttcacaggtggtggcattgttgggggcccagctgagcccagcccgccggcggcagcacatgcaggagcgcagagccacccagacctctccactatctgatcaggagggtccccctagccctgaggcttctgtctgcttccagacctggggtgccagcttctcccagttcatcctacctggaatctgacccactacccacctgcaacaagtcttccagaggcaggaagataggccctgccctggcaggatgggttggggtcacttgacccctgctccccctttgaggggaaaggggtggaactaagatgggtttataactggaacctccaatgaccagatgtatatagagatttacaaagatttttatattaatttaataaaacaaattcttaaatagaacaaaataaacacctaatgagccactta

SEQ ID NO: 290851 - DNA, 654 bp, Homo sapiens
cagggaagtcggtgcggttggccagctccgggatgacccgccgggacccgctcacaaataaggtggccctggtaacggcctccaccgactgggcttcagtccttacaatgtcagtaaaacagccttgctgggcctcaacaagaccttggccatagagctggccccaaggaacattagggtgaactgcctagcacctggacttatcaagactagcttcagcaggatgctctggatggacaaggaaaaagaggaaagcatgaaagaaaccctgcggataagaaggttaggcgagccagaggattctcttggcatcgtgtctttcctgtgctctgaagatgccagctacctcactggggaaacagtgatggtgggtggaggaaccccgtcccgcctctgaggacccggagacagcccacaggccagagttgggctctagctcctggtgctgttcctgcattcacccactggcctttcccacctctgctcaccttactgttcacctcatcaaatcagttctgccctgtgaaaagatccagccttccctgccgtcaaggtggtgtcttactcgggattcctgctgttgttgtggccttgggtaaaggcctcccctgagaacacaggacaggcctgctgacaaggctgagtctaccttgg

SEQ ID NO: 290852 - DNA, 1651 bp, Homo sapiens
agtgacgtcgccgctcgcgaggacctcaggtggatcgccgcggcccctcctcccagagcggcagccttttcccgcgcgtgctgccttcgccgctcgggccgcccgggggaaaacatggcgtctgccctggagcagttcgtgaacagtgtccgacagctctcagctcaagggcaaatgacacagctttgtgaactgatcaacaagagtggggaactccttgcgaagaacttatcccatctggacactgtgctcggggctctggatgtacaagaacactccttgggcgtccttgctgttttgtttgtgaagttttctatgcccagtgttcctgacttcgaaacgctattctcacaggttcagctcttcatcagcacttgtaatggggagcacattcgatatgcaacagacacttttgctgggctttgccatcagctaacaaatgcacttgtggaaagaaaacagcccctgcgaggaattggcatccttaagcaagccatagacaagatgcagatgaatacaaaccagctgacctcaatacatgctgatctctgccagctttgtttgctagcaaaatgctttaagcctgcccttccatatcttgacgtggatatgatggatatctgtaaagagaatggagcctatgatgcaaaacactttttatgttactattattatggagggatgatctatactgggctgaagaactttgaaagagctctctacttttatgaacaggctataactactcctgccatggcggtcagtcatatcatgttggaatcatataaaaagtatattttagtgtctttgatattacttggcaaagtacaacagctaccaaaatatacatctcaaattgtgggtagattcattaagcctcttagcaatgcataccacgagttagcacaagtgtattcaaccaacaacccctcagaactccgaaacctggtgaataagcacagtgaaaccttcactcgcgataacaacatggggctggtgaagcaatgcttgtcatctctttataagaagaatattcagaggctaacaaagacctttttaactctatcattacaagatatggcaagtcgtgtgcagttgtctggacctcaggaggcagagaaatacgttctgcacatgatagaagatggtgagatttttgcaagtattaaccagaaggacggtatggtcagtttccatgataaccctgaaaaatataataacccagccatgcttcataacattgatcaggagatgctgaagtgcattgagctggatgagcggctgaaagccatggaccaggagatcacagtgaaccctcagtttgtacaaaagagtatgggctcacaagaagatgattcaggaaacaaaccatccagttattcttgaaactaacatccatcctgagctaaacaagagaaactaccatcttggccagtgacaagtgttcggagggcagcagagaggaccaagcctgtgtcacctggagactaagaaattaagttttgttttgacatcttcagtcctgtgtgctttcagaaaaccattttctctgcaaagaaaggaaacagatttgcaaactttaaagtctgtcgtggatttatttatcctcagattattgttactgcattaaatctacctttttgttttaagt

SEQ ID NO: 290853 - DNA, 711 bp, Homo sapiens
tgctgggattacagacatgagccaccacgcctggccgctctgtacacatttaataaaatgtccttccttcgttgttcctacctgtgactaattctgcttctgactttcagacctttttaactctatcattacaagatatggcaagtcgtgtgcagttgtctggacctcaggaggcagagaaatacgttctgcacatgatagaagatggtgagatttttgcaagtattaaccagaaggacggtatggtcagtttccatgataaccctgaaaaatataataacccagccatgcttcataacattgatcaggagatgctgaagtgcattgagctggatgagcggctgaaagccatggaccaggagatcacagtgaaccctcagtttgtacaaaagagtatgggctcacaagaagatgattcaggaaacaaaccatccagttattcttgaaactaacatccatcctgagctaaacaagagaaactaccatcttggccagtgacaagtgttcggagggcagcagagaggaccaagcctgtgtcacctggagactaagaaattaagttttgttttgacatcttcagtcctgtgtgctttcagaaaaccattttctctgcaaagaaaggaaacagatttgcaaactttaaagtctgtcgtggatttatttatcctcagattattgttactgcattaaatctacctttttgttttaagt

SEQ ID NO: 290854 - DNA, 453 bp, Homo sapiens
aggatccccgacctagacgttacacagccatgcttcataacattgatcaggagatgctgaagtgcattgagctggatgagcggctgaaagccatggaccaggagatcacagtgaaccctcagtttgtacaaaagagtatgggctcacaagaagatgattcaggaaacaaaccatccagttattcttgaaactaacatccatcctgagctaaacaagagaaactaccatcttggccagtgacaagtgttcggagggcagcagagaggaccaagcctgtgtcacctggagactaagaaattaagttttgttttgacatcttcagtcctgtgtgctttcagaaaaccattttctctgcaaagaaaggaaacagatttgcaaactttaaagtctgtcgtggatttatttatcctcagattattgttactgcattaaatctacctttttgttttaagt

SEQ ID NO: 290855 - DNA, 668 bp, Homo sapiens
aggatccccgacctagacgttacacagccatgcttcataacattgatcaggagatgctgaagtgcattgagctggatgagcggctgaaagccatggaccaggagatcacagtgaaccctcagtttgtacaaaagagtatgggctcacaagaagatgattcaggaaacaaaccatccagttattcttgaaactaacatccatcctgagctaaacaagagaaactaccatcttggccagtgacaagtgttcggagggcagcagagaggaccaagcctgtgtcacctggagactaagaaattaagttttgttttgacatcttcagtcctgtgtgctttcagaaaaccattttctctgcaaagaaaggaaacagatttgcaaactttaaagtctgtcgtggatttatttatcctcagattattgttactgcattaaatctacctttttgttttaagttgcttgaacattaatgtgtcttctgtatcacttttttctcctctgaagtttttaataagcacattcattgtgaacagaaatagctggattttaggaattttgggaagatttggatctgaaaggttttatttattgacaaatttgtatctacaaaaaatcttaaaaggtgtaatcattgtcttcagaaaataaaagaaaagaaaggccagacagac

SEQ ID NO: 290856 - DNA, 946 bp, Homo sapiens
agtgacgtcgccgctcgcgaggacctcaggtggatcgccgcggcccctcctcccagagcggcagccttttcccgcgcgtgctgccttcgccgctcgggccgcccgggggaaaacatggcgtctgccctggagcagttcgtgaacagtgtccgacagctctcagctcaaggtttgtgaagttttctatgcccagtgttcctgacttcgaaacgctattctcacaggttcagctcttcatcagcacttgtaatggggagcacattcgatatgcaacagacacttttgctgggctttgccatcagctaacaaatgcacttgtggaaagaaaacagcccctgcgaggaattggcatccttaagcaagccatagacaagatgcagatgaatacaaaccagctgacctcaatacatgctgatctctgccagctttgtttgctagcaaaatgctttaagcctgcccttccatatcttgacgtggatatgatggatatctgtaaagagaatggagcctatgatgcaaaacactttttatgttactattattatggagggatgatctatactgggctgaagaactttgaaagagctctctacttttatgaacaggctataactactcctgccatggcggtcagtcatatcatgttggaatcatataaaaagtatattttagtgtctttgatattacttggcaaagtacaacagctaccaaaatatacatctcaaattgtgggtagattcattaagcctcttagcaatgcataccacgagttagcacaagtgtattcaaccaacaacccctcagaactccgaaacctggtgaataagcacagtgaaaccttcactcgcgataacaacatggggctggtgaagcaatgcttgtcatctctttataagaagaatattcagaggctaacaaaggtgaggaaagtgccaccttcacaggg

SEQ ID NO: 290857 - DNA, 380 bp, Homo sapiens
  misc_feature (21)..(21): n is a, c, g, or t
  misc_feature (33)..(33): n is a, c, g, or t
aaaaaaagcggcgcgagaagncgacagaagagnggagatccacgtgaaccctcaggtacaaagtatgggctcacaagaagatgattcaggaaacaaaccatccagttattcttgaaactaacatccatcctgagctaaacaagagaaactaccatcttggccagtgacaagtgttcggagggcagcagagaggaccaagcctgtgtcacctggagactaagaaattaagttttgttttgacatcttcagtcctgtgtgctttcagaaaaccattttctctgcaaagaaaggaaacagatttgcaaactttaaagtctgtcgtggatttatttatcctcagattattgttactgcattaaatctacctttttgttttaagt

SEQ ID NO: 290858 - DNA, 517 bp, Homo sapiens
  misc_feature (41)..(41): n is a, c, g, or t
ggatgcaccccgatctcgagggcactccgccccagcaagtnaaccctgtagctgcaaatgctgaagtgcattgagctggatgagcggctgaaagccatggaccaggagatcacagtgaaccctcagtttgtacaaaagagtatgggctcacaagaagatgattcaggaaacaaaccatccagttattcttgaaactaacatccatcctgagctaaacaagagaaactaccatcttggccagtgacaagtgttcggagggcagcagagaggaccaagcctgtgtcacctggagactaagaaattaagttttgttttgacatcttcagtcctgtgtgctttcagaaaaccattttctctgcaaagaaaggaaacagatttgcaaactttaaagtctgtcgtggatttatttatcctcagattattgttactgcattaaatctacctttttgttttaagtaaagaagaaaagcaacccaacaattctctataatttttggcctctttggcctcagggggg

SEQ ID NO: 290859 - DNA, 1866 bp, Homo sapiens
agtgacgtcgccgctcgcgaggacctcaggtggatcgccgcggcccctcctcccagagcggcagccttttcccgcgcgtgctgccttcgccgctcgggccgcccgggggaaaacatggcgtctgccctggagcagttcgtgaacagtgtccgacagctctcagctcaagggcaaatgacacagctttgtgaactgatcaacaagagtggggaactccttgcgaagaacttatcccatctggacactgtgctcggggctctggatgtacaagaacactccttgggcgtccttgctgttttgtttgtgaagttttctatgcccagtgttcctgacttcgaaacgctattctcacaggttcagctcttcatcagcacttgtaatggggagcacattcgatatgcaacagacacttttgctgggctttgccatcagctaacaaatgcacttgtggaaagaaaacagcccctgcgaggaattggcatccttaagcaagccatagacaagatgcagatgaatacaaaccagctgacctcaatacatgctgatctctgccagctttgtttgctagcaaaatgctttaagcctgcccttccatatcttgacgtggatatgatggatatctgtaaagagaatggagcctatgatgcaaaacactttttatgttactattattatggagggatgatctatactgggctgaagaactttgaaagagctctctacttttatgaacaggctataactactcctgccatggcggtcagtcatatcatgttggaatcatataaaaagtatattttagtgtctttgatattacttggcaaagtacaacagctaccaaaatatacatctcaaattgtgggtagattcattaagcctcttagcaatgcataccacgagttagcacaagtgtattcaaccaacaacccctcagaactccgaaacctggtgaataagcacagtgaaaccttcactcgcgataacaacatggggctggtgaagcaatgcttgtcatctctttataagaagaatattcagaggctaacaaagacctttttaactctatcattacaagatatggcaagtcgtgtgcagttgtctggacctcaggaggcagagaaatacgttctgcacatgatagaagatggtgagatttttgcaagtattaaccagaaggacggtatggtcagtttccatgataaccctgaaaaatataataacccagccatgcttcataacattgatcaggagatgctgaagtgcattgagctggatgagcggctgaaagccatggaccaggagatcacagtgaaccctcagtttgtacaaaagagtatgggctcacaagaagatgattcaggaaacaaaccatccagttattcttgaaactaacatccatcctgagctaaacaagagaaactaccatcttggccagtgacaagtgttcggagggcagcagagaggaccaagcctgtgtcacctggagactaagaaattaagttttgttttgacatcttcagtcctgtgtgctttcagaaaaccattttctctgcaaagaaaggaaacagatttgcaaactttaaagtctgtcgtggatttatttatcctcagattattgttactgcattaaatctacctttttgttttaagttgcttgaacattaatgtgtcttctgtatcacttttttctcctctgaagtttttaataagcacattcattgtgaacagaaatagctggattttaggaattttgggaagatttggatctgaaaggttttatttattgacaaatttgtatctacaaaaaatcttaaaaggtgtaatcattgtcttcagaaaataaaagaaaagaaaggccagacagac

SEQ ID NO: 290860 - DNA, 1801 bp, Homo sapiens
agtgacgtcgccgctcgcgaggacctcaggtggatcgccgcggcccctcctcccagagcggcagccttttcccgcgcgtgctgccttcgccgctcgggccgcccgggggaaaacatggcgtctgccctggagcagttcgtgaacagtgtccgacagctctcagctcaagggcaaatgacacagctttgtgaactgatcaacaagagtggggaactccttgcgaagaacttatcccatctggacactgtgctcggggctctggatgtacaagaacactccttgggcgtccttgctgttttgtttgtgaagttttctatgcccagtgttcctgacttcgaaacgctattctcacaggttcagctcttcatcagcacttgtaatggggagcacattcgatatgcaacagacacttttgctgggctttgccatcagctaacaaatgcacttgtggaaagaaaacagcccctgcgaggaattggcatccttaagcaagccatagacaagatgcagatgaatacaaaccagctgacctcaatacatgctgatctctgccagctttgtttgctagcaaaatgctttaagcctgcccttccatatcttgacgtggatatgatggatatctgtaaagagaatggagcctatgatgcaaaacactttttatgttactattattatggagggatgatctatactgggctgaagaactttgaaagagctctctacttttatgaacaggctataactactcctgccatggcggtcagtcatatcatgttggaatcatataaaaagtatattttagtgtctttgatattacttggcaaagtacaacagctaccaaaatatacatctcaaattgtgggtagattcattaagcctcttagcaatgcataccacgagttagcacaagtgtattcaaccaacaacccctcagaactccgaaacctggtgaataagcacagtgaaaccttcactcgcgataacaacatggggctggtgaagcaatgcttgtcatctctttataagaagaatattcagaggctaacaaagacctttttaactctatcattacaagatatggcaagtcgtgtgcagttgtctggacctcaggaggcagagaaatacgttctgcacatgatagaagatggtgagatttttgcaagtattaaccagaaggacggtatggtcagtttccatgataaccctgaaaaatataataacccagccatgcttcataacattgatcaggagatgctgaagtgcattgagctggatgagcggctgaaagccatggaccaggagatcacagtgaaccctcagtttgtacaaaagagtatgggctcacaagaagatgattcaggaaacaaaccatccagttattcttgaaactaacatccatcctgagctaaacaagagaaactaccatcttggccagtgacaagtgttcggagggcagcagagaggaccaagcctgtgtcacctggagactaagaaattaagttttgttttgacatcttcagtcctgtgtgctttcagaaaaccattttctctgcaaagaaaggaaacagatttgcaaactttaaagtctgtcgtggatttatttatcctcagattattgttactgcattaaatctacctttttgttttaagtaaaacaaaaacaaaaaaaatcgcgggttcaattggcgcggtgggggaaaaggggtttggaatgggccttggtcataagtggtccgacccagcttttggtcaaggggcgactcgcgggctccaaagggaggaaaatgaaagcggtacggtg

SEQ ID NO: 290861 - DNA, 1670 bp, Homo sapiens
agtgacgtcgccgctcgcgaggacctcaggtggatcgccgcggcccctcctcccagagcggcagccttttcccgcgcgtgctgccttcgccgctcgggccgcccgggggaaaacatggcgtctgccctggagcagttcgtgaacagtgtccgacagctctcagctcaagtgttgttcctgttttccagggcaaatgacacagctttgtgaactgatcaacaagagtggggaactccttgcgaagaacttatcccatctggacactgtgctcggggctctggatgtacaagaacactccttgggcgtccttgctgttttgtttgtgaagttttctatgcccagtgttcctgacttcgaaacgctattctcacaggttcagctcttcatcagcacttgtaatggggagcacattcgatatgcaacagacacttttgctgggctttgccatcagctaacaaatgcacttgtggaaagaaaacagcccctgcgaggaattggcatccttaagcaagccatagacaagatgcagatgaatacaaaccagctgacctcaatacatgctgatctctgccagctttgtttgctagcaaaatgctttaagcctgcccttccatatcttgacgtggatatgatggatatctgtaaagagaatggagcctatgatgcaaaacactttttatgttactattattatggagggatgatctatactgggctgaagaactttgaaagagctctctacttttatgaacaggctataactactcctgccatggcggtcagtcatatcatgttggaatcatataaaaagtatattttagtgtctttgatattacttggcaaagtacaacagctaccaaaatatacatctcaaattgtgggtagattcattaagcctcttagcaatgcataccacgagttagcacaagtgtattcaaccaacaacccctcagaactccgaaacctggtgaataagcacagtgaaaccttcactcgcgataacaacatggggctggtgaagcaatgcttgtcatctctttataagaagaatattcagaggctaacaaagacctttttaactctatcattacaagatatggcaagtcgtgtgcagttgtctggacctcaggaggcagagaaatacgttctgcacatgatagaagatggtgagatttttgcaagtattaaccagaaggacggtatggtcagtttccatgataaccctgaaaaatataataacccagccatgcttcataacattgatcaggagatgctgaagtgcattgagctggatgagcggctgaaagccatggaccaggagatcacagtgaaccctcagtttgtacaaaagagtatgggctcacaagaagatgattcaggaaacaaaccatccagttattcttgaaactaacatccatcctgagctaaacaagagaaactaccatcttggccagtgacaagtgttcggagggcagcagagaggaccaagcctgtgtcacctggagactaagaaattaagttttgttttgacatcttcagtcctgtgtgctttcagaaaaccattttctctgcaaagaaaggaaacagatttgcaaactttaaagtctgtcgtggatttatttatcctcagattattgttactgcattaaatctacctttttgttttaagt

SEQ ID NO: 290862 - DNA, 1567 bp, Homo sapiens
ccagctcctccgctgccaggcggcgcacgctcgggaacctgtgcgcctattttggtcctacagaatgctgcggaagctctcgctcggcaaatgacacagctttgtgaactgatcaacaagagtggggaactccttgcgaagaacttatcccatctggacactgtgctcggggctctggatgtacaagaacactccttgggcgtccttgctgttttgtttgtgaagttttctatgcccagtgttcctgacttcgaaacgctattctcacaggttcagctcttcatcagcacttgtaatggggagcacattcgatatgcaacagacacttttgctgggctttgccatcagctaacaaatgcacttgtggaaagaaaacagcccctgcgaggaattggcatccttaagcaagccatagacaagatgcagatgaatacaaaccagctgacctcaatacatgctgatctctgccagctttgtttgctagcaaaatgctttaagcctgcccttccatatcttgacgtggatatgatggatatctgtaaagagaatggagcctatgatgcaaaacactttttatgttactattattatggagggatgatctatactgggctgaagaactttgaaagagctctctacttttatgaacaggctataactactcctgccatggcggtcagtcatatcatgttggaatcatataaaaagtatattttagtgtctttgatattacttggcaaagtacaacagctaccaaaatatacatctcaaattgtgggtagattcattaagcctcttagcaatgcataccacgagttagcacaagtgtattcaaccaacaacccctcagaactccgaaacctggtgaataagcacagtgaaaccttcactcgcgataacaacatggggctggtgaagcaatgcttgtcatctctttataagaagaatattcagaggctaacaaagacctttttaactctatcattacaagatatggcaagtcgtgtgcagttgtctggacctcaggaggcagagaaatacgttctgcacatgatagaagatggtgagatttttgcaagtattaaccagaaggacggtatggtcagtttccatgataaccctgaaaaatataataacccagccatgcttcataacattgatcaggagatgctgaagtgcattgagctggatgagcggctgaaagccatggaccaggagatcacagtgaaccctcagtttgtacaaaagagtatgggctcacaagaagatgattcaggaaacaaaccatccagttattcttgaaactaacatccatcctgagctaaacaagagaaactaccatcttggccagtgacaagtgttcggagggcagcagagaggaccaagcctgtgtcacctggagactaagaaattaagttttgttttgacatcttcagtcctgtgtgctttcagaaaaccattttctctgcaaagaaaggaaacagatttgcaaactttaaagtctgtcgtggatttatttatcctcagattattgttactgcattaaatctacctttttgttttaagt

SEQ ID NO: 290863 - DNA, 1521 bp, Homo sapiens
agtgacgtcgccgctcgcgaggacctcaggtggatcgccgcggcccctcctcccagagcggcagccttttcccgcgcgtgctgccttcgccgctcgggccgcccgggggaaaacatggcgtctgccctggagcagttcgtgaacagtgtccgacagctctcagctcaaggtttgtgaagttttctatgcccagtgttcctgacttcgaaacgctattctcacaggttcagctcttcatcagcacttgtaatggggagcacattcgatatgcaacagacacttttgctgggctttgccatcagctaacaaatgcacttgtggaaagaaaacagcccctgcgaggaattggcatccttaagcaagccatagacaagatgcagatgaatacaaaccagctgacctcaatacatgctgatctctgccagctttgtttgctagcaaaatgctttaagcctgcccttccatatcttgacgtggatatgatggatatctgtaaagagaatggagcctatgatgcaaaacactttttatgttactattattatggagggatgatctatactgggctgaagaactttgaaagagctctctacttttatgaacaggctataactactcctgccatggcggtcagtcatatcatgttggaatcatataaaaagtatattttagtgtctttgatattacttggcaaagtacaacagctaccaaaatatacatctcaaattgtgggtagattcattaagcctcttagcaatgcataccacgagttagcacaagtgtattcaaccaacaacccctcagaactccgaaacctggtgaataagcacagtgaaaccttcactcgcgataacaacatggggctggtgaagcaatgcttgtcatctctttataagaagaatattcagaggctaacaaagacctttttaactctatcattacaagatatggcaagtcgtgtgcagttgtctggacctcaggaggcagagaaatacgttctgcacatgatagaagatggtgagatttttgcaagtattaaccagaaggacggtatggtcagtttccatgataaccctgaaaaatataataacccagccatgcttcataacattgatcaggagatgctgaagtgcattgagctggatgagcggctgaaagccatggaccaggagatcacagtgaaccctcagtttgtacaaaagagtatgggctcacaagaagatgattcaggaaacaaaccatccagttattcttgaaactaacatccatcctgagctaaacaagagaaactaccatcttggccagtgacaagtgttcggagggcagcagagaggaccaagcctgtgtcacctggagactaagaaattaagttttgttttgacatcttcagtcctgtgtgctttcagaaaaccattttctctgcaaagaaaggaaacagatttgcaaactttaaagtctgtcgtggatttatttatcctcagattattgttactgcattaaatctacctttttgttttaagt

SEQ ID NO: 290864 - DNA, 1719 bp, Homo sapiens
agtgacgtcgccgctcgcgaggacctcaggtggatcgccgcggcccctcctcccagagcggcagccttttcccgcgcgtgctgccttcgccgctcgggccgcccgggggaaaacatggcgtctgccctggagcagttcgtgaacagtgtccgacagctctcagctcaagggcaaatgacacagctttgtgaactgatcaacaagagtggggaactccttgcgaagaacttatcccatctggacactgtgctcggggctctggatgtacaagaacactccttgggcgtccttgctgttttgtttgtgaagttttctatgcccagtgttcctgacttcgaaacgctattctcacaggttcagctcttcatcagcacttgtaatggggagcacattcgatatgcaacagacacttttgctgggctttgccatcagctaacaaatgcacttgtggaaagaaaacagtgacaacataagatccaatgtgctgccatctttgagaacttatctgaaagagatgtcatttctgacagcccctgcgaggaattggcatccttaagcaagccatagacaagatgcagatgaatacaaaccagctgacctcaatacatgctgatctctgccagctttgtttgctagcaaaatgctttaagcctgcccttccatatcttgacgtggatatgatggatatctgtaaagagaatggagcctatgatgcaaaacactttttatgttactattattatggagggatgatctatactgggctgaagaactttgaaagagctctctacttttatgaacaggctataactactcctgccatggcggtcagtcatatcatgttggaatcatataaaaagtatattttagtgtctttgatattacttggcaaagtacaacagctaccaaaatatacatctcaaattgtgggtagattcattaagcctcttagcaatgcataccacgagttagcacaagtgtattcaaccaacaacccctcagaactccgaaacctggtgaataagcacagtgaaaccttcactcgcgataacaacatggggctggtgaagcaatgcttgtcatctctttataagaagaatattcagaggctaacaaagacctttttaactctatcattacaagatatggcaagtcgtgtgcagttgtctggacctcaggaggcagagaaatacgttctgcacatgatagaagatggtgagatttttgcaagtattaaccagaaggacggtatggtcagtttccatgataaccctgaaaaatataataacccagccatgcttcataacattgatcaggagatgctgaagtgcattgagctggatgagcggctgaaagccatggaccaggagatcacagtgaaccctcagtttgtacaaaagagtatgggctcacaagaagatgattcaggaaacaaaccatccagttattcttgaaactaacatccatcctgagctaaacaagagaaactaccatcttggccagtgacaagtgttcggagggcagcagagaggaccaagcctgtgtcacctggagactaagaaattaagttttgttttgacatcttcagtcctgtgtgctttcagaaaaccattttctctgcaaagaaaggaaacagatttgcaaactttaaagtctgtcgtggatttatttatcctcagattattgttactgcattaaatctacctttttgttttaagt

SEQ ID NO: 290865 - DNA, 1570 bp, Homo sapiens
agtgacgtcgccgctcgcgaggacctcaggtggatcgccgcggcccctcctcccagagcggcagccttttcccgcgcgtgctgccttcgccgctcgggccgcccgggggaaaacatggcgtctgccctggagcagttcgtgaacagtgtccgacagctctcagctcaagggcaaatgacacagctttgtgaactgatcaacaagagtggggaactccttgcgaagaacttatcccatctggacactgtgctcggggctctggatgtacaagaacactccttgggcgtccttgctgttttgtttgtgaagttttctatgcccagtgttcctgacttcgaaacgctattctcacaggttcagctcttcatcagcacttgtaatggggagcacattcgatatgcaacagacacttttgctgggctttgccatcagctaacaaatgcacttgtggaaagaaaacagcccctgcgaggaattggcatccttaagcaagccatagacaagatgcagatgaatacaaaccagctgacctcaatacatgctgatctctgccagctttgtttgctagcaaaatgctttaagcctgcccttccatatcttgacgtggatatgatggatatctgtaaagagaatggagcctatgatgcaaaacactttttatgttactattattatggagggatgatctatactgggctgaagaactttgaaagagctctctacttttatgaacaggctataactactcctgccatggcggtcagtcatatcatgttggaatcatataaaaagtatattttagtgtctttgatattacttggcaaagtacaacagctaccaaaatatacatctcaaattgtgggtagattcattaagcctcttagcaatgcataccacgagttagcacaagtgtattcaaccaacaacccctcagaactccgaaacctggtgaataagcacagtgaaaccttcactcgcgataacaacatggggctggtgaagcaatgcttgtcatctctttataagaagaatattcagaggctaacaaagacctttttaactctatcattacaagatatggcaagtcgtgtgcagttgtctggacctcaggaggcagagaaatacgttctgcacatgatagaagatggtgagatttttgcaagtattaaccagaaggacggtatggtcagtttccatgataaccctgaaaaatataataacccagccatgcttcataacattgatcaggagagtatgggctcacaagaagatgattcaggaaacaaaccatccagttattcttgaaactaacatccatcctgagctaaacaagagaaactaccatcttggccagtgacaagtgttcggagggcagcagagaggaccaagcctgtgtcacctggagactaagaaattaagttttgttttgacatcttcagtcctgtgtgctttcagaaaaccattttctctgcaaagaaaggaaacagatttgcaaactttaaagtctgtcgtggatttatttatcctcagattattgttactgcattaaatctacctttttgttttaagt

SEQ ID NO: 290866 - DNA, 1471 bp, Homo sapiens
agtgacgtcgccgctcgcgaggacctcaggtggatcgccgcggcccctcctcccagagcggcagccttttcccgcgcgtgctgccttcgccgctcgggccgcccgggggaaaacatggcgtctgccctggagcagttcgtgaacagtgtccgacagctctcagctcaaggtttgtgaagttttctatgcccagtgttcctgacttcgaaacgctattctcacaggttcagctcttcatcagcacttgtaatggggagcacattcgatatgcaacagacacttcccctgcgaggaattggcatccttaagcaagccatagacaagatgcagatgaatacaaaccagctgacctcaatacatgctgatctctgccagctttgtttgctagcaaaatgctttaagcctgcccttccatatcttgacgtggatatgatggatatctgtaaagagaatggagcctatgatgcaaaacactttttatgttactattattatggagggatgatctatactgggctgaagaactttgaaagagctctctacttttatgaacaggctataactactcctgccatggcggtcagtcatatcatgttggaatcatataaaaagtatattttagtgtctttgatattacttggcaaagtacaacagctaccaaaatatacatctcaaattgtgggtagattcattaagcctcttagcaatgcataccacgagttagcacaagtgtattcaaccaacaacccctcagaactccgaaacctggtgaataagcacagtgaaaccttcactcgcgataacaacatggggctggtgaagcaatgcttgtcatctctttataagaagaatattcagaggctaacaaagacctttttaactctatcattacaagatatggcaagtcgtgtgcagttgtctggacctcaggaggcagagaaatacgttctgcacatgatagaagatggtgagatttttgcaagtattaaccagaaggacggtatggtcagtttccatgataaccctgaaaaatataataacccagccatgcttcataacattgatcaggagatgctgaagtgcattgagctggatgagcggctgaaagccatggaccaggagatcacagtgaaccctcagtttgtacaaaagagtatgggctcacaagaagatgattcaggaaacaaaccatccagttattcttgaaactaacatccatcctgagctaaacaagagaaactaccatcttggccagtgacaagtgttcggagggcagcagagaggaccaagcctgtgtcacctggagactaagaaattaagttttgttttgacatcttcagtcctgtgtgctttcagaaaaccattttctctgcaaagaaaggaaacagatttgcaaactttaaagtctgtcgtggatttatttatcctcagattattgttactgcattaaatctacctttttgttttaagt

SEQ ID NO: 290867 - DNA, 1744 bp, Homo sapiens
agtgacgtcgccgctcgcgaggacctcaggtggatcgccgcggcccctcctcccagagcggcagccttttcccgcgcgtgctgccttcgccgctcgggccgcccgggggaaaacatggcgtctgccctggagcagttcgtgaacagtgtccgacagctctcagctcaagggcaaatgacacagctttgtgaactgatcaacaagagtggggaactccttgcgaagaacttatcccatctggacactgtgctcggggctctggatgtacaagaacactccttgggcgtccttgctgttttgtttgtgaagttttctatgcccagtgttcctgacttcgaaacgctattctcacaggttcagctcttcatcagcacttgtaatggggagcacattcgatatgcaacagacacttttgctgggctttgccatcagctaacaaatgcacttgtggaaagaaaacagcccctgcgaggaattggcatccttaagcaagccatagacaagatgcagatgaatacaaaccagctgacctcaatacatgctgatctctgccagctttgtttgctagcaaaatgctttaagcctgcccttccatatcttgacgtggatatgatggatatctgtaaagagaatggagcctatgatgcaaaacactttttatgttactattattatggagggatgatctatactgggctgaagaactttgaaagagctctctacttttatgaacaggctataactactcctgccatggcggtcagtcatatcatgttggaatcatataaaaagtatattttagtgtctttgatattacttggcaaagtacaacagctaccaaaatatacatctcaaattgtgggtagattcattaagagacagagtctcgctatgttggccaggttggtgttgaactcctggcctcaagcagtccttctgcgtctgcctcccagagtgctgggattacagcctcttagcaatgcataccacgagttagcacaagtgtattcaaccaacaacccctcagaactccgaaacctggtgaataagcacagtgaaaccttcactcgcgataacaacatggggctggtgaagcaatgcttgtcatctctttataagaagaatattcagaggctaacaaagacctttttaactctatcattacaagatatggcaagtcgtgtgcagttgtctggacctcaggaggcagagaaatacgttctgcacatgatagaagatggtgagatttttgcaagtattaaccagaaggacggtatggtcagtttccatgataaccctgaaaaatataataacccagccatgcttcataacattgatcaggagatgctgaagtgcattgagctggatgagcggctgaaagccatggaccaggagatcacagtgaaccctcagtttgtacaaaagagtatgggctcacaagaagatgattcaggaaacaaaccatccagttattcttgaaactaacatccatcctgagctaaacaagagaaactaccatcttggccagtgacaagtgttcggagggcagcagagaggaccaagcctgtgtcacctggagactaagaaattaagttttgttttgacatcttcagtcctgtgtgctttcagaaaaccattttctctgcaaagaaaggaaacagatttgcaaactttaaagtctgtcgtggatttatttatcctcagattattgttactgcattaaatctacctttttgttttaagt

SEQ ID NO: 290868 - DNA, 1477 bp, Homo sapiens
agtgacgtcgccgctcgcgaggacctcaggtggatcgccgcggcccctcctcccagagcggcagccttttcccgcgcgtgctgccttcgccgctcgggccgcccgggggaaaacatggcgtctgccctggagcagttcgtgaacagtgtccgacagctctcagctcaagggcaaatgacacagctttgtgaactgatcaacaagagtggggaactccttgcgaagaacttatcccatctggacactgtgctcggggctctggatgtacaagaacactccttgggcgtccttgctgttttgtttgtgaagttttctatgcccagtgttcctgacttcgaaacgctattctcacaggttcagctcttcatcagcacttgtaatggggagcacattcgatatgcaacagacacttttgctgggctttgccatcagctaacaaatgcacttgtggaaagaaaacagcccctgcgaggaattggcatccttaagcaagccatagacaagatgcagatgaatacaaaccagctgacctcaatacatgctgatctctgccagctttgtttgctagcaaaatgctttaagcctgcccttccatatcttgacgtggatatgatggatatctgtaaagagaatggagcctatgatgcaaaacactttttatgttactattattatggagggatgatctatactgggctgaagaactttgaaagagctctctacttttatgaacaggctataactactcctgccatggcggtcagtcatatcatgttggaatcatataaaaagtatattttagtgtctttgatattacttggcaaagtacaacagctaccaaaatatacatctcaaattgtgggtagattcattaagacctttttaactctatcattacaagatatggcaagtcgtgtgcagttgtctggacctcaggaggcagagaaatacgttctgcacatgatagaagatggtgagatttttgcaagtattaaccagaaggacggtatggtcagtttccatgataaccctgaaaaatataataacccagccatgcttcataacattgatcaggagatgctgaagtgcattgagctggatgagcggctgaaagccatggaccaggagatcacagtgaaccctcagtttgtacaaaagagtatgggctcacaagaagatgattcaggaaacaaaccatccagttattcttgaaactaacatccatcctgagctaaacaagagaaactaccatcttggccagtgacaagtgttcggagggcagcagagaggaccaagcctgtgtcacctggagactaagaaattaagttttgttttgacatcttcagtcctgtgtgctttcagaaaaccattttctctgcaaagaaaggaaacagatttgcaaactttaaagtctgtcgtggatttatttatcctcagattattgttactgcattaaatctacctttttgttttaagt

SEQ ID NO: 290869 - DNA, 1471 bp, Homo sapiens
agtgacgtcgccgctcgcgaggacctcaggtggatcgccgcggcccctcctcccagagcggcagccttttcccgcgcgtgctgccttcgccgctcgggccgcccgggggaaaacatggcgtctgccctggagcagttcgtgaacagtgtccgacagctctcagctcaagggcaaatgacacagctttgtgaactgatcaacaagagtggggaactccttgcgaagaacttatcccatctggacactgtgctcggggctctggatgtacaagaacactccttgggcgtccttgctgttttgtttgtgaagttttctatgcccagtgttcctgacttcgaaacgctattctcacaggttcagctcttcatcagcacttgtaatggggagcacattcgatatgcaacagacacttttgctgggctttgccatcagctaacaaatgcacttgtggaaagaaaacagcccctgcgaggaattggcatccttaagcaagccatagacaagatgcagatgaatacaaaccagctgacctcaatacatgctgatctctgccaggctataactactcctgccatggcggtcagtcatatcatgttggaatcatataaaaagtatattttagtgtctttgatattacttggcaaagtacaacagctaccaaaatatacatctcaaattgtgggtagattcattaagcctcttagcaatgcataccacgagttagcacaagtgtattcaaccaacaacccctcagaactccgaaacctggtgaataagcacagtgaaaccttcactcgcgataacaacatggggctggtgaagcaatgcttgtcatctctttataagaagaatattcagaggctaacaaagacctttttaactctatcattacaagatatggcaagtcgtgtgcagttgtctggacctcaggaggcagagaaatacgttctgcacatgatagaagatggtgagatttttgcaagtattaaccagaaggacggtatggtcagtttccatgataaccctgaaaaatataataacccagccatgcttcataacattgatcaggagatgctgaagtgcattgagctggatgagcggctgaaagccatggaccaggagatcacagtgaaccctcagtttgtacaaaagagtatgggctcacaagaagatgattcaggaaacaaaccatccagttattcttgaaactaacatccatcctgagctaaacaagagaaactaccatcttggccagtgacaagtgttcggagggcagcagagaggaccaagcctgtgtcacctggagactaagaaattaagttttgttttgacatcttcagtcctgtgtgctttcagaaaaccattttctctgcaaagaaaggaaacagatttgcaaactttaaagtctgtcgtggatttatttatcctcagattattgttactgcattaaatctacctttttgttttaagt

SEQ ID NO: 290870 - DNA, 997 bp, Homo sapiens
caagtagctgggattacaggcatgtgctatcacgctcagttaattttgtatttttagtagagacggggtttcttcatgttggtcaggctggtgtttaacccctgaccccaggtgatttgtccgcctcggcctcccaaagtgttgagattacaggcgtgagtccccacacctggcctcttctgaagttttaatctgaattttttccctcctttgcatctttagcctcttagcaatgcataccacgagttagcacaagtgtattcaaccaacaacccctcagaactccgaaacctggtgaataagcacagtgaaaccttcactcgcgataacaacatggggctggtgaagcaatgcttgtcatctctttataagaagaatattcagaggctaacaaagacctttttaactctatcattacaagatatggcaagtcgtgtgcagttgtctggacctcaggaggcagagaaatacgttctgcacatgatagaagatggtgagatttttgcaagtattaaccagaaggacggtatggtcagtttccatgataaccctgaaaaatataataacccagccatgcttcataacattgatcaggagatgctgaagtgcattgagctggatgagcggctgaaagccatggaccaggagatcacagtgaaccctcagtttgtacaaaagagtatgggctcacaagaagatgattcaggaaacaaaccatccagttattcttgaaactaacatccatcctgagctaaacaagagaaactaccatcttggccagtgacaagtgttcggagggcagcagagaggaccaagcctgtgtcacctggagactaagaaattaagttttgttttgacatcttcagtcctgtgtgctttcagaaaaccattttctctgcaaagaaaggaaacagatttgcaaactttaaagtctgtcgtggatttatttatcctcagattattgttactgcattaaatctacctttttgttttaagt

SEQ ID NO: 290871 - DNA, 513 bp, Homo sapiens
agctgtaaggatgaaagtggcatctattgagatatagaagataggagcaacattttgggggaaatatcagaaatttggttttgaatatgagaagtatgtgatgtctattagacatccaaatggaaatgtctaataagcaaattggataagcaagcctggaagtcagagagaaatgtgctgaagtcaaagctatgaggcagtgacgtgagacaggtttgaagattaagtcctgagcactctgtgcttagaggttaaggagataaggagacaccagcaaaggagactgaagaggagtgagcagtaacggaagagagaaaccagcagaccgtttcctgcaggctgggaaagaaagcgaaacaggtagactttgtggcatttgatacaacttggacaatacctagtttggagggaggggaatggaagggcatggaagtttttttaaataattaaaaatatatacatataattttgagaattgagcatttaataaactgacttttgttattatggaaa

SEQ ID NO: 290872 - DNA, 3363 bp, Homo sapiens
cttcgtttccgtctcggccgggcacccgagcgcatcccgccgaggccgggccgtttcagggggaggcgccaactcatcgcggcgccgggcccctgaccgtgcagtaaccgctacccaggaggcggagcggacaaggctccggcctgcgaggagtcacattaactttgctctagaagacaactttacaaggatctaaaaggaacaggattaaagatgactgaatactgggttccagaaatttaaaacaatcagcttagcaaatcatatattcttctgtggagctgagaattgatgtccgctcttccccgtgatttggaactttccaatcccagagaaaagttgacaaagggactgcccaggactgagtccatatggaagaagaacttcctcttttctctggagacagtggcaagccagtacaggctactctgtcatctttgaagatgttagatgtgggaaagtggccaattttttccctttgttctgaagaagaactacagttaattcgtcaggcttgtgtctttggcagtgctggcaatgaagttttatacactacagtaaatgatgagatttttgtgcttggcacaaactgctgtggctgtttggggttaggtgacgtccagagcaccattgaacctcggagactggattctttaaatggcaaaaaaatagcctgcctcagctatgggagtggtccacatattgtccttgcaacaacagaaggagaagtctttacctggggtcataatgcttatagccagctgggcaatgggacaactaatcatggtttagtgccctgtcatatctctactaatctgtcaaacaaacaagtcattgaagttgcctgtgggtcttaccattctttggtgctaacatctgatggagaggtatttgcctggggttataataactctgggcaggtaggatctggatcaacagttaatcagccaatccctcgaagagtcactggctgcctacaaaataaagtagttgtgaccatagcatgtgggcagatgtgctgcatggcagtagtagacacgggggaggtctatgtctggggttacaacggaaacgggcagcttggactcggcaacagtggcaaccagccaaccccttgcagagtggcagctttgcaaggcatccgtgtccagagggtcgcctgtggctacgcacacacattagtattaacagatgaaggccaagtgtatgcttggggcgccaattcttatgggcagttgggcactggcaataaaagcaaccagtcctatcctactcctgtcactgtggaaaaggacaggattatcgagattgcagcctgtcactccacacacacgtctgcggccaagacgcagggtgggcacgtgtacatgtggggccagtgccggggtcagtccgtgatcctcccgcacctcacccacttctcctgcactgacgacgtgtttgcctgctttgccacgcccgccgtcacgtggcgcctcctctccgtggaacctgatgaccacctcacagtggctgagtcactgaagagggaatttgacaacccggacactgcagacctgaagtttctagttgatggaaagtacatttatgcacataaagtccttctcaagattcgatgtgagcattttcgttcgtcattggaagataacgaggatgatattgtagaaatgagtgaattttcatatcctgtttaccgggccttcctggaatacctatacacagacagcatcagcctttctcctgaggaggcagtaggactgctagacttggctacattttatagagaaaatcgtttgaaaaagctctgccaacaaactatcaagcaaggcatctgcgaggagaatgccatcgctctgctctcggctgcggtgaagtatgatgcacaggatttagaagaattctgcttcaggttttgcataaaccatctgactgtagtaacacaaacatcaggttttgcagaaatggaccatgatctcctgaagaactttatcagcaaagcaagcagagttggagcctttaaaaattgatcccatctgcaggaaagtttttgagcctttccatttcccctgcaaaagccagagatgaatcacttctctttaattaatagtatgtatgatgagctatgtttggctgagtacttgtaactgtcagaagaaggatggtggtgagtggtctttgtctgcctaaacccagagtttatgtagaaagcattgaatgttctgatcagatgtgactaaggtcaaggaaaaaaaattgaaatatcttatttaccatttcctctttttgagtcacttaaattggacacctttggtaccctggtctcagtatatgctattctggcccaaatgttccattattcagctggctgataccacatagatagcttgacaaggagtgctgtctgtccttaccacattttcagcactcagcacagtgccttgtgtataataggcactcaatttattataaatcttcagtatgtcctgagaacagctttagtcatggaatactgggagaaggaataactttcacaaaataaacttaaaacagcctgtaattattgaggttcatattcttctggtatatcattctgagaaattgtggctaatttagaacattgtttagaattgacaaaaggccctggcaattaaattgtcaaggcccaagggctaattttaattttctttttacttggagtcattcattaatttctcacatgggattatggagtatgaagtattatctttgaatgaaattcctgggctgatctgccttacataatcacataaggtcctttgcttttctttgtgttaagagggacttgcctctgtaaatgaaaatgacaatgtgcttttcttgtagttgactttcatgtcactcactataaaataggtctcttaacctggcaccagtataactataaagcactagctgagaaggaactgatacttacatttcatggacagcattaacaagaatgagataaatttgtactttttagatcaaaacaaattacctaattgcaaaagagaaactgaaatggaacatagtctcagattcttctaatgtgtatctcacaatgtcatgtaatgtaaaggaaacccttttggaattagaattcttgttctgatgctgaactatttggtaataaagtgcttatttgcagataacagaaaaaatgtgttggggttttttttaatcccaaaacagcagcaaaattataaaatgtcaacctcatgtctcttagatgtacataaataaattggatatattatgctcttatcaagcagttactcggataaagtctcataggaaagcccaccctagaccacaaatagcttataaacaacctaattatcattc

SEQ ID NO: 290873 - DNA, 3103 bp, Homo sapiens
cttcgtttccgtctcggccgggcacccgagcgcatcccgccgaggccgggccgtttcagggggaggcgccaactcatcgcggcgccgggcccctgaccgtgcagtaaccgctacccaggaggcggagcggacaaggctccggcctgcgaggagccagtacaggctactctgtcatctttgaagatgttagatgtgggaaagtggccaattttttccctttgttctgaagaagaactacagttaattcgtcaggcttgtgtctttggcagtgctggcaatgaagttttatacactacagtaaatgatgagatttttgtgcttggcacaaactgctgtggctgtttggggttaggtgacgtccagagcaccattgaacctcggagactggattctttaaatggcaaaaaaatagcctgcctcagctatgggagtggtccacatattgtccttgcaacaacagaaggagaagtctttacctggggtcataatgcttatagccagctgggcaatgggacaactaatcatggtttagtgccctgtcatatctctactaatctgtcaaacaaacaagtcattgaagttgcctgtgggtcttaccattctttggtgctaacatctgatggagaggtatttgcctggggttataataactctgggcaggtaggatctggatcaacagttaatcagccaatccctcgaagagtcactggctgcctacaaaataaagtagttgtgaccatagcatgtgggcagatgtgctgcatggcagtagtagacacgggggaggtctatgtctggggttacaacggaaacgggcagcttggactcggcaacagtggcaaccagccaaccccttgcagagtggcagctttgcaaggcatccgtgtccagagggtcgcctgtggctacgcacacacattagtattaacagatgaaggccaagtgtatgcttggggcgccaattcttatgggcagttgggcactggcaataaaagcaaccagtcctatcctactcctgtcactgtggaaaaggacaggattatcgagattgcagcctgtcactccacacacacgtctgcggccaagacgcagggtgggcacgtgtacatgtggggccagtgccggggtcagtccgtgatcctcccgcacctcacccacttctcctgcactgacgacgtgtttgcctgctttgccacgcccgccgtcacgtggcgcctcctctccgtggaacctgatgaccacctcacagtggctgagtcactgaagagggaatttgacaacccggacactgcagacctgaagtttctagttgatggaaagtacatttatgcacataaagtccttctcaagattcgatgtgagcattttcgttcgtcattggaagataacgaggatgatattgtagaaatgagtgaattttcatatcctgtttaccgggccttcctggaatacctatacacagacagcatcagcctttctcctgaggaggcagtaggactgctagacttggctacattttatagagaaaatcgtttgaaaaagctctgccaacaaactatcaagcaaggcatctgcgaggagaatgccatcgctctgctctcggctgcggtgaagtatgatgcacaggatttagaagaattctgcttcaggttttgcataaaccatctgactgtagtaacacaaacatcaggttttgcagaaatggaccatgatctcctgaagaactttatcagcaaagcaagcagagttggagcctttaaaaattgatcccatctgcaggaaagtttttgagcctttccatttcccctgcaaaagccagagatgaatcacttctctttaattaatagtatgtatgatgagctatgtttggctgagtacttgtaactgtcagaagaaggatggtggtgagtggtctttgtctgcctaaacccagagtttatgtagaaagcattgaatgttctgatcagatgtgactaaggtcaaggaaaaaaaattgaaatatcttatttaccatttcctctttttgagtcacttaaattggacacctttggtaccctggtctcagtatatgctattctggcccaaatgttccattattcagctggctgataccacatagatagcttgacaaggagtgctgtctgtccttaccacattttcagcactcagcacagtgccttgtgtataataggcactcaatttattataaatcttcagtatgtcctgagaacagctttagtcatggaatactgggagaaggaataactttcacaaaataaacttaaaacagcctgtaattattgaggttcatattcttctggtatatcattctgagaaattgtggctaatttagaacattgtttagaattgacaaaaggccctggcaattaaattgtcaaggcccaagggctaattttaattttctttttacttggagtcattcattaatttctcacatgggattatggagtatgaagtattatctttgaatgaaattcctgggctgatctgccttacataatcacataaggtcctttgcttttctttgtgttaagagggacttgcctctgtaaatgaaaatgacaatgtgcttttcttgtagttgactttcatgtcactcactataaaataggtctcttaacctggcaccagtataactataaagcactagctgagaaggaactgatacttacatttcatggacagcattaacaagaatgagataaatttgtactttttagatcaaaacaaattacctaattgcaaaagagaaactgaaatggaacatagtctcagattcttctaatgtgtatctcacaatgtcatgtaatgtaaaggaaacccttttggaattagaattcttgttctgatgctgaactatttggtaataaagtgcttatttgcagataacagaaaaaatgtgttggggttttttttaatcccaaaacagcagcaaaattataaaatgtcaacctcatgtctcttagatgtacataaataaattggatatattatgctcttatcaagcagttactcggataaagtctcataggaaagcccaccctagaccacaaatagcttataaacaacctaattatcattc

SEQ ID NO: 290874 - DNA, 3202 bp, Homo sapiens
cttcgtttccgtctcggccgggcacccgagcgcatcccgccgaggccgggccgtttcagggggaggcgccaactcatcgcggcgccgggcccctgaccgtgcagtaaccgctacccaggaggcggagcggacaaggctccggcctgcgaggagtcacattaactttgctctagaagacaactttacaaggatctaaaaggaacaggattaaagatgactgaatactgggttccagaaatttaaaacaatcagccagtacaggctactctgtcatctttgaagatgttagatgtgggaaagtggccaattttttccctttgttctgaagaagaactacagttaattcgtcaggcttgtgtctttggcagtgctggcaatgaagttttatacactacagtaaatgatgagatttttgtgcttggcacaaactgctgtggctgtttggggttaggtgacgtccagagcaccattgaacctcggagactggattctttaaatggcaaaaaaatagcctgcctcagctatgggagtggtccacatattgtccttgcaacaacagaaggagaagtctttacctggggtcataatgcttatagccagctgggcaatgggacaactaatcatggtttagtgccctgtcatatctctactaatctgtcaaacaaacaagtcattgaagttgcctgtgggtcttaccattctttggtgctaacatctgatggagaggtatttgcctggggttataataactctgggcaggtaggatctggatcaacagttaatcagccaatccctcgaagagtcactggctgcctacaaaataaagtagttgtgaccatagcatgtgggcagatgtgctgcatggcagtagtagacacgggggaggtctatgtctggggttacaacggaaacgggcagcttggactcggcaacagtggcaaccagccaaccccttgcagagtggcagctttgcaaggcatccgtgtccagagggtcgcctgtggctacgcacacacattagtattaacagatgaaggccaagtgtatgcttggggcgccaattcttatgggcagttgggcactggcaataaaagcaaccagtcctatcctactcctgtcactgtggaaaaggacaggattatcgagattgcagcctgtcactccacacacacgtctgcggccaagacgcagggtgggcacgtgtacatgtggggccagtgccggggtcagtccgtgatcctcccgcacctcacccacttctcctgcactgacgacgtgtttgcctgctttgccacgcccgccgtcacgtggcgcctcctctccgtggaacctgatgaccacctcacagtggctgagtcactgaagagggaatttgacaacccggacactgcagacctgaagtttctagttgatggaaagtacatttatgcacataaagtccttctcaagattcgatgtgagcattttcgttcgtcattggaagataacgaggatgatattgtagaaatgagtgaattttcatatcctgtttaccgggccttcctggaatacctatacacagacagcatcagcctttctcctgaggaggcagtaggactgctagacttggctacattttatagagaaaatcgtttgaaaaagctctgccaacaaactatcaagcaaggcatctgcgaggagaatgccatcgctctgctctcggctgcggtgaagtatgatgcacaggatttagaagaattctgcttcaggttttgcataaaccatctgactgtagtaacacaaacatcaggttttgcagaaatggaccatgatctcctgaagaactttatcagcaaagcaagcagagttggagcctttaaaaattgatcccatctgcaggaaagtttttgagcctttccatttcccctgcaaaagccagagatgaatcacttctctttaattaatagtatgtatgatgagctatgtttggctgagtacttgtaactgtcagaagaaggatggtggtgagtggtctttgtctgcctaaacccagagtttatgtagaaagcattgaatgttctgatcagatgtgactaaggtcaaggaaaaaaaattgaaatatcttatttaccatttcctctttttgagtcacttaaattggacacctttggtaccctggtctcagtatatgctattctggcccaaatgttccattattcagctggctgataccacatagatagcttgacaaggagtgctgtctgtccttaccacattttcagcactcagcacagtgccttgtgtataataggcactcaatttattataaatcttcagtatgtcctgagaacagctttagtcatggaatactgggagaaggaataactttcacaaaataaacttaaaacagcctgtaattattgaggttcatattcttctggtatatcattctgagaaattgtggctaatttagaacattgtttagaattgacaaaaggccctggcaattaaattgtcaaggcccaagggctaattttaattttctttttacttggagtcattcattaatttctcacatgggattatggagtatgaagtattatctttgaatgaaattcctgggctgatctgccttacataatcacataaggtcctttgcttttctttgtgttaagagggacttgcctctgtaaatgaaaatgacaatgtgcttttcttgtagttgactttcatgtcactcactataaaataggtctcttaacctggcaccagtataactataaagcactagctgagaaggaactgatacttacatttcatggacagcattaacaagaatgagataaatttgtactttttagatcaaaacaaattacctaattgcaaaagagaaactgaaatggaacatagtctcagattcttctaatgtgtatctcacaatgtcatgtaatgtaaaggaaacccttttggaattagaattcttgttctgatgctgaactatttggtaataaagtgcttatttgcagataacagaaaaaatgtgttggggttttttttaatcccaaaacagcagcaaaattataaaatgtcaacctcatgtctcttagatgtacataaataaattggatatattatgctcttatcaagcagttactcggataaagtctcataggaaagcccaccctagaccacaaatagcttataaacaacctaattatcattc

SEQ ID NO: 290875 - DNA, 2075 bp, Homo sapiens
agctgtaaggatgaaagtggcatctattgagatatagaagataggagcaacattttgggggaaatatcagaaatttggttttgaatatgagaagtatgtgatgtctattagacatccaaatggaaatgtctaataagcaaattggataagcaagcctggaagtcagagagaaatgtgctgaagtcaaagctatgaggcagtgacgtgagacaggtttgaagattaagtcctgagcactctgtgcttagaggttaaggagataaggagacaccagcaaaggagactgaagaggagtgagcagtaacggaagagagaaaccagcagaccgtttcctgcaggctgggaaagaaagcgaaacaggaaggaagaagtccgaaccacaccagatgctgctggcacgtctgcacgaggactgagaactgacgagtgggtttggcgatgagaacgccggaggggccttggcaagcagttttagcgcagtgaggcgggaagtctgatcggagcgtggaagtagaggaactgaagatggggaatagaggcagcttttcatggtaattttattataaagataaaaaggaagagctttggggcatttgaggatttagaagaattctgcttcaggttttgcataaaccatctgactgtagtaacacaaacatcaggttttgcagaaatggaccatgatctcctgaagaactttatcagcaaagcaagcagagttggagcctttaaaaattgatcccatctgcaggaaagtttttgagcctttccatttcccctgcaaaagccagagatgaatcacttctctttaattaatagtatgtatgatgagctatgtttggctgagtacttgtaactgtcagaagaaggatggtggtgagtggtctttgtctgcctaaacccagagtttatgtagaaagcattgaatgttctgatcagatgtgactaaggtcaaggaaaaaaaattgaaatatcttatttaccatttcctctttttgagtcacttaaattggacacctttggtaccctggtctcagtatatgctattctggcccaaatgttccattattcagctggctgataccacatagatagcttgacaaggagtgctgtctgtccttaccacattttcagcactcagcacagtgccttgtgtataataggcactcaatttattataaatcttcagtatgtcctgagaacagctttagtcatggaatactgggagaaggaataactttcacaaaataaacttaaaacagcctgtaattattgaggttcatattcttctggtatatcattctgagaaattgtggctaatttagaacattgtttagaattgacaaaaggccctggcaattaaattgtcaaggcccaagggctaattttaattttctttttacttggagtcattcattaatttctcacatgggattatggagtatgaagtattatctttgaatgaaattcctgggctgatctgccttacataatcacataaggtcctttgcttttctttgtgttaagagggacttgcctctgtaaatgaaaatgacaatgtgcttttcttgtagttgactttcatgtcactcactataaaataggtctcttaacctggcaccagtataactataaagcactagctgagaaggaactgatacttacatttcatggacagcattaacaagaatgagataaatttgtactttttagatcaaaacaaattacctaattgcaaaagagaaactgaaatggaacatagtctcagattcttctaatgtgtatctcacaatgtcatgtaatgtaaaggaaacccttttggaattagaattcttgttctgatgctgaactatttggtaataaagtgcttatttgcagataacagaaaaaatgtgttggggttttttttaatcccaaaacagcagcaaaattataaaatgtcaacctcatgtctcttagatgtacataaataaattggatatattatgctcttatcaagcagttactcggataaagtctcataggaaagcccaccctagaccacaaatagcttataaacaacctaattatcattc

SEQ ID NO: 290876 - DNA, 2028 bp, Homo sapiens
agctgtaaggatgaaagtggcatctattgagatatagaagataggagcaacattttgggggaaatatcagaaatttggttttgaatatgagaagtatgtgatgtctattagacatccaaatggaaatgtctaataagcaaattggataagcaagcctggaagtcagagagaaatgtgctgaagtcaaagctatgaggcagtgacgtgagacaggtttgaagattaagtcctgagcactctgtgcttagaggttaaggagataaggagacaccagcaaaggagactgaagaggagtgagcagtaacggaagagagaaaccagcagaccgtttcctgcaggctgggaaagaaagcgaaacaggaaggaagaagtccgaaccacaccagatgctgctggcacgtctgcacgaggactgagaactgacgagtgggtttggcgatgagaacgccggaggggccttggcaagcagttttagcgcagtgaggcgggaagtctgatcggagcgtggaagtagaggaactgaagatggggaatagaggcagcttttcatggatttagaagaattctgcttcaggttttgcataaaccatctgactgtagtaacacaaacatcaggttttgcagaaatggaccatgatctcctgaagaactttatcagcaaagcaagcagagttggagcctttaaaaattgatcccatctgcaggaaagtttttgagcctttccatttcccctgcaaaagccagagatgaatcacttctctttaattaatagtatgtatgatgagctatgtttggctgagtacttgtaactgtcagaagaaggatggtggtgagtggtctttgtctgcctaaacccagagtttatgtagaaagcattgaatgttctgatcagatgtgactaaggtcaaggaaaaaaaattgaaatatcttatttaccatttcctctttttgagtcacttaaattggacacctttggtaccctggtctcagtatatgctattctggcccaaatgttccattattcagctggctgataccacatagatagcttgacaaggagtgctgtctgtccttaccacattttcagcactcagcacagtgccttgtgtataataggcactcaatttattataaatcttcagtatgtcctgagaacagctttagtcatggaatactgggagaaggaataactttcacaaaataaacttaaaacagcctgtaattattgaggttcatattcttctggtatatcattctgagaaattgtggctaatttagaacattgtttagaattgacaaaaggccctggcaattaaattgtcaaggcccaagggctaattttaattttctttttacttggagtcattcattaatttctcacatgggattatggagtatgaagtattatctttgaatgaaattcctgggctgatctgccttacataatcacataaggtcctttgcttttctttgtgttaagagggacttgcctctgtaaatgaaaatgacaatgtgcttttcttgtagttgactttcatgtcactcactataaaataggtctcttaacctggcaccagtataactataaagcactagctgagaaggaactgatacttacatttcatggacagcattaacaagaatgagataaatttgtactttttagatcaaaacaaattacctaattgcaaaagagaaactgaaatggaacatagtctcagattcttctaatgtgtatctcacaatgtcatgtaatgtaaaggaaacccttttggaattagaattcttgttctgatgctgaactatttggtaataaagtgcttatttgcagataacagaaaaaatgtgttggggttttttttaatcccaaaacagcagcaaaattataaaatgtcaacctcatgtctcttagatgtacataaataaattggatatattatgctcttatcaagcagttactcggataaagtctcataggaaagcccaccctagaccacaaatagcttataaacaacctaattatcattc

SEQ ID NO: 290877 - DNA, 2139 bp, Homo sapiens
agctgtaaggatgaaagtggcatctattgagatatagaagataggagcaacattttgggggaaatatcagaaatttggttttgaatatgagaagtatgtgatgtctattagacatccaaatggaaatgtctaataagcaaattggataagcaagcctggaagtcagagagaaatgtgctgaagtcaaagctatgaggcagtgacgtgagacaggtttgaagattaagtcctgagcactctgtgcttagaggttaaggagataaggagacaccagcaaaggagactgaagaggagtgagcagtaacggaagagagaaaccagcagaccgtttcctgcaggctgggaaagaaagcgaaacaggaaggaagaagtccgaaccacaccagatgctgctggcacgtctgcacgaggactgagaactgacgagtgggtttggcgatgagaacgccggaggggccttggcaagcagttttagcgcagtgaggcgggaagtctgatcggagcgtggaagtagaggaactgaagatggggaatagaggcagcttttcatggtaattttattataaagataaaaaggaagagctttggggcatttgagatctgtgaggcatcaaactgcccagccacctaactccagacacactctaatgtgtgtggtgtaggatttagaagaattctgcttcaggttttgcataaaccatctgactgtagtaacacaaacatcaggttttgcagaaatggaccatgatctcctgaagaactttatcagcaaagcaagcagagttggagcctttaaaaattgatcccatctgcaggaaagtttttgagcctttccatttcccctgcaaaagccagagatgaatcacttctctttaattaatagtatgtatgatgagctatgtttggctgagtacttgtaactgtcagaagaaggatggtggtgagtggtctttgtctgcctaaacccagagtttatgtagaaagcattgaatgttctgatcagatgtgactaaggtcaaggaaaaaaaattgaaatatcttatttaccatttcctctttttgagtcacttaaattggacacctttggtaccctggtctcagtatatgctattctggcccaaatgttccattattcagctggctgataccacatagatagcttgacaaggagtgctgtctgtccttaccacattttcagcactcagcacagtgccttgtgtataataggcactcaatttattataaatcttcagtatgtcctgagaacagctttagtcatggaatactgggagaaggaataactttcacaaaataaacttaaaacagcctgtaattattgaggttcatattcttctggtatatcattctgagaaattgtggctaatttagaacattgtttagaattgacaaaaggccctggcaattaaattgtcaaggcccaagggctaattttaattttctttttacttggagtcattcattaatttctcacatgggattatggagtatgaagtattatctttgaatgaaattcctgggctgatctgccttacataatcacataaggtcctttgcttttctttgtgttaagagggacttgcctctgtaaatgaaaatgacaatgtgcttttcttgtagttgactttcatgtcactcactataaaataggtctcttaacctggcaccagtataactataaagcactagctgagaaggaactgatacttacatttcatggacagcattaacaagaatgagataaatttgtactttttagatcaaaacaaattacctaattgcaaaagagaaactgaaatggaacatagtctcagattcttctaatgtgtatctcacaatgtcatgtaatgtaaaggaaacccttttggaattagaattcttgttctgatgctgaactatttggtaataaagtgcttatttgcagataacagaaaaaatgtgttggggttttttttaatcccaaaacagcagcaaaattataaaatgtcaacctcatgtctcttagatgtacataaataaattggatatattatgctcttatcaagcagttactcggataaagtctcataggaaagcccaccctagaccacaaatagcttataaacaacctaattatcattc

SEQ ID NO: 290878 - DNA, 1793 bp, Homo sapiens
gaggagtatagggcttttaacaattattgaaagtgaaatcaacagttacaaatactgtcactagacaaaggtaccaaggaattcacacactcacatgcctatctctgggaagagctacttaaatttttacaagcatagatgattcatacttgttatactttttatgactattctttaggtattaccatgccatcatttcctccacttgcctattaaatcctttttctttgcctaacttgttttagcgattttcatgctatgttgcattgaattagtaaatatgaatttattaaaccatctttgttgttgttcctaggatttagaagaattctgcttcaggttttgcataaaccatctgactgtagtaacacaaacatcaggttttgcagaaatggaccatgatctcctgaagaactttatcagcaaagcaagcagagttggagcctttaaaaattgatcccatctgcaggaaagtttttgagcctttccatttcccctgcaaaagccagagatgaatcacttctctttaattaatagtatgtatgatgagctatgtttggctgagtacttgtaactgtcagaagaaggatggtggtgagtggtctttgtctgcctaaacccagagtttatgtagaaagcattgaatgttctgatcagatgtgactaaggtcaaggaaaaaaaattgaaatatcttatttaccatttcctctttttgagtcacttaaattggacacctttggtaccctggtctcagtatatgctattctggcccaaatgttccattattcagctggctgataccacatagatagcttgacaaggagtgctgtctgtccttaccacattttcagcactcagcacagtgccttgtgtataataggcactcaatttattataaatcttcagtatgtcctgagaacagctttagtcatggaatactgggagaaggaataactttcacaaaataaacttaaaacagcctgtaattattgaggttcatattcttctggtatatcattctgagaaattgtggctaatttagaacattgtttagaattgacaaaaggccctggcaattaaattgtcaaggcccaagggctaattttaattttctttttacttggagtcattcattaatttctcacatgggattatggagtatgaagtattatctttgaatgaaattcctgggctgatctgccttacataatcacataaggtcctttgcttttctttgtgttaagagggacttgcctctgtaaatgaaaatgacaatgtgcttttcttgtagttgactttcatgtcactcactataaaataggtctcttaacctggcaccagtataactataaagcactagctgagaaggaactgatacttacatttcatggacagcattaacaagaatgagataaatttgtactttttagatcaaaacaaattacctaattgcaaaagagaaactgaaatggaacatagtctcagattcttctaatgtgtatctcacaatgtcatgtaatgtaaaggaaacccttttggaattagaattcttgttctgatgctgaactatttggtaataaagtgcttatttgcagataacagaaaaaatgtgttggggttttttttaatcccaaaacagcagcaaaattataaaatgtcaacctcatgtctcttagatgtacataaataaattggatatattatgctcttatcaagcagttactcggataaagtctcataggaaagcccaccctagaccacaaatagcttataaacaacctaattatcattc

SEQ ID NO: 290879 - DNA, 1363 bp, Homo sapiens
cttcgtttccgtctcggccgggcacccgagcgcatcccgccgaggccgggccgtttcagggggaggcgccaactcatcgcggcgccgggcccctgaccgtgcagtaaccgctacccaggaggcggagcggacaaggctccggcctgcgaggagtcacattaactttgctctagaagacaactttacaaggatctaaaaggaacaggattaaagatgactgaatactgggttccagaaatttaaaacaatcagcttagcaaatcatatattcttctgtggagctgagaattgatgtccgctcttccccgtgatttggaactttccaatcccagagaaaagttgacaaagggactgcccaggactgagtccatatggaagaagaacttcctcttttctctggagacagtggcaagccagtacaggctactctgtcatctttgaagatgttagatgtgggaaagtggccaattttttccctttgttctgaagaagaactacagttaattcgtcaggcttgtgtctttggcagtgctggcaatgaagttttatacactacagtaaatgatgagatttttgtgcttggcacaaactgctgtggctgtttggggttaggtgacgtccagagcaccattgaacctcggagactggattctttaaatggcaaaaaaatagcctgcctcagctatgggagtggtccacatattgtccttgcaacaacagaaggagaagtctttacctggggtcataatgcttatagccagctgggcaatgggacaactaatcatggtttagtgccctgtcatatctctactaatctgtcaaacaaacaagtcattgaagttgcctgtgggtcttaccattctttggtgctaacatctgatggagaggtatttgcctggggttataataactctgggcaggtaggatctggatcaacagttaatcagccaatccctcgaagagtcactggctgcctacaaaataaagtagttgtgaccatagcatgtgggcagatgtgctgcatggcagtagtagacacgggggaggtctatgtctggggttacaacggaaacgggcagcttggactcggcaacagtggcaaccagccaaccccttgcagagtggcagctttgcaaggcatccgtgtccagagggtcgcctgtggctacgcacacacattagtattaacagatgaaggccaagtgtatgcttggggcgccaattcttatgggcagttgggcactggcaataaaagcaaccagtcctatcctactcctgtcactgtggaaaaggacaggtaacacgggcattttcacagtccccacactggtctttggtgattgtgattaaacaggacttagat

SEQ ID NO: 290880 - DNA, 421 bp, Homo sapiens
gggcggcggtgggcagcctagggaggagaggaggggcgagacgccgtcgccagccccctcctcttgtctgcgctcccttcgtttccgtctcggccgggcacccgagcgcatcccgccgaggccgggccgtttcagggggaggcgccaactcatcgcggcgccgggcccctgaccgtgcagtaaccgctacccaggaggcggagcggacaaggctccggcctgcgaggaggtaagagggtggaggagtggtgtgggaggccgagggggatcgcggccgtgacgtgggatgctgtcaggtaccactggggcaggccacccctccccgcccctgcggcccgacctccccgccagagacagctgaggggcccaggggactagagccgcgaccgtgccacaggcctaggcgtcgtcgcgcatgcgt

SEQ ID NO: 290881 - DNA, 454 bp, Homo sapiens
ctcacaaaacaggcttcctccagaggttcctttaagggcagtaaaatttcccagaacttgaacccataactccacactctgagacaagaatttcctctactcctttcaaggataaatgaggcaagaaagcttcaagttgagcttttccaatctgattgcgaacttgatgacaactgaagatacaatgcctggtttttctcagtagttctgctccaacagtctaaaacgcaatcacaaaagacacgttgtttcaaatggaaattctatcctgaaatgattcactccagcacaaactgaaaacccatccccgatggaccttgactaaccgtaatgatctcaatgtctgcaatttcctgtcaaatatgagaacaacatcccaaagtgggagaacagatgaaacaagacggataaaatactgagaagtcttgaatataagtgataggtacctgagagt

SEQ ID NO: 290882 - DNA, 510 bp, Homo sapiens
agaactcacaaaggtttttaggtacaaagaccttcctcatggctttatctgagtggtggggaagtgagggcaacttaggtattcattatcacagatggagaagaaccatatgatagatgctcactctgggaagattggttagtggctcaccaagtctatctccttttcttccaagacacacaaatagactacattttccagtcttcattgcagttaggcacaaccatttgactgaggtctagtcaaagaatatgaatggaaatgatgttgctattccaggcccatgaaaacctctcacacaagatatttatgcctttcaccttctgccaatgcaatgcaggtggatgcgaccatcttggaagccatgttaaagaaggcagagccacaagatagatgcagccgggttctctaaatcaccactggggagaaacccacacaccaatgaggaatacccattttttggattttaagagcaagaaataaacttcaattgtgttcagcaaaatgtgc

SEQ ID NO: 290883 - DNA, 371 bp, Homo sapiens
cactgcctcctcctgcgctttccgcccttcgccgtccctgactggaggaaacctgcaggctctcgtccgccgagctcagaagtgccaggcgctgccaacggccccggagatcctcgcgcattatagtggcctatgagcagaatttgccatgccttccatggagcattctttttccaagtcaggtcaatccagcctgcagctgtggatgcgaccatcttggaagccatgttaaagaaggcagagccacaagatagatgcagccgggttctctaaatcaccactggggagaaacccacacaccaatgaggaatacccattttttggattttaagagcaagaaataaacttcaattgtgttcagcaaaatgtgc

SEQ ID NO: 290884 - DNA, 615 bp, Homo sapiens
gatagataagcactgaaataaaaataatgtttttatttccttaagtcttttttgttctttttatatattatttatttaattttttgagatagcatctcactctgctgcccaggctggagtgcagtggtgccatctaggctcactgcaacctctgcctccccggttcaatcaattctcctgcctcagtctcctgagtagctaagattacaggcatgagccaccttgcccggctaatctttgtatttttagtagtaggggtttctccatgctggtcaggctggtctcaaactcctgacctcaggtgatccgcccaccttggcctcctaaagtgctgggattacaggcgtgagcggacgtgcacccggccttctttttatattttaaaagtaaacctccttttaaaatttttccatgtcactgaaatgatgttgaagagtgaatattctaagagctacacagagatttgtaaacagctgaaccaattttctgctggattattaggctgtttctaaatttttactaagttacaataattataagtagtctgtgcaacagtcaatttctttagtgtaacacatgaacgaaaagctatacacttttttttttttttcagac

SEQ ID NO: 290885 - DNA, 2381 bp, Homo sapiens
gccggctcgggctccgcgagtcctcctttttgcacacacacgaatacaaagagccatacgaccttcggatgccggaaggtccttctgaatcccttccctgttccttaggttgcactagtcgggggttccatgctggggggcagaaggaatgctctctaccgtctgaaaccgttcatcaggaaggccttgatttgtgatgtgctaggagagcacaggatctgcaaatagaaggcacctgtctcccttctgcaggccgaggagaggccgccatggactgtgtgcttcttcatggcttgtttactcttctttcacagaccctacagcttggggcctgggctcctctgaccatcctcattgagaaaggaaagtgagtccagagaagttgatgcttcctacctgttggagcggcccagcagtgtaagcgtggttgttactgccccatccgccatgtccttcagtgccaccattctcttctcccctcccagtggcagcgaggccagatgctgctgctgcgcctgtaagagtgagactaatggaggcaacacaggctcccagggtgggaatcctcctcccagcacccccatcacagtgactggacatggcttggctgttcagagctcagagcagctcctgcatgttatctaccagcgggtcgataaggcagtgggtttggctgaagctgctctgggtcttgccagggccaacaatgagttgttaaaacgtctccaggaggaagtgggtgacctgaggcaagggaaagtgtccatccctgatgaagatggggaaagccgggcacatagttccccacctgaggagcctgggcctctcaaggaaagtcccggggaagcctttaaggctctgtctgccgtggaagaggagtgtgacagcgtgggcagcggcgtgcaggtggtgattgaggagctgcggcagctgggagcagcctcagtggggcctgggcctttgggcttcccagcaactcagagggacatgcggctcccagggtgcacgctggctgccagcgaggcggcccccctgctcaatcctctggtggatgattacgtggcctctgagggtgcagtacagcgagttctggtccctgcttatgccaagcaactctcaccagccacacaactggcaatccagcgggcaaccccagagacaggaccagaaaatggaaccaagctgccaccaccccgccctgaggacatgctcaatgccgctgctgcgctggacagtgccttggaagagtcaggccctgggagcactggggagctgagacactctctagggctgaccgtttccccatgcaggaccagaggaagtgggcagaagaactccaggcgcaagcgggatcttgtactctctaaactggtccacaatgtgcataaccacatcaccaatgacaagagattcaatgggtctgaaagcatcaagtcctcttggaatatttcagtagtgaagtttcttctggaaaagctcaagcaagagctggtgaccagtccccacaattacactgataaggagctaaaaggagcctgtgtggcctacttccttactaagaggcgtgagtaccgcaactccctgaacccctttaaaggcctgaaggaaaaagaggagaagaaacttcgaagtcgccgatatcggctttttgccaaccgatccagtatcatgaggcattttggacctgaggaccaacgtctgtggaatgatgtgacagaggaactgatgtcagatgaagaggacagtcttaacgagccaggtgtgtgggtggcccgccctccccgtttccgggcccagcgcctcacagagctctgctaccacctggatgctaactctaagcatggcaccaaagccaaccgtgtgtatgggcctccctcagacagactgccttctgctgaagcccagctccttccaccagaactttacaatcctaatttccaagaagaggaagatgagggaggggatgagaatgcacctggctccccatcttttgaccaaccccacaaaacctgctgtcctgacttgaactcattcattgaaatcaaggtggaaaaggatgaataaaatctacagccaagaataactctggcttccgccatgccccatgtctcagaaataggtggccatggggcttcacaaaataatgagatgctctgtgcagtctgagaaagcgaatttgcctcttttcttaacacagtctctactggggaagcagaacactggtgggataaaaacttatctagaaggggagaaactccctccactgtgaacagtaagccagaatatgcttattcctcagcataaacagtatctcggagaagcctgggatgagaaaatgaggaggatgggtccaagaaacatgaggccttcttgacataagc

SEQ ID NO: 290886 - DNA, 2135 bp, Homo sapiens
gccggctcgggctccgcgagtcctcctttttgcacacacacgaatacaaagagccatacgaccttcggaccctacagcttggggcctgggctcctctgaccatcctcattgagaaaggaaagtgagtccagagaagttgatgcttcctacctgttggagcggcccagcagtgtaagcgtggttgttactgccccatccgccatgtccttcagtgccaccattctcttctcccctcccagtggcagcgaggccagatgctgctgctgcgcctgtaagagtgagactaatggaggcaacacaggctcccagggtgggaatcctcctcccagcacccccatcacagtgactggacatggcttggctgttcagagctcagagcagctcctgcatgttatctaccagcgggtcgataaggcagtgggtttggctgaagctgctctgggtcttgccagggccaacaatgagttgttaaaacgtctccaggaggaagtgggtgacctgaggcaagggaaagtgtccatccctgatgaagatggggaaagccgggcacatagttccccacctgaggagcctgggcctctcaaggaaagtcccggggaagcctttaaggctctgtctgccgtggaagaggagtgtgacagcgtgggcagcggcgtgcaggtggtgattgaggagctgcggcagctgggagcagcctcagtggggcctgggcctttgggcttcccagcaactcagagggacatgcggctcccagggtgcacgctggctgccagcgaggcggcccccctgctcaatcctctggtggatgattacgtggcctctgagggtgcagtacagcgagttctggtccctgcttatgccaagcaactctcaccagccacacaactggcaatccagcgggcaaccccagagacaggaccagaaaatggaaccaagctgccaccaccccgccctgaggacatgctcaatgccgctgctgcgctggacagtgccttggaagagtcaggccctgggagcactggggagctgagacactctctagggctgaccgtttccccatgcaggaccagaggaagtgggcagaagaactccaggcgcaagcgggatcttgtactctctaaactggtccacaatgtgcataaccacatcaccaatgacaagagattcaatgggtctgaaagcatcaagtcctcttggaatatttcagtagtgaagtttcttctggaaaagctcaagcaagagctggtgaccagtccccacaattacactgataaggagctaaaaggagcctgtgtggcctacttccttactaagaggcgtgagtaccgcaactccctgaacccctttaaaggcctgaaggaaaaagaggagaagaaacttcgaagtcgccgatatcggctttttgccaaccgatccagtatcatgaggcattttggacctgaggaccaacgtctgtggaatgatgtgacagaggaactgatgtcagatgaagaggacagtcttaacgagccaggtgtgtgggtggcccgccctccccgtttccgggcccagcgcctcacagagctctgctaccacctggatgctaactctaagcatggcaccaaagccaaccgtgtgtatgggcctccctcagacagactgccttctgctgaagcccagctccttccaccagaactttacaatcctaatttccaagaagaggaagatgagggaggggatgagaatgcacctggctccccatcttttgaccaaccccacaaaacctgctgtcctgacttgaactcattcattgaaatcaaggtggaaaaggatgaataaaatctacagccaagaataactctggcttccgccatgccccatgtctcagaaataggtggccatggggcttcacaaaataatgagatgctctgtgcagtctgagaaagcgaatttgcctcttttcttaacacagtctctactggggaagcagaacactggtgggataaaaacttatctagaaggggagaaactccctccactgtgaacagtaagccagaatatgcttattcctcagcataaacagtatctcggagaagcctgggatgagaaaatgaggaggatgggtccaagaaacatgaggccttcttgacataagc

SEQ ID NO: 290887 - DNA, 2238 bp, Homo sapiens
gctgtacgcccggattaacgggatcaagagccatacgaccttcggatgccggaaggtccttctgaatcccttccctgttccttaggttgcactagtcgggggttccatgctggggggcagaaggaatgctctctaccgtctgaaaccgttcatcaggaaggccttgatttgtgatgtgctaggagagcacaggatctgcaaatagaaggcacctgtctcccttctgcaggccgaggagaggccgccatggactgtgtgcttcttcatggcttgtttactcttctttcacagaccctacagcttggggcctgggctcctctgaccatcctcattgagaaaggaaagtgagtccagagaagttgatgcttcctacctgttggagcggcccagcagtgtaagcgtggttgttactgccccatccgccatgtccttcagtgccaccattctcttctcccctcccagtggcagcgaggccagatgctgctgctgcgcctgtaagagtgagactaatggaggcaacacaggctcccagggtgggaatcctcctcccagcacccccatcacagtgactggacatggcttggctgttcagagctcagagcagctcctgcatgttatctaccagcgggtcgataaggcagtgggtttggctgaagctgctctgggtcttgccagggccaacaatgagttgttaaaacgtctccaggaggaagtgggtgacctgaggcaagggaaagtgtccatccctgatgaagatggggaaagccgggcacatagttccccacctgaggagcctgggcctctcaaggaaagtcccggggaagcctttaaggctctgtctgccgtggaagaggagtgtgacagcgtgggcagcggcgtgcaggtggtgattgaggagctgcggcagctgggagcagcctcagtggggcctgggcctttgggcttcccagcaactcagagggacatgcggctcccagggtgcacgctggctgccagcgaggcggcccccctgctcaatcctctggtggatgattacgtggcctctgagggtgcagtacagcgagttctggtccctgcttatgccaagcaactctcaccagccacacaactggcaatccagcgggcaaccccagagacaggaccagaaaatggaaccaagctgccaccaccccgccctgaggacatgctcaatgccgctgctgcgctggacagtgccttggaagagtcaggccctgggagcactggggagctgagacactctctagggctgaccgtttccccatgcaggaccagaggaagtgggcagaagaactccaggcgcaagcgggatcttgtactctctaaactggtccacaatgtgcataaccacatcaccaatgacaagagattcaatgggtctgaaagcatcaagtcctcttggaatatttcagtagtgaagtttcttctggaaaagctcaagcaagagctggtgaccagtccccacaattacactgataaggagctaaaaggagcctgtgtggcctacttccttactaagaggcgtgagtaccgcaactccctgaacccctttaaaggcctgaaggaaaaagaggagaagaaacttcgaagtcgccgatatcggctttttgccaaccgatccagtatcatgaggcattttggacctgaggaccaacgtctgtggaatgatgtgacagaggaactgatgtcagatgaagaggacagtcttaacgagccagacagactgccttctgctgaagcccagctccttccaccagaactttacaatcctaatttccaagaagaggaagatgagggaggggatgagaatgcacctggctccccatcttttgaccaaccccacaaaacctgctgtcctgacttgaactcattcattgaaatcaaggtggaaaaggatgaataaaatctacagccaagaataactctggcttccgccatgccccatgtctcagaaataggtggccatggggcttcacaaaataatgagatgctctgtgcagtctgagaaagcgaatttgcctcttttcttaacacagtctctactggggaagcagaacactggtgggataaaaacttatctagaaggggagaaactccctccactgtgaacagtaagccagaatatgcttattcctcagcataaacagtatctcggagaagcctgggatgagaaaatgaggaggatgggtccaagaaacatgaggccttcttgacataagc

SEQ ID NO: 290888 - DNA, 2358 bp, Homo sapiens
gctgtacgcccggattaacgggatcaagagccatacgaccttcggatgccggaaggtccttctgaatcccttccctgttccttaggttgcactagtcgggggttccatgctggggggcagaaggaatgctctctaccgtctgaaaccgttcatcaggaaggccttgatttgtgatgtgctaggagagcacaggatctgcaaatagaaggcacctgtctcccttctgcaggccgaggagaggccgccatggactgtgtgcttcttcatggcttgtttactcttctttcacagaccctacagcttggggcctgggctcctctgaccatcctcattgagaaaggaaagtgagtccagagaagttgatgcttcctacctgttggagcggcccagcagtgtaagcgtggttgttactgccccatccgccatgtccttcagtgccaccattctcttctcccctcccagtggcagcgaggccagatgctgctgctgcgcctgtaagagtgagactaatggaggcaacacaggctcccagggtgggaatcctcctcccagcacccccatcacagtgactggacatggcttggctgttcagagctcagagcagctcctgcatgttatctaccagcgggtcgataaggcagtgggtttggctgaagctgctctgggtcttgccagggccaacaatgagttgttaaaacgtctccaggaggaagtgggtgacctgaggcaagggaaagtgtccatccctgatgaagatggggaaagccgggcacatagttccccacctgaggagcctgggcctctcaaggaaagtcccggggaagcctttaaggctctgtctgccgtggaagaggagtgtgacagcgtgggcagcggcgtgcaggtggtgattgaggagctgcggcagctgggagcagcctcagtggggcctgggcctttgggcttcccagcaactcagagggacatgcggctcccagggtgcacgctggctgccagcgaggcggcccccctgctcaatcctctggtggatgattacgtggcctctgagggtgcagtacagcgagttctggtccctgcttatgccaagcaactctcaccagccacacaactggcaatccagcgggcaaccccagagacaggaccagaaaatggaaccaagctgccaccaccccgccctgaggacatgctcaatgccgctgctgcgctggacagtgccttggaagagtcaggccctgggagcactggggagctgagacactctctagggctgaccgtttccccatgcaggaccagaggaagtgggcagaagaactccaggcgcaagcgggatcttgtactctctaaactggtccacaatgtgcataaccacatcaccaatgacaagagattcaatgggtctgaaagcatcaagtcctcttggaatatttcagtagtgaagtttcttctggaaaagctcaagcaagagctggtgaccagtccccacaattacactgataaggagctaaaaggagcctgtgtggcctacttccttactaagaggcgtgagtaccgcaactccctgaacccctttaaaggcctgaaggaaaaagaggagaagaaacttcgaagtcgccgatatcggctttttgccaaccgatccagtatcatgaggcattttggacctgaggaccaacgtctgtggaatgatgtgacagaggaactgatgtcagatgaagaggacagtcttaacgagccaggtgtgtgggtggcccgccctccccgtttccgggcccagcgcctcacagagctctgctaccacctggatgctaactctaagcatggcaccaaagccaaccgtgtgtatgggcctccctcagacagactgccttctgctgaagcccagctccttccaccagaactttacaatcctaatttccaagaagaggaagatgagggaggggatgagaatgcacctggctccccatcttttgaccaaccccacaaaacctgctgtcctgacttgaactcattcattgaaatcaaggtggaaaaggatgaataaaatctacagccaagaataactctggcttccgccatgccccatgtctcagaaataggtggccatggggcttcacaaaataatgagatgctctgtgcagtctgagaaagcgaatttgcctcttttcttaacacagtctctactggggaagcagaacactggtgggataaaaacttatctagaaggggagaaactccctccactgtgaacagtaagccagaatatgcttattcctcagcataaacagtatctcggagaagcctgggatgagaaaatgaggaggatgggtccaagaaacatgaggccttcttgacataagc

SEQ ID NO: 290889 - DNA, 2046 bp, Homo sapiens
gctgtacgcccggattaacgggatcaagagccatacgaccttcggatgccggaaggtccttctgaatcccttccctgttccttaggttgcactagtcgggggttccatgctggggggcagaaggaatgctctctaccgtctgaaaccgttcatcaggaaggccttgatttgtgatgtgctaggagagcacaggatctgcaaatagaaggcacctgtctcccttctgcaggccgaggagaggccgccatggactgtgtgcttcttcatggcttgtttactcttctttcacagaccctacagcttggggcctgggctcctctgaccatcctcattgagaaaggaaagtgagtccagagaagttgatgcttcctacctgttggagcggcccagcagtgaggaagtgggtgacctgaggcaagggaaagtgtccatccctgatgaagatggggaaagccgggcacatagttccccacctgaggagcctgggcctctcaaggaaagtcccggggaagcctttaaggctctgtctgccgtggaagaggagtgtgacagcgtgggcagcggcgtgcaggtggtgattgaggagctgcggcagctgggagcagcctcagtggggcctgggcctttgggcttcccagcaactcagagggacatgcggctcccagggtgcacgctggctgccagcgaggcggcccccctgctcaatcctctggtggatgattacgtggcctctgagggtgcagtacagcgagttctggtccctgcttatgccaagcaactctcaccagccacacaactggcaatccagcgggcaaccccagagacaggaccagaaaatggaaccaagctgccaccaccccgccctgaggacatgctcaatgccgctgctgcgctggacagtgccttggaagagtcaggccctgggagcactggggagctgagacactctctagggctgaccgtttccccatgcaggaccagaggaagtgggcagaagaactccaggcgcaagcgggatcttgtactctctaaactggtccacaatgtgcataaccacatcaccaatgacaagagattcaatgggtctgaaagcatcaagtcctcttggaatatttcagtagtgaagtttcttctggaaaagctcaagcaagagctggtgaccagtccccacaattacactgataaggagctaaaaggagcctgtgtggcctacttccttactaagaggcgtgagtaccgcaactccctgaacccctttaaaggcctgaaggaaaaagaggagaagaaacttcgaagtcgccgatatcggctttttgccaaccgatccagtatcatgaggcattttggacctgaggaccaacgtctgtggaatgatgtgacagaggaactgatgtcagatgaagaggacagtcttaacgagccaggtgtgtgggtggcccgccctccccgtttccgggcccagcgcctcacagagctctgctaccacctggatgctaactctaagcatggcaccaaagccaaccgtgtgtatgggcctccctcagacagactgccttctgctgaagcccagctccttccaccagaactttacaatcctaatttccaagaagaggaagatgagggaggggatgagaatgcacctggctccccatcttttgaccaaccccacaaaacctgctgtcctgacttgaactcattcattgaaatcaaggtggaaaaggatgaataaaatctacagccaagaataactctggcttccgccatgccccatgtctcagaaataggtggccatggggcttcacaaaataatgagatgctctgtgcagtctgagaaagcgaatttgcctcttttcttaacacagtctctactggggaagcagaacactggtgggataaaaacttatctagaaggggagaaactccctccactgtgaacagtaagccagaatatgcttattcctcagcataaacagtatctcggagaagcctgggatgagaaaatgaggaggatgggtccaagaaacatgaggccttcttgacataagc

SEQ ID NO: 290890 - DNA, 2304 bp, Homo sapiens
gctgtacgcccggattaacgggatcaagagccatacgaccttcggatgccggaaggtccttctgaatcccttccctgttccttaggttgcactagtcgggggttccatgctggggggcagaaggaatgctctctaccgtctgaaaccgttcatcaggaaggccttgatttgtgatgtgctaggagagcacaggatctgcaaatagaaggcacctgtctcccttctgcaggccgaggagaggccgccatggactgtgtgcttcttcatggcttgtttactcttctttcacagaccctacagcttggggcctgggctcctctgaccatcctcattgagaaaggaaagtgagtccagagaagttgatgcttcctacctgttggagcggcccagcagtgtaagcgtggttgttactgccccatccgccatgtccttcagtgccaccattctcttctcccctcccagtggcagcgaggccagatgctgctgctgcgcctgtaagagtgagactaatggaggcaacacaggctcccagggtgggaatcctcctcccagcacccccatcacagtgactggacatggcttggctgttcagagctcagagcagctcctgcatgttatctaccagcgggtcgataaggcagtgggtttggctgaagctgctctgggtcttgccagggccaacaatgagttgttaaaacgtctccaggaggaagtgggtgacctgaggcaagggaaagtgtccatccctgatgaagatggggaaagccgggcacatagttccccacctgaggagcctgggcctctcaaggaaagtcccggggaagcctttaaggctctgtctgccgtggaagaggagtgtgacagcgtgggcagcggcgtgcaggtggtgattgaggagctgcggcagctgggagcagcctcagtggggcctgggcctttgggcttcccagcaactcagagggacatgcggctcccagggtgcacgctggctgccagcgaggcggcccccctgctcaatcctctggtggatgattacgtggcctctgagggtgcagtacagcgagttctggtccctgcttatgccaagcaactctcaccagccacacaactggcaatccagcgggcaaccccagagacaggaccagctgcgctggacagtgccttggaagagtcaggccctgggagcactggggagctgagacactctctagggctgaccgtttccccatgcaggaccagaggaagtgggcagaagaactccaggcgcaagcgggatcttgtactctctaaactggtccacaatgtgcataaccacatcaccaatgacaagagattcaatgggtctgaaagcatcaagtcctcttggaatatttcagtagtgaagtttcttctggaaaagctcaagcaagagctggtgaccagtccccacaattacactgataaggagctaaaaggagcctgtgtggcctacttccttactaagaggcgtgagtaccgcaactccctgaacccctttaaaggcctgaaggaaaaagaggagaagaaacttcgaagtcgccgatatcggctttttgccaaccgatccagtatcatgaggcattttggacctgaggaccaacgtctgtggaatgatgtgacagaggaactgatgtcagatgaagaggacagtcttaacgagccaggtgtgtgggtggcccgccctccccgtttccgggcccagcgcctcacagagctctgctaccacctggatgctaactctaagcatggcaccaaagccaaccgtgtgtatgggcctccctcagacagactgccttctgctgaagcccagctccttccaccagaactttacaatcctaatttccaagaagaggaagatgagggaggggatgagaatgcacctggctccccatcttttgaccaaccccacaaaacctgctgtcctgacttgaactcattcattgaaatcaaggtggaaaaggatgaataaaatctacagccaagaataactctggcttccgccatgccccatgtctcagaaataggtggccatggggcttcacaaaataatgagatgctctgtgcagtctgagaaagcgaatttgcctcttttcttaacacagtctctactggggaagcagaacactggtgggataaaaacttatctagaaggggagaaactccctccactgtgaacagtaagccagaatatgcttattcctcagcataaacagtatctcggagaagcctgggatgagaaaatgaggaggatgggtccaagaaacatgaggccttcttgacataagc

SEQ ID NO: 290891 - DNA, 2219 bp, Homo sapiens
gccggctcgggctccgcgagtcctcctttttgcacacacacgaatacaaagagccatacgaccttcgggtatcctttttccattttttttcctccttaatcttgtgtgtgttttcaaattttttaaaaatagagatctgtagcagtgttgggaccctacagcttggggcctgggctcctctgaccatcctcattgagaaaggaaagtgagtccagagaagttgatgcttcctacctgttggagcggcccagcagtgtaagcgtggttgttactgccccatccgccatgtccttcagtgccaccattctcttctcccctcccagtggcagcgaggccagatgctgctgctgcgcctgtaagagtgagactaatggaggcaacacaggctcccagggtgggaatcctcctcccagcacccccatcacagtgactggacatggcttggctgttcagagctcagagcagctcctgcatgttatctaccagcgggtcgataaggcagtgggtttggctgaagctgctctgggtcttgccagggccaacaatgagttgttaaaacgtctccaggaggaagtgggtgacctgaggcaagggaaagtgtccatccctgatgaagatggggaaagccgggcacatagttccccacctgaggagcctgggcctctcaaggaaagtcccggggaagcctttaaggctctgtctgccgtggaagaggagtgtgacagcgtgggcagcggcgtgcaggtggtgattgaggagctgcggcagctgggagcagcctcagtggggcctgggcctttgggcttcccagcaactcagagggacatgcggctcccagggtgcacgctggctgccagcgaggcggcccccctgctcaatcctctggtggatgattacgtggcctctgagggtgcagtacagcgagttctggtccctgcttatgccaagcaactctcaccagccacacaactggcaatccagcgggcaaccccagagacaggaccagaaaatggaaccaagctgccaccaccccgccctgaggacatgctcaatgccgctgctgcgctggacagtgccttggaagagtcaggccctgggagcactggggagctgagacactctctagggctgaccgtttccccatgcaggaccagaggaagtgggcagaagaactccaggcgcaagcgggatcttgtactctctaaactggtccacaatgtgcataaccacatcaccaatgacaagagattcaatgggtctgaaagcatcaagtcctcttggaatatttcagtagtgaagtttcttctggaaaagctcaagcaagagctggtgaccagtccccacaattacactgataaggagctaaaaggagcctgtgtggcctacttccttactaagaggcgtgagtaccgcaactccctgaacccctttaaaggcctgaaggaaaaagaggagaagaaacttcgaagtcgccgatatcggctttttgccaaccgatccagtatcatgaggcattttggacctgaggaccaacgtctgtggaatgatgtgacagaggaactgatgtcagatgaagaggacagtcttaacgagccaggtgtgtgggtggcccgccctccccgtttccgggcccagcgcctcacagagctctgctaccacctggatgctaactctaagcatggcaccaaagccaaccgtgtgtatgggcctccctcagacagactgccttctgctgaagcccagctccttccaccagaactttacaatcctaatttccaagaagaggaagatgagggaggggatgagaatgcacctggctccccatcttttgaccaaccccacaaaacctgctgtcctgacttgaactcattcattgaaatcaaggtggaaaaggatgaataaaatctacagccaagaataactctggcttccgccatgccccatgtctcagaaataggtggccatggggcttcacaaaataatgagatgctctgtgcagtctgagaaagcgaatttgcctcttttcttaacacagtctctactggggaagcagaacactggtgggataaaaacttatctagaaggggagaaactccctccactgtgaacagtaagccagaatatgcttattcctcagcataaacagtatctcggagaagcctgggatgagaaaatgaggaggatgggtccaagaaacatgaggccttcttgacataagc

SEQ ID NO: 290892 - DNA, 1902 bp, Homo sapiens
gccggctcgggctccgcgagtcctcctttttgcacacacacgaatacaaagagccatacgaccttcggtttcaggtttagctgtgcctcccagtgactataatgacaaggaagctgtaaatgtatttgagttaagcttttgcgagaaaccctacagcttggggcctgggctcctctgaccatcctcattgagaaaggaaagtgagtccagagaagttgatgcttcctacctgttggagcggcccagcagtgaggaagtgggtgacctgaggcaagggaaagtgtccatccctgatgaagatggggaaagccgggcacatagttccccacctgaggagcctgggcctctcaaggaaagtcccggggaagcctttaaggctctgtctgccgtggaagaggagtgtgacagcgtgggcagcggcgtgcaggtggtgattgaggagctgcggcagctgggagcagcctcagtggggcctgggcctttgggcttcccagcaactcagagggacatgcggctcccagggtgcacgctggctgccagcgaggcggcccccctgctcaatcctctggtggatgattacgtggcctctgagggtgcagtacagcgagttctggtccctgcttatgccaagcaactctcaccagccacacaactggcaatccagcgggcaaccccagagacaggaccagaaaatggaaccaagctgccaccaccccgccctgaggacatgctcaatgccgctgctgcgctggacagtgccttggaagagtcaggccctgggagcactggggagctgagacactctctagggctgaccgtttccccatgcaggaccagaggaagtgggcagaagaactccaggcgcaagcgggatcttgtactctctaaactggtccacaatgtgcataaccacatcaccaatgacaagagattcaatgggtctgaaagcatcaagtcctcttggaatatttcagtagtgaagtttcttctggaaaagctcaagcaagagctggtgaccagtccccacaattacactgataaggagctaaaaggagcctgtgtggcctacttccttactaagaggcgtgagtaccgcaactccctgaacccctttaaaggcctgaaggaaaaagaggagaagaaacttcgaagtcgccgatatcggctttttgccaaccgatccagtatcatgaggcattttggacctgaggaccaacgtctgtggaatgatgtgacagaggaactgatgtcagatgaagaggacagtcttaacgagccaggtgtgtgggtggcccgccctccccgtttccgggcccagcgcctcacagagctctgctaccacctggatgctaactctaagcatggcaccaaagccaaccgtgtgtatgggcctccctcagacagactgccttctgctgaagcccagctccttccaccagaactttacaatcctaatttccaagaagaggaagatgagggaggggatgagaatgcacctggctccccatcttttgaccaaccccacaaaacctgctgtcctgacttgaactcattcattgaaatcaaggtggaaaaggatgaataaaatctacagccaagaataactctggcttccgccatgccccatgtctcagaaataggtggccatggggcttcacaaaataatgagatgctctgtgcagtctgagaaagcgaatttgcctcttttcttaacacagtctctactggggaagcagaacactggtgggataaaaacttatctagaaggggagaaactccctccactgtgaacagtaagccagaatatgcttattcctcagcataaacagtatctcggagaagcctgggatgagaaaatgaggaggatgggtccaagaaacatgaggccttcttgacataagc

SEQ ID NO: 290893 - DNA, 378 bp, Homo sapiens
tcatgattgtcatgattgttaatgtcaacaaaaagtggtatcagttaaaaaaaaatacaacactacattgaaagtagcaataactggattctgctgttattcctctgaccttgaaaaagacatataacttctccacatgtctcttctctggacctggagtaatatgtttcctagtgctgttgagtagatgaggtaacttatgtgaagtgttctgaacaccttaaggaacaatgtcaaagcaatgaaatgcagtaccattattacagtaaagatggtgaggaggaggaggagacagatctacattttcttccttaatcttctaatctttccagatgccggaaggtccttctgaatcccttccctgttccttaggttgca

SEQ ID NO: 290894 - DNA, 349 bp, Homo sapiens
cagagggacatgcggctcccagggtgcacgctggctgccagcgaggcggcccccctgctcaatcctgtgagtatggcagcagagggctattcctcctaggtgcttttcctggcttttcactctttttcctttctgttcttttctttccatctttaaaccttttgtttgtatttgtgataaagcaaaacagtaccacgtttccttttccttcagggatagtcagctctattttcttcctgaaccatcagcttctttggcagaaggtcattttttgctgtgtgtagtgatggggtgcccttccctctctctcagtagctccgcatggcaccttctcttccacagctgtctc

SEQ ID NO: 290895 - DNA, 521 bp, Homo sapiens
tgaggaactgaatctttcctttcattttaattaatttaaatttaaatggccacatgtggctagtggctaccatattggacagcacagctctagatgcatttcaggtgttattcccatgagattcccaaataaacttcctgcatgcaaatctccatctcagcatctgtttccctgaggaggaaccaacctaaaatgaattgcaaattaaaatctcaaagtgagtcaaagcaaccagaatttcccttcccaagaggggaccagccccatacccatgaggaaaggatgctacacagagaagccaagaagagtctgcatggataggccttactggcttcctcacctgagtgtatcaccattaattagatgatacctctttgtccaatcacatttctacatggctgtccccagtttaaggacaaaaacagacagtctccccttgagtctttgagtcttcatttttgaaggcttccatgtcacaaaaaaatctttgattaaataaattgatgtttttctcttgtaaa

SEQ ID NO: 290896 - DNA, 410 bp, Homo sapiens
tgaggaactgaatctttcctttcattttaattaatttaaatttaaatggccacatgtggctagtggctaccatattggacagcacagctctagatgcatttcaggtgttattcccatgagattcccaaataaacttcctgcatgcaaatctccatctcagcatctgtttccctgaggaggaaccaacctaaaatgaattgcaaattaaaatctcaaagtgagtcaaagcaaccagaatttcccttcccaaggagtatcagctgtgacccttatgatgggtgagggcatgtcggtgatgaaactatcactactgttcaaggtgccagaagtttgacttaccatcgcttttgaacaatcatcactacatgtcagcgtgggaaaaagaataaaataacatcttaatattatta

SEQ ID NO: 290897 - DNA, 1164 bp, Homo sapiens
ccaaacctgagactgggtgactcttgcctaggctcacagatcgagccttcccagtgttgcactgggaccctagggtggccctggggtgcccaagagatgcgcaagcatctcgcgccttccaagcgatcagcgaggaaaaacggggtccaaattcgagtagaatctgcgggttgcgggaagatggcctgcgagtgcggtgggggacaataccctagggccccgtgcgccctcgctttcccggggcactctcaccatttgtagcctctgccgcgcttgaacttgagggtgagcgcagtctccaggaagagcaagaggttgagcagcgcaagcagccagtaccgcggctccttcttcacctcggtcactcgccagaccccgaccagcgagtgcagcaggaacagcaaccgagtggccagggcgttaaggaagaccagtccctccatgctggccggagcactctgcctacgtccccttgcctgcgcccccaggaccctgccgggcgtgcccggagcccaccggtgagcaggaatatgacaagcactgagacctgctgctgcttgtggtcccttctcaccctcagcgcccgatgccggtagaactggtgcgcggctcgcccctcccccaaacttcctgagaactcttcaaagagggttgtgatttgaagagtaaccttcttcagaaaactgtggagacttcacagaaatggcagaagctagttgaagtctacaaattacctaatggaacagggtgttattcccatgagattcccaaataaacttcctgcatgcaaatctccatctcagcatctgtttccctgaggaggaaccaacctaaaatgaattgcaaattaaaatctcaaagtgagtcaaagcaaccagaatttcccttcccaagaggggaccagccccatacccatgaggaaaggatgctacacagagaagccaagaagagtctgcatggataggccttactggcttcctcacctgagtgtatcaccattaattagatgatacctctttgtccaatcacatttctacatggctgtccccagtttaaggacaaaaacagacagtctccccttgagtctttgagtcttcatttttgaaggcttccatgtcacaaaaaaatctttgattaaataaattgatgtttttctcttgtaaa

SEQ ID NO: 290898 - DNA, 446 bp, Homo sapiens
ggtattcggagaccttcagaagcctggtcacggagggcctgcccagggacccccctgcctctccccccaggccccacggcggcagagactcacaggcaaagaactgccagggctggtaggtgcggccgaagtccatggaccgctccagcacccagaggtccggccgggacaggggccctggacagctgtcctcgagggcctggtggctgcacagatggtcacaggaagggaagcccgcgctggaggactcccatctgtctctgacctggtcgcggctcccagggccacaccggccgccctcgccatgacccggagcgagcgcagacccctggcttcgggaccgcccttccccctccacgccccgctcagctcagctgccagtgctgacctttccgctgctacatggttctgtgcagaaagaaaaaaaaaagtcttttaaagcaaaa

SEQ ID NO: 290899 - DNA, 699 bp, Homo sapiens
cggaagcggagaggcggtcgggatccgctgcgcgagctgtctcggtcccacgtgtgcggtgagtgtggcaggctcagcggtcgctcagccccctgagtagctgggattacatgtttgcaacaccaccatgcccagctaaattttgtatttttagtagagatggggtttggtcttgaactcctgacctcaggtaatccacctgcctcagcctcccaaagtgctgggattacaggtgtgagccaccatgcaagcctctaagtaactttggaaaagtattttgaatggatacaaaaaagaattgtacgtcaacactgtactgtcattgtaaatttatttctcacggggtacaggttagcaattctgaaactatgcatgtatagtagggtggaatatgtgtataaataaattgtagatggtgggaagcaggttgctcactgtcagagaaggaagttacaaatgagcaagaggagatgcctggaggaaaatatgtggtgcttgattagatttggaaacatcagtatgagcttcaagttattgtaatagatataaaaataaatataggtatgtgcatatgcataagttaatatacatatatgtgtttcctgaatctgtctgccgaaaggacatagaaacagggacacctcagtgacaacaagtgcgcctagcactcagatcttggtttttaaataccattctcaa

SEQ ID NO: 290900 - DNA, 2182 bp, Homo sapiens
cggaagcggagaggcggtcgggatccgctgcgcgagctgtctcggtcccacgtgtgcgagttgctacgatggaagttaaagggaaaaagcaattcacaggaaagagtacaaagacagcacaagaaaaaaacagatttcataaaaatagtgattctggttcttcaaagacatttccaacaaggaaagttgctaaagaaggtggacctaaagtcacatctaggaactttgagaaaagtatcacaaaacttgggaaaaagggtgtaaagcagttcaagaataagcagcaaggggacaaatcaccaaagaacaaattccagccggcaaataaattcaacaagaagagaaaattccagccagatggtagaagcgatgaatcagcagccaagaagcccaaatgggatgacttcaaaaagaagaagaaagaactgaagcaaagcagacaactcagtgataaaaccaactatgacattgttgttcgggcaaagcagatgtgggagattttaagaagaaaagactgtgacaaagaaaaaagagtaaagttaatgagtgatttgcagaagttgattcaagggaaaattaaaactattgcatttgcacacgattcaactcgtgtgatccagtgttacattcagtatggtaatgaagaacagagaaaacaggcttttgaagaattgcgagatgatttggttgagttaagtaaagccaaatattcgagaaatattgttaagaaatttctcatgtatggaagtaaaccacagattgcagagataatcagaagttttaaaggccacgtgaggaagatgctgcggcatgcggaagcatcagccatcgtggagtacgcatacaatgacaaagccattttggagcagaggaacatgctgacggaagagctctatgggaacacatttcagctttacaagtcagcagatcaccgaactctggacaaagtgttagaggtacagccagaaaaattagaacttattatggatgaaatgaaacagattctaactccaatggcccaaaaggaagctgtgattaagcactcattggtgcataaagtattcttggacttttttacctatgcaccccccaaactcagatcagaaatgattgaagccatccgcgaagcggtggtctacctggcacacacacacgatggcgccagagtggccatgcactgcctgtggcatggcacgcccaaggacaggaaagtgattgtgaaaacaatgaagacttatgttgaaaaggtggctaatggccaatactcccatttggttttactggcggcatttgattgtattgatgatactaagcttgtgaagcagataatcatatcagaaattatcagttcattgcctagcatagtaaatgacaaatatggaaggaaggtcctattgtacttactaagccccagagatcctgcacatacagtacgagaaatcattgaagttctgcaaaaaggagatggaaatgcacacagtaagaaagatacagaggtccgcagacgggagctcctagaatccatttctccagctttgttaagctacctgcaagaacacgcccaagaagtggtgctagataagtctgcgtgtgtgttggtgtctgacattctgggatctgccactggagacgttcagcctaccatgaatgccatcgccagcttggcagcaacaggactgcatcctggtggcaaggacggagagcttcacattgcagaacatcctgcaggacatctagttctgaagtggttaatagagcaagataaaaagatgaaagaaaatgggagagaaggttgttttgcaaaaacacttgtagagcatgttggtatgaagaacctgaagtcctgggctagtgtaaatcgaggtgccattattctttctagcctcctccagagttgtgacctggaagttgcaaacaaagtcaaagctgcactgaaaagcttgattcctacattggaaaaaaccaaaagcaccagcaaaggaatagaaattctacttgaaaaactgagcacataggtggaaagagttaagagcaagatggaatgattttttctgttctctgttctgtttcccaatgcagaaaagaaggggtagggtccaccatactggtaattggggtactctgtatatgtgtttcttctttgtatacgaatctatttatataaattgtttttttaaatggt

SEQ ID NO: 290901 - DNA, 2221 bp, Homo sapiens
cggaagcggagaggcggtcgggatccgctgcgcgagctgtctcggtcccacgtgtgcgagttgctacgatggaagttaaagggaaaaagcaattcacaggaaagagtacaaagacagcacaagaaaaaaacagatttcataaaaatagtgattctggttcttcaaagacatttccaacaaggaaagttgctaaagaaggtggacctaaagtcacatctaggaactttgagaaaagtatcacaaaacttgggaaaaagggtgtaaagcagttcaagaataagcagcaaggggacaaatcaccaaagaacaaattccagccggcaaataaattcaacaagaagagaaaattccagccagatggtagaagcgatgaatcagcagccaagaagcccaaatgggatgacttcaaaaagaagaagaaagaactgaagcaaagcagacaactcagtgataaaaccaactatgacattgttgttcgggcaaagcagatgtgggagattttaagaagaaaagactgtgacaaagaaaaaagagtaaagttaatgagtgatttgcagaagttgattcaagggaaaattaaaactattgcatttgcacacgattcaactcgtgtgatccagtgttacattcagtatggtaatgaagaacagagaaaacaggcttttgaagaattgcgagatgatttggttgagttaagtaaagccaaatattcgagaaatattgttaagaaatttctcatgtatggaagtaaaccacagattgcagagataatcagaagttttaaaggccacgtgaggaagatgctgcggcatgcggaagcatcagccatcgtggagtacgcatacaatgacaaagccattttggagcagaggaacatgctgacggaagagctctatgggaacacatttcagctttacaagtcagcagatcaccgaactctggacaaagtgttagaggtacagccagaaaaattagaacttattatggatgaaatgaaacagattctaactccaatggcccaaaaggaagctgtgattaagcactcattggtgcataaagtattcttggacttttttacctatgcaccccccaaactcagatcagaaatgattgaagccatccgcgaagcggtggtctacctggcacacacacacgatggcgccagagtggccatgcactgcctgtggcatggcacgcccaaggacaggaaagtgattgtgaaaacaatgaagacttatgttgaaaaggtggctaatggccaatactcccatttggttttactggcggcatttgattgtattgatgatactaagcttgtgaagcagataatcatatcagaaattatcagttcattgcctagcatagtaaatgacaaatatggaaggaaggtcctattgtacttactaagccccagagatcctgcacatacagtacgagaaatcattgaagttctgcaaaaaggagatggaaatgcacacagtaagaaagatacagaggtccgcagacgggagctcctagaatccatttctccagctttgttaagctacctgcaagaacacgcccaagaagtggtgctagataagtctgcgtgtgtgttggtgtctgacattctgggatctgccactggagacgttcagcctaccatgaatgccatcgccagcttggcagcaacaggactgcatcctggtggcaaggacggagagcttcacattgcagaacatcctgcaggacatctagttctgaagtggttaatagagcaagataaaaagatgaaagaaaatgggagagaaggttgttttgcaaaaacacttgtagagcatgttggtatgaagaacctgaagtcctgggctagtgtaaatcgaggtgccattattctttctagcctcctccagagttgtgacctggaagttgcaaacaaagtcaaagctgcactgaaaagcttgattcctacattggaaaaaaccaaaagcaccagcaaaggaatagaaattctacttgaaaaactgagcacataggtggaaagagttaagagcaagatggaatgattttttctgttctctgttctgtttcccaatgcagaaaagaagggaacatccagtcatcaagttccaatgtgttgggcgtgaagtcatcattagacaggatgacctttcatcacttggaatatgatcagagaagcagaatttgcctagctcattcagaagaacatcgtatcatcctg

SEQ ID NO: 290902 - DNA, 1964 bp, Homo sapiens
cggaagcggagaggcggtcgggatccgctgcgcgagctgtctcggtcccacgtgtgcgagttgctacgatggaagttaaagggaaaaagcaattcacaggaaagagtacaaagacagcacaagaaaaaaacagatttcataaaaatagtgattctggttcttcaaagacatttccaacaaggaaagttgctaaagaaggtggacctaaagtcacatctaggaactttgagaaaagtatcacaaaacttgggaaaaagggtgtaaagcagttcaagaataagcagcaaggggacaaatcaccaaagaacaaattccagccggcaaataaattcaacaagaagagaaaattccagccagatggtagaagcgatgaatcagcagccaagaagcccaaatgggatgacttcaaaaagaagaagaaagaactgaagcaaagcagacaactcagtgataaaaccaactatgacattgttgttcgggcaaagcagatgtgggagattttaagaagaaaagactgtgacaaagaaaaaagagtaaagttaatgagtgatttgcagaagttgattcaagggaaaattaaaactattgcatttgcacacgattcaactcgtgtgatccagtgttacattcagtatggtaatgaagaacagagaaaacaggcttttgaagaattgcgagatgatttggttgagttaagtaaagccaaatattcgagaaatattgttaagaaatttctcatgtatggaagtaaaccacagattgcagagataatcagaagttttaaaggccacgtgaggaagatgctgcggcatgcggaagcatcagccatcgtggagtacgcatacaatgacaaagccattttggagcagaggaacatgctgacggaagagctctatgggaacacatttcagctttacaagtcagcagatcaccgaactctggacaaagtgttagaggtacagccagaaaaattagaacttattatggatgaaatgaaacagattctaactccaatggcccaaaaggaagctgtgattaagcactcattggtgcataaagtattcttggacttttttacctatgcaccccccaaactcagatcagaaatgattgaagccatccgcgaagcggtggtctacctggcacacacacacgatggcgccagagtggccatgcactgcctgtggcatggcacgcccaaggacaggaaagtgattgtgaaaacaatgaagacttatgttgaaaaggtggctaatggccaatactcccatttggttttactggcggcatttgattgtattgatgatactaagcttgtgaagcagataatcatatcagaaattatcagttcattgcctagcatagtaaatgacaaatatggaaggaaggtcctattgtacttactaagccccagagatcctgcacatacagtacgagaaatcattgaagttctgcaaaaaggagatggaaatgcacacagtaagaaagatacagaggtccgcagacgggagctcctagaatccatttctccagctttgttaagctacctgcaagaacacgcccaagaagtggtgctagataagtctgcgtgtgtgttggtgtctgacattctgggatctgccactggagacgttcagcctaccatgaatgccatcgccagcttggcagcaacaggactgcatcctggtggcaaggacggagagcttcacattgcagaacatcctgcaggacatctagttctgaagtggttaatagagcaagataaaaagatgaaagaaaatgggagagaaggttgttttgcaaaaacacttgtagagcatgttggtatgaagaacctgaagtcctgggctagtgtaaatcgaggtgccattattctttctagcctcctccagagttgtgacctggaagttgtaaacaaagacacaacacacacatgcacacacagcacacacacgcgaacacag

SEQ ID NO: 290903 - DNA, 1646 bp, Homo sapiens
cggaagcggagaggcggtcgggatccgctgcgcgagctgtctcggtcccacgtgtgcgagttgctacgatggaagttaaagggaaaaagcaattcacaggaaagagtacaaagacagcacaagaaaaaaacagatttcataaaaatagtgattctggttcttcaaagacatttccaacaaggaaagttgctaaagaaggtggacctaaagtcacatctaggaactttgagaaaagtatcacaaaacttgggaaaaagggtgtaaagcagttcaagaataagcagcaaggggacaaatcaccaaagaacaaattccagccggcaaataaattcaacaagaagagaaaattccagccagatggtagaagcgatgaatcagcagccaagaagcccaaatgggatgacttcaaaaagaagaagaaagaactgaagcaaagcagacaactcagtgataaaaccaactatgacattgttgttcgggcaaagcagatgtgggagattttaagaagaaaagactgtgacaaagaaaaaagagtaaagttaatgagtgatttgcagaagttgattcaagggaaaattaaaactattgcatttgcacacgattcaactcgtgtgatccagtgttacattcagtatggtaatgaagaacagagaaaacaggcttttgaagaattgcgagatgatttggttgagttaagtaaagccaaatattcgagaaatattgttaagaaatttctcatgtatggaagtaaaccacagattgcagagataatcagaagttttaaaggccacgtgaggaagatgctgcggcatgcggaagcatcagccatcgtggagtacgcatacaatgacaaagccattttggagcagaggaacatgctgacggaagagctctatgggaacacatttcagctttacaagtcagcagatcaccgaactctggacaaagtgttagaggtacagccagaaaaattagaacttattatggatgaaatgaaacagattctaactccaatggcccaaaagtaagaaagttgtttttgttttgttcttaagaaatgacattcaaaggaggaaggttttccataactgttgcccagaagaggtagctatttcctgcttacaagtattaatctattctaaataagagtgcaaaagtgttggtttgaaaccattcttggtgcaaaaggagatttctttttctgatattgtaccctataaaatgataactaacatgcattcgtgatttatgagcttttttaagcaatgaaacattctttccccaaataaaatgttacatggaagccatgtatactaaacagtttcacaaatataatctgttactcaaatttggttgtaggcaaggtacagtggctcacgcctataattctagcactttggggaaccaagctgggagaatcacttgaggccaggagttcaagaccatctggggcaatagcaagaccccatctctacgaaaaaataagaaaattagccaggctttatggcatgtgtgtatagtcttggctacttgggaggctgagaggcaggaggctcactggagcccaggaggtcatggctgcagtgagccatggttgtgccactgcattccagcctaggcaacagagtgagaccttgccttaaaaa

SEQ ID NO: 290904 - DNA, 584 bp, Homo sapiens
ttagtgtcactgtggcttgacatgtacagtagtctggaggaagctcttttcggttgagagatatggacccaagttttgatgccctctaatttaactactgtatgagacatacaatgaatgtgataggattttttttttttttcccggggggctccggtgcagttttccatttgatgtctttttccgaacatccagtcatcaagttccaatgtgttgggcgtgaagtcatcattagacagtgagtctctgaagacttatttaatcttgtgtgtaaatatacttgtggaatatttgaattaattgcttaaataatattggattggtgtcaggagttaataaggtactggcatgaacagtggggttcgttgtcattaaaacgcatggataaatcaatgtaacaattctcataagggagtcactttatgttttctaaagtggtgtggatcataaggagctaagggcaacaccttaggccaggtgtaatcctggggttacagtaagggtttggcgggtcctaattttagaaggccattggttcattcaaccttggctgaagacggggggtactggggataataataata

SEQ ID NO: 290905 - DNA, 1102 bp, Homo sapiens
gaatgggatctgttttccatcaatgtgatttattttgtgaatgtcttaagttgggtcctagaagcggagtctgagacaaggattctggggtaagtgatttattgagggaggctctcaggagaaaccaagaaggaggtgagggaagcgagggaggtacagcagaggaataaactcagcaaagatgcggggtcggctgatgtccagcctcggcctgattccaggcagctctggatatgaatggcaccaccgaagttgtcccaccttgaggcaagggggcctgtcatcagctgtgggctacccctggtcaggcaaggcataaccaccgggcattttcagcaatagcaactgtgagctgtttagtagtcaatgctctgagcagctgcaggctggctctcctaaaggtctcccaagcagaggaagagaaatcatagcgacggattcttaagggtgaaaaagacggcggtcccacagaatctggctacatccctctggaacatttgcattttgataaaggacttgcttttggagctaaggagtgaatcatttattgcaaattatgtggcattttcagaagaagtaaaataatatatagaaatgtacacaaaggaaagtcatatctgcaaacgagtcccttatctgccaagcctctcctctaccattgtaattaaccactgttattagctcctcctgtaactttcctgagtttctttacccatatataagcaaacatgaatgtgtgtattcttgctgtccactgtttcttcttcttttagcattttaattagcagatagcatattatacatactgtttggaactttgcatttttcttttttttaattttaaattttaagtgttgtgggtacatagtaggtgtatatgcatttttcttttaatagtacatctagtggttctttccaaaatagtacaaaaaagtgttctcatacaaaaaaattagccgggcatggtggtgtgtacctgtaatcccagctacttgggaggctgaggcaagagaatcgcttgaaactgggaggcaggggttggagtgagccaagactgtgacactgcactccagcctgggcaacagagtggactccatcgcaa

SEQ ID NO: 290906 - DNA, 2252 bp, Homo sapiens
gaccttatgaaactttttccccggcgtggtctcactcgcgatttaaggcataggtgtcgccgagccgggaggctgggagtcgccaggcgtgcgggggagaggcctgggccgcgccgcggcggggggtggaggaagagggcaggcgaggcgggaaggtgggctctggccgccgggagccggggacggagccgccgccgttgcccctagcggggagcagccgggaggagggggccgcagtcgggagaggggaccccaccatgcccaaagtcttcctggtgaagaggaggagcctgggggtctcggtccgcagctgggatgagctcccggatgagaaaagggcagacacctacatcccagtgggcctaggccgcctgctccacgacccccccgaggactgccgcagcgacggcggcagcagcagcggcagcggcagcagcagcgcgggggagcctggaggagcagagagcagctcgtccccgcacgcccccgagagcgaaacccccgagcccggcgacgccgagggccccgatggacacctggcgaccaagcagcgcccggtcgccagatcgaaaatcaagttcaccacaggcacgtgcagcgactcggtggttcacagctgtgacctgtgtggcaagggcttccgtctgcagcgcatgctgaaccgtcacctcaagtgccacaaccaggtgaaaagacacctgtgcaccttctgcggcaagggcttcaacgacaccttcgacctgaagaggcacgtccgcacacacacaggcattcgtccctacaaatgcaacgtctgcaataaagccttcacccagcgctgctctctggagtcccacctgaagaaaatccatggggtgcagcagcagtatgcctataagcagcggcgggacaagctctacgtctgcgaggattgcggctacacgggccccacccaggaggacctgtacctgcacgtgaacagtgcccatccgggcagctcgtttctcaaaaagacatctaaaaaactggcagcccttctgcagggcaagctgacatccgcacaccaggagaataccagcctgagtgaggaggaggagaggaagtgaggagaaggaaggggaggacagacgttcacactgccacgtatgtctacgtggatttttggttttcagcttcccccaccccactggctcttcttaattagaagtgaccagttcacctctgtgtccttttgaaacatcagcagtagggtccattccaagattgtcagttaccgttagtgacgtcaggccctgtaacctgtgtcctgtctggcgcagttgctcacattcaccaaagtttgttttcatgatcctgatggccaagaacaccgtgtgggatttttttttcccccaaggattttcacacacggaaggagaggtatttcttagagagatcatcattttatggtgccttgaaataaaaatacttctacttgaaatgctgtttaagcaaggcaagtgaattttgttattctgaaagagtttacagaaactattttaataaatgaaatgttcttgtgaagcttttaaaagcaaaatggaacattgacctacagctctctgttcagggcttattgtgtgatgtttaacttcaggttattgaggtggggaggttgattactttatattagttgtgtgggtttgaagaagcagatcttcctctctttttttgtttttgagacaagttctcactctgtcacccaggctggagtacagtggcatgatcatggctcactgcaaccttgacctcccaggctcaggtaatcttcccacttcagcctcccgagtagctgggactataggtgtgtgccactatgcccagctaatttttgtattttttgtagagatggggttttgctagaatgtgtgtattcttgctgtccactgtttcttcttcttttagcattttaattagcagatagcatattatacatactgtttggaactttgcatttttcttttttttaattttaaattttaagtgttgtgggtacatagtaggtgtatatgcatttttcttttaatagtacatctagtggttctttccaaaatagtacaaaaaagtgttctcatacaaaaaaattagccgggcatggtggtgtgtacctgtaatcccagctacttgggaggctgaggcaagagaatcgcttgaaactgggaggcaggggttggagtgagccaagactgtgacactgcactccagcctgggcaacagagtggactccatcgcaa

SEQ ID NO: 290907 - DNA, 1463 bp, Homo sapiens
gaccttatgaaactttttccccggcgtggtctcactcgcgatttaaggcataggtgtcgccgagccgggaggctgggagtcgccaggcgtgcgggggagaggcctgggccgcgccgcggcggggggtggaggaagagggcaggcgaggcgggaaggtgggctctggccgccgggagccggggacggagccgccgccgttgcccctagcggggagcagccgggaggagggggccgcagtcgggagaggggaccccaccatgcccaaagtcttcctggtgaagaggaggagcctgggggtctcggtccgcagctgggatgagctcccggatgagaaaagggcagacacctacatcccagtgggcctaggccgcctgctccacgacccccccgaggactgccgcagcgacggcggcagcagcagcggcagcggcagcagcagcgcgggggagcctggaggagcagagagcagctcgtccccgcacgcccccgagagcgaaacccccgagcccggcgacgccgagggccccgatggacacctggcgaccaagcagcgcccggtcgccagatcgaaaatcaagttcaccacaggcacgtgcagcgactcggtggttcacagctgtgacctgtgtggcaagggcttccgtctgcagcgcatgctgaaccgtcacctcaagtgccacaaccaggtgaaaagacacctgtgcaccttctgcggcaagggcttcaacgacaccttcgacctgaagaggcacgtccgcacacacacaggcattcgtccctacaaatgcaacgtctgcaataaagccttcacccagcgctgctctctggagtcccacctgaagaaaatccatggggtgcagcagcagtatgcctataagcagcggcgggacaagctctacgtctgcgaggattgcggctacacgggccccacccaggaggacctgtacctgcacgtgaacagtgcccatccgggcagctcgtttctcaaaaagacatctaaaaaactggcagcccttctgcagggcaagctgacatccgcacaccaggagaataccagcctgagtgaggaggaggagaggaagtgaggagaaggaaggggaggacagacgttcacactgccacgtatgtctacgtggatttttggttttcagcttcccccaccccactggctcttcttaattagaagtgaccagttcacctctgtgtccttttgaaacatcagcagtagggtccattccaagattgtcagttaccgttagtgacgtcaggccctgtaacctgtgtcctgtctggcgcagttgctcacattcaccaaagtttgttttcatgatcctgatggccaagaacaccgtgtgggatttttttttcccccaaggattttcacacacggaaggagaggtatttcttagagagatcatcattttatggtgccttgaaataaaaatacttctacttgaaatgct

SEQ ID NO: 290908 - DNA, 1267 bp, Homo sapiens
ctccagggcatccctgaccagacgcgcccccgcagcacccggcagctggcacacgtctgacgacctcctggaggagggcgaccgcagcgacacaagaggctgtgccggttgtcctgggcgcacccgaacaaggccttgggaagggcagcgcgccccgcaactgggcctaggccgcctgctccacgacccccccgaggactgccgcagcgacggcggcagcagcagcggcagcggcagcagcagcgcgggggagcctggaggagcagagagcagctcgtccccgcacgcccccgagagcgaaacccccgagcccggcgacgccgagggccccgatggacacctggcgaccaagcagcgcccggtcgccagatcgaaaatcaagttcaccacaggcacgtgcagcgactcggtggttcacagctgtgacctgtgtggcaagggcttccgtctgcagcgcatgctgaaccgtcacctcaagtgccacaaccaggtgaaaagacacctgtgcaccttctgcggcaagggcttcaacgacaccttcgacctgaagaggcacgtccgcacacacacaggcattcgtccctacaaatgcaacgtctgcaataaagccttcacccagcgctgctctctggagtcccacctgaagaaaatccatggggtgcagcagcagtatgcctataagcagcggcgggacaagctctacgtctgcgaggattgcggctacacgggccccacccaggaggacctgtacctgcacgtgaacagtgcccatccgggcagctcgtttctcaaaaagacatctaaaaaactggcagcccttctgcagggcaagctgacatccgcacaccaggagaataccagcctgagtgaggaggaggagaggaagtgaggagaaggaaggggaggacagacgttcacactgccacgtatgtctacgtggatttttggttttcagcttcccccaccccactggctcttcttaattagaagtgaccagttcacctctgtgtccttttgaaacatcagcagtagggtccattccaagattgtcagttaccgttagtgacgtcaggccctgtaacctgtgtcctgtctggcgcagttgctcacattcaccaaagtttgttttcatgatcctgatggccaagaacaccgtgtgggatttttttttcccccaaggattttcacacacggaaggagaggtatttcttagagagatcatcattttatggtgccttgaaataaaaatacttctacttgaaatgct

SEQ ID NO: 290909 - DNA, 554 bp, Homo sapiens
accaggcggttgtgtccccaagggccattcagggcggaagggaacagggaaaaccgctgtgttgattcccgggccctgtaggctgggagcgcggagggtcaggttacagacagttcaccacaggcacgtgcagcgactcggtggttcacagctgtgacctgtgtggcaagggcttccgtctgcagcgcatgctgaaccgtcacctcaagtgccacaaccaggtgaaaagacacctgtgcaccttctgcggcaagggcttcaacgacaccttcgacctgaagaggcacgtccgcacacacacagaagtcctcgcagagaatggctgaggctgattgggacgcattaactggggctctggtgagccgactgagctgagtcccctgcagtgcctgtatgacctgcaccaacgtgggaattgccatctctcctgctggaaaatcagtgctgcctgtgggaagcccgccctggttggagctgcagtttcctaccagtttgctgagatctgtatctgtggacctgaatgttgatccctcgcttcagattgacatacctga

SEQ ID NO: 290910 - DNA, 984 bp, Homo sapiens
aacagttcccagacatgagtgatagcatttgaaggaaaacacagaaagcaggaagaaaagggatactggaaaaatgcttggaatggattcttgatgaagttcaccacaggcacgtgcagcgactcggtggttcacagctgtgacctgtgtggcaagggcttccgtctgcagcgcatgctgaaccgtcacctcaagtgccacaaccaggtgaaaagacacctgtgcaccttctgcggcaagggcttcaacgacaccttcgacctgaagaggcacgtccgcacacacacaggcattcgtccctacaaatgcaacgtctgcaataaagccttcacccagcgctgctctctggagtcccacctgaagaaaatccatggggtgcagcagcagtatgcctataagcagcggcgggacaagctctacgtctgcgaggattgcggctacacgggccccacccaggaggacctgtacctgcacgtgaacagtgcccatccgggcagctcgtttctcaaaaagacatctaaaaaactggcagcccttctgcagggcaagctgacatccgcacaccaggagaataccagcctgagtgaggaggaggagaggaagtgaggagaaggaaggggaggacagacgttcacactgccacgtatgtctacgtggatttttggttttcagcttcccccaccccactggctcttcttaattagaagtgaccagttcacctctgtgtccttttgaaacatcagcagtagggtccattccaagattgtcagttaccgttagtgacgtcaggccctgtaacctgtgtcctgtctggcgcagttgctcacattcaccaaagtttgttttcatgatcctgatggccaagaacaccgtgtgggatttttttttcccccaaggattttcacacacggaaggagaggtatttcttagagagatcatcattttatggtgccttgaaataaaaatacttctacttgaaatgct

SEQ ID NO: 290911 - DNA, 2473 bp, Homo sapiens
ggcgacgggtcggcggagacagaaaagcgccggacgccggggtgatcatggacgcttgacaacctgcgggcaggcgccgggaggccgagccagcgactaagaggaccgagaggtggcgtggacagatttcaaggccagagaatggcaggggaacagaaaccctcaagtaatctcctggagcagtttattttactagccaaaggtaccagtggctcagccctcactgctctcataagccaggtcttagaggctcccggagtgtatgtctttggagaacttctggagctggccaacgtgcaggagccaacaaggagagcctgccagaactgagcacagctcagcagaacaagctgaagcatcttaccatcgtgagcttggcatcaagaatgaagtgtatcccctactccgtgttgctgaaagacctggagatgcggaatctccgggaactagaagaccttatcattgaggctgtctacactgacatcatccagggcaagctggaccagcgaaaccagctgctggaagtggatttctgcattggccgtgacatccgaaagaaggatatcaataatattgtcaagaccctgcatgaatggtgtgatggctgtgaagcagttctactgggcatcgagcagcaagttctgagagccaaccagtacaaagagaaccacaaccgaactcagcagcaggtagaagcagaggttaccaacatcaagaagacactcaaagccaccgcatcctcctcggctcaggagatggagcagcagctggctgaacgggagtgtccccctcacgctgagcagaggcagcccaccaagaagatgtccaaagtgaaaggtctggtctccagccgccactagggccggctggggcagctggcactcaccaggcctgggtcaggtggggaggggacaccaagggcccatttcctcccctctctacctgcagtgagttccagacctgcccgtcccctcaccagcgcctccccaccctgttggtactgttccagaaaaactgttactccccctcacccactccctccttccccagttgttcccttcagactcaggggctccaccaatgccatcccaaaacagggtcagacactgcccagcttccctccaggaggttcttgtctctgtgtaagggcttgtctccctcccagtttttcttttgctccacgtcattttgtcaggctggttataagccggaggcagctttaaccagcccccagggatgattgtgaaggaggcccctccccttgtgaggagggggcactcctctccagcccctggtaccacagtcctcacgatggtgcagtgatttctagccaggcgtcaagatgcgctgctttccctctcctgcctcatcccttgttggcagctccagttcaggccgtggagggacgtgatgctgggctgtgtttactaaacccacgggttttcagcctcttaagcccagctccgatctccaattagttgagagcgctgggttgactaacctctggtatctgagcacagacagagggtgctgtgggtctgctgggtggcagaaatggttccttccggcttggcgttctctcctggccactcttcctgctgcctctgactactcagccttgttttcggtgtgtaggccccagctgcccactggaactgccggctaatgcttgctctcccaagatctttaactcctcctggctgcacctgggtagggatggtggcatcgatgcccctctgtctgctgaaggacctgttgctgcttctgtcttttcacccctccttggctgatgacccagagccctctgatgatggcattctcctggcaagagaaaaagacttaactagacttctgaacttgaacagtttcaggttatattttaatttttttttttttgtacaggttctgattctaatacatttcaacatgcttttgtcccccctcgtgtcaatatttgttatagactaatcgccggggatttttcacctggttggagggtgggggtgggtgtgtgtgtgtgtgtgtgtgtgtgtgtgtgtgtgtgtgtgtgtgtgtgtgtgtttgtaggtcctggactgattaaagttcattgaggaaaaagcacattttacaacaaaaaaataaaagtgtagatttaatgtatgtgactggggtttggggttgcatacctggtggatcttgaggggctgggattagggtggttcaggaaaatgtgatgctgtttccccatgtttagccatggtcaaaaaatggatttctcctttttctaaaatgtccagcaactgcctactgttgatcaaatgttgaagtattcttgtttcccttttaagccaatccatgtgcccacataacattatgcccaagtggagagttcactttaatttccaaagtatgtttcatgcagccccctgtcagctgctctgtggaaaaggggttctgttatgaaataaatgttgcactccctgcatcccat

SEQ ID NO: 290912 - DNA, 459 bp, Homo sapiens
gatttttgtggtgggtgggactgagcagccaacaaggagagcctgccagaactgagcacagctcagcagaacaagctgaagcatcttaccatcgtgagcttggcatcaagaatgaagtgtatcccctactccgtgttgctgaaagacctggagatgcggaatctccgggaactagaagaccttatcattgaggctgtctacactgacatcatccagggcaagctggaccagcgaaaccagctgctggaagtggatttctgcattggccgtgacatccgaaagaaggatatcaataatattgtcaagaccctgcatgaatggtgtgatggctgtgaagcagttctactgggcatcgagcagcaagttctgagagccaaccagtacaaagagaaccacaaccgaactcagcagcaggtagaagcagaggttaccaacatcagaatggtaaccctcgtgccg

SEQ ID NO: 290913 - DNA, 518 bp, Homo sapiens
ctccccgggaagtcccataggacacaatattcatctggtgttgttgcctagagtttgtcccagcggagggttggcttcggatctgcagaggctttagggacctgctccagccactgagcacactagccgtctgagacggcagctgagttgcactgtgcgacgcgacagagactacatttcccagcattccagcggcgcactcgggggaccacagatcccagcgcaccacaaagaggcccggggactacaaatcccagcatcccctgcactcggttcctctgtaacttagactccagtgtgccgcgcagtgtgcgcaaattcacaaacccgcccgctgagttggtcgtttcggaatcccgagacttgaaacccaacgggaagacccttctcaccctcaaaagaagatgacagcccgcagagagttaacttctgtttacatggaactcagacatctgcaaatcatggtaaggctgcaaacaacaaacaaaaacactgattaaaccgtgaaagagaacaaa

SEQ ID NO: 290914 - DNA, 396 bp, Homo sapiens
  misc_feature (353)..(353): n is a, c, g, or t
  misc_feature (359)..(359): n is a, c, g, or t
ggctgaagttcatcctctactggtttattcaagaaggttcatggagctgtattcccaaagtttttatgaaaatatttgtggttttataaatgaataacagcagagtgtagaattcttgggtccctctttctgaggacattttaatcacgatttatttcactgttggtgatgtgcctctttgccaaatgttccccttccatttgtttcaaccaggagagcattagtcccacatttttgcttgactcatttccacaaatctgctgtgagtagcccaggctcgtttctgctcatctggatttctgaagagaatttcaggttttcttgcagaggattttagcttcctgcctaacttnccatgngttatgatatatactctgacagtgatttacaattacc

SEQ ID NO: 290915 - DNA, 2549 bp, Homo sapiens
ggcgacgggtcggcggagacagaaaagcgccggacgccggggtgatcatggacgcttgacaacctgcgggcaggcgccgggaggccgagccagcgactaagaggaccgagaggtggcgtggacagatttcaaggccagagaatggcaggggaacagaaaccctcaagtaatctcctggagcagtttattttactagccaaaggtaccagtggctcagccctcactgctctcataagccaggtcttagaggctcccggagtgtatgtctttggagaacttctggagctggccaacgtgcaggagcttgcggaaggagctaatgctgcttatttgcagttgttgaacctgtttgcctatgggacatacccagattacatagccaacaaggagagcctgccagaactgagcacagctcagcagaacaagctgaagcatcttaccatcgtgagcttggcatcaagaatgaagtgtatcccctactccgtgttgctgaaagacctggagatgcggaatctccgggaactagaagaccttatcattgaggctgtctacactgacatcatccagggcaagctggaccagcgaaaccagctgctggaagtggatttctgcattggccgtgacatccgaaagaaggatatcaataatattgtcaagaccctgcatgaatggtgtgatggctgtgaagcagttctactgggcatcgagcagcaagttctgagagccaaccagtacaaagagaaccacaaccgaactcagcagcaggtagaagcagaggttaccaacatcaagaagacactcaaagccaccgcatcctcctcggctcaggagatggagcagcagctggctgaacgggagtgtccccctcacgctgagcagaggcagcccaccaagaagatgtccaaagtgaaaggtctggtctccagccgccactagggccggctggggcagctggcactcaccaggcctgggtcaggtggggaggggacaccaagggcccatttcctcccctctctacctgcagtgagttccagacctgcccgtcccctcaccagcgcctccccaccctgttggtactgttccagaaaaactgttactccccctcacccactccctccttccccagttgttcccttcagactcaggggctccaccaatgccatcccaaaacagggtcagacactgcccagcttccctccaggaggttcttgtctctgtgtaagggcttgtctccctcccagtttttcttttgctccacgtcattttgtcaggctggttataagccggaggcagctttaaccagcccccagggatgattgtgaaggaggcccctccccttgtgaggagggggcactcctctccagcccctggtaccacagtcctcacgatggtgcagtgatttctagccaggcgtcaagatgcgctgctttccctctcctgcctcatcccttgttggcagctccagttcaggccgtggagggacgtgatgctgggctgtgtttactaaacccacgggttttcagcctcttaagcccagctccgatctccaattagttgagagcgctgggttgactaacctctggtatctgagcacagacagagggtgctgtgggtctgctgggtggcagaaatggttccttccggcttggcgttctctcctggccactcttcctgctgcctctgactactcagccttgttttcggtgtgtaggccccagctgcccactggaactgccggctaatgcttgctctcccaagatctttaactcctcctggctgcacctgggtagggatggtggcatcgatgcccctctgtctgctgaaggacctgttgctgcttctgtcttttcacccctccttggctgatgacccagagccctctgatgatggcattctcctggcaagagaaaaagacttaactagacttctgaacttgaacagtttcaggttatattttaatttttttttttttgtacaggttctgattctaatacatttcaacatgcttttgtcccccctcgtgtcaatatttgttatagactaatcgccggggatttttcacctggttggagggtgggggtgggtgtgtgtgtgtgtgtgtgtgtgtgtgtgtgtgtgtgtgtgtgtgtgtgtgtgtttgtaggtcctggactgattaaagttcattgaggaaaaagcacattttacaacaaaaaaataaaagtgtagatttaatgtatgtgactggggtttggggttgcatacctggtggatcttgaggggctgggattagggtggttcaggaaaatgtgatgctgtttccccatgtttagccatggtcaaaaaatggatttctcctttttctaaaatgtccagcaactgcctactgttgatcaaatgttgaagtattcttgtttcccttttaagccaatccatgtgcccacataacattatgcccaagtggagagttcactttaatttccaaagtatgtttcatgcagccccctgtcagctgctctgtggaaaaggggttctgttatgaaataaatgttgcactccctgcatcccat

SEQ ID NO: 290916 - DNA, 2471 bp, Homo sapiens
ggcgacgggtcggcggagacagaaaagcgccggacgccggggtgatcatggacgcttgacaacctgcgggcaggcgccgggaggccgagccagcgactaagaggaccgagaggtggcgtggacagatttcaaggccagagaatggcaggggaacagaaaccctcaagtaatctcctggagcagtttattttactagccaaaggtaccagtggctcagccctcactgctctcataagccaggtcttagaggctcccggagtgtatgtctttggagaacttctggagctggccaacgtgcaggagcttgcggaaggagctaatgctgcttatttgcagttgttgaacctgtttgcctatgggacatacccagattacatagccaacaaggagagcctgccagaactgagcacagctcagcagaacaagctgaagcatcttaccatcgtgagcttggcatcaagaatgaagtgtatcccctactccgtgttgctgaaagacctggagatgcggaatctccgggaactagaagaccttatcattgaggctgtctacactgacatcatccagggcaagctggaccagcgaaaccagctgctggaagtggatttctgcattggccgtgacatccgaaagaaggatatcaataatattgtcaagaccctgcatgaatggtgtgatggctgtgaagcagttctactgggcatcgagcagcaagttctgagagccaaccagtacaaagagaaccacaaccgaactcagcagcaggtagaagcagaggttaccaacatcaagaagacactcaaagccaccgcatcctcctcggctcaggagatggagcagcagctggctgaacgggagtgtccccctcacgctgagcagaggcagcccaccaagaagatgtccaaagtgaaaggtctggtctccagccgccactagggccggctggggcagctggcactcaccaggcctgggtcaggtggggaggggacaccaagggcccatttcctcccctctctacctgcagtgagttccagacctgcccgtcccctcaccagcgcctccccaccctgttggtactgttccagaaaaactgttactccccctcacccactccctccttccccagttgttcccttcagactcaggggctccaccaatgccatcccaaaacagggtcagacactgcccagcttccctccaggaggttcttgtctctgtgtaagggcttgtctccctcccagtttttcttttgctccacgtcattttgtcaggctggttataagccggaggcagctttaaccagcccccagggatgattgtgaaggaggcccctccccttgtgaggagggggcactcctctccagcccctggtaccacagtcctcacgatggtgcagtgatttctagccaggcgtcaagatgcgctgctttccctctcctgcctcatcccttgttggcagctccagttcaggccgtggagggacgtgatgctgggctgtgtttactaaacccacgggttttcagcctcttaagcccagctccgatctccaattagttgagagcgctgggttgactaacctctggtatctgagcacagacagagggtgctgtgggtctgctgggtggcagaaatggttccttccggcttggcgttctctcctggccactcttcctgctgcctctgactactcagccttgttttcggtgtgtaggccccagctgcccactggaactgccggctaatgcttgctctcccgctgcttctgtcttttcacccctccttggctgatgacccagagccctctgatgatggcattctcctggcaagagaaaaagacttaactagacttctgaacttgaacagtttcaggttatattttaatttttttttttttgtacaggttctgattctaatacatttcaacatgcttttgtcccccctcgtgtcaatatttgttatagactaatcgccggggatttttcacctggttggagggtgggggtgggtgtgtgtgtgtgtgtgtgtgtgtgtgtgtgtgtgtgtgtgtgtgtgtgtgtgtttgtaggtcctggactgattaaagttcattgaggaaaaagcacattttacaacaaaaaaataaaagtgtagatttaatgtatgtgactggggtttggggttgcatacctggtggatcttgaggggctgggattagggtggttcaggaaaatgtgatgctgtttccccatgtttagccatggtcaaaaaatggatttctcctttttctaaaatgtccagcaactgcctactgttgatcaaatgttgaagtattcttgtttcccttttaagccaatccatgtgcccacataacattatgcccaagtggagagttcactttaatttccaaagtatgtttcatgcagccccctgtcagctgctctgtggaaaaggggttctgttatgaaataaatgttgcactccctgcatcccat

SEQ ID NO: 290917 - DNA, 1751 bp, Homo sapiens
ggcgacgggtcggcggagacagaaaagcgccggacgccggggtgatcatggacgcttgacaacctgcgggcaggcgccgggaggccgagccagcgactaagaggaccgagaggtggcgtggacagatttcaaggccagagaatggcaggggaacagaaaccctcaagtaatctcctggagcagtttattttactagccaaaggtaccagtggctcagccctcactgctctcataagccaggtcttagaggctcccggagtgtatgtctttggagaacttctggagctggccaacgtgcaggagcttgcggaaggagctaatgctgcttatttgcagttgttgaacctgtttgcctatgggacatacccagattacatagccaacaaggagagcctgccagaactgagcacagctcagcagaacaagctgaagcatcttaccatcgtgagcttggcatcaagaatgaagtgtatcccctactccgtgttgctgaaagacctggagatgcggaatctccgggaactagaagaccttatcattgaggctgtctacactgacatcatccagggcaagctggaccagcgaaaccagctgctggaagtggatttctgcattggccgtgacatccgaaagaaggatatcaataatattgtcaagaccctgcatgaatggtgtgatggctgtgaagcagttctactgggcatcgagcagcaagttctgagagccaaccagtacaaagagaaccacaaccgaactcagcagcaggtagaagcagaggttaccaacatcaagaagacactcaaagccaccgcatcctcctcggctcaggagatggagcagcagctggctgaacgggagtgtccccctcacgctgagcagaggcagcccaccaagaagatgtccaaagtgaaaggccccagctgcccactggaactgccggctaatgcttgctctcccaagatctttaactcctcctggctgcacctgggtagggatggtggcatcgatgcccctctgtctgctgaaggacctgttgctgcttctgtcttttcacccctccttggctgatgacccagagccctctgatgatggcattctcctggcaagagaaaaagacttaactagacttctgaacttgaacagtttcaggttatattttaatttttttttttttgtacaggttctgattctaatacatttcaacatgcttttgtcccccctcgtgtcaatatttgttatagactaatcgccggggatttttcacctggttggagggtgggggtgggtgtgtgtgtgtgtgtgtgtgtgtgtgtgtgtgtgtgtgtgtgtgtgtgtgtgtttgtaggtcctggactgattaaagttcattgaggaaaaagcacattttacaacaaaaaaataaaagtgtagatttaatgtatgtgactggggtttggggttgcatacctggtggatcttgaggggctgggattagggtggttcaggaaaatgtgatgctgtttccccatgtttagccatggtcaaaaaatggatttctcctttttctaaaatgtccagcaactgcctactgttgatcaaatgttgaagtattcttgtttcccttttaagccaatccatgtgcccacataacattatgcccaagtggagagttcactttaatttccaaagtatgtttcatgcagccccctgtcagctgctctgtggaaaaggggttctgttatgaaataaatgttgcactccctgcatcccat

SEQ ID NO: 290918 - DNA, 1266 bp, Homo sapiens
ggcgacgggtcggcggagacagaaaagcgccggacgccggggtgatcatggacgcttgacaacctgcgggcaggcgccgggaggccgagccagcgactaagaggaccgagaggtggcgtggacagatttcaaggccagagaatggcaggggaacagaaaccctcaagtaatctcctggagcagtttattttactagccaaaggtaccagtggctcagccctcactgctctcataagccaggtcttagaggctcccggagtgtatgtctttggagaacttctggagctggccaacgtgcaggagcttgcggaaggagctaatgctgcttatttgcagttgttgaacctgtttgcctatgggacatacccagattacatagccaacaaggagagcctgccagaactgagcacagctcagcagaacaagctgaagcatcttaccatcgtgagcttggcatcaagaatgaagtgtatcccctactccgtgttgctgaaagacctggagatgcggaatctccgggaactagaagaccttatcattgaggctgtctacactgacatcatccagggcaagctggaccagcgaaaccagctgctggaagtggatttctgcattggccgtgacatccgaaagaaggatatcaataatattgtcaagaccctgcatgaatggtgtgatggctgtgaagcagttctactgggcatcgagcagcaagttctgagagccaaccagtacaaagagaaccacaaccgaactcagcagcaggtagaagcagaggttaccaacatcaagaagacactcaaagccaccgcatcctcctcggctcaggagatggagcagcagctggctgaacgggagtgtccccctcacgctgagcagaggcagcccaccaagaagatgtccaaagtgaaaggtctggtctccagccgccactagggccggctggggcagctggcactcaccaggcctgggtcaggtggggaggggacaccaagggcccatttcctcccctctctacctgcagtgagttccagacctgcccgtcccctcaccagcgcctccccaccctgttggtactgttccagaaaaactgttactccccctcacccactccctccttccccagttgttcccttcagactcaggggctccaccaatgccatcccaaaacagggtcagacactgtctacgaggggtatgccctcccccatgccatcctccatggtctgagctcatcccaccttgcctttccacagagcatcatcc

SEQ ID NO: 290919 - DNA, 1661 bp, Homo sapiens
ggctgaagttcatcctctactggtttattcaagaaggttcatggagctgtattcccaaagtttttatgaaaatatttgtggttttataaatgaataacagcagagtgtagaattcttgggtccctctttctgaggacattttaatcacgatttatttcactgttggtgatgtgcctctttgccaaatgttccccttccatttgtttcaaccaggagagcattagtcccacatttttgcttgactcatttccacaaatctgctgtgagtagcccaggctcgtttctgctcatctggatttctgaagagaatttcaggttttcttgcagaggattttagcttcctgtctgaagtgaagacatagtgagagcaagttttggtgagcacatacaggctgagcactccaattctatatctccccaccaggttaccaacatcaagaagacactcaaagccaccgcatcctcctcggctcaggagatggagcagcagctggctgaacgggagtgtccccctcacgctgagcagaggcagcccaccaagaagatgtccaaagtgaaaggtctggtctccagccgccactagggccggctggggcagctggcactcaccaggcctgggtcaggtggggaggggacaccaagggcccatttcctcccctctctacctgcagtgagttccagacctgcccgtcccctcaccagcgcctccccaccctgttggtactgttccagaaaaactgttactccccctcacccactccctccttccccagttgttcccttcagactcaggggctccaccaatgccatcccaaaacagggtcagacactgcccagcttccctccaggaggttcttgtctctgtgtaagggcttgtctccctcccagtttttcttttgctccacgtcattttgtcaggctggttataagccggaggcagctttaaccagcccccagggatgattgtgaaggaggcccctccccttgtgaggagggggcactcctctccagcccctggtaccacagtcctcacgatggtgcagtgatttctagccaggcgtcaagatgcgctgctttccctctcctgcctcatcccttgttggcagctccagttcaggccgtggagggacgtgatgctgggctgtgtttactaaacccacgggttttcagcctcttaagcccagctccgatctccaattagttgagagcgctgggttgactaacctctggtatctgagcacagacagagggtgctgtgggtctgctgggtggcagaaatggttccttccggcttggcgttctctcctggccactcttcctgctgcctctgactactcagccttgttttcggtgtgtaggccccagctgcccactggaactgccggctaatgcttgctctcccaagatctttaactcctcctggctgcacctgggtagggatggtggcatcgatgcccctctgtctgctgaaggacctgttgctgcttctgtcttttcacccctccttggctgatgacccagagccctctgatgatggcattctcctggcaagagaaaaagacttaactagacttctgaacttgaacagtttcaggttatattttaatttttttttttttgtacaggttctgattctaatacatttcaacatgcttttgtcc

SEQ ID NO: 290920 - DNA, 1398 bp, Homo sapiens
ggctgaagttcatcctctactggtttattcaagaaggttcatggagctgtattcccaaagtttttatgaaaatatttgtggttttataaatgaataacagcagagtgtagaattcttgggtccctctttctgaggacattttaatcacgatttatttcactgttggtgatgtgcctctttgccaaatgttccccttccatttgtttcaaccaggagagcattagtcccacatttttgcttgactcatttccacaaatctgctgtgagtagcccaggctcgtttctgctcatctggatttctgaagagaatttcaggttttcttgcagaggattttagcttcctgtctgaagtgaagacatagtgagagcaagttttggtgagcacatacaggctgagcactccaattctatatctccccaccaggttaccaacatcaagaagacactcaaagccaccgcatcctcctcggctcaggagatggagcagcagctggctgaacgggagtgtccccctcacgctgagcagaggcagcccaccaagaagatgtccaaagtgaaaggccccagctgcccactggaactgccggctaatgcttgctctcccaagatctttaactcctcctggctgcacctgggtagggatggtggcatcgatgcccctctgtctgctgaaggacctgttgctgcttctgtcttttcacccctccttggctgatgacccagagccctctgatgatggcattctcctggcaagagaaaaagacttaactagacttctgaacttgaacagtttcaggttatattttaatttttttttttttgtacaggttctgattctaatacatttcaacatgcttttgtcccccctcgtgtcaatatttgttatagactaatcgccggggatttttcacctggttggagggtgggggtgggtgtgtgtgtgtgtgtgtgtgtgtgtgtgtgtgtgtgtgtgtgtgtgtgtgtgtttgtaggtcctggactgattaaagttcattgaggaaaaagcacattttacaacaaaaaaataaaagtgtagatttaatgtatgtgactggggtttggggttgcatacctggtggatcttgaggggctgggattagggtggttcaggaaaatgtgatgctgtttccccatgtttagccatggtcaaaaaatggatttctcctttttctaaaatgtccagcaactgcctactgttgatcaaatgttgaagtattcttgtttcccttttaagccaatccatgtgcccacataacattatgcccaagtggagagttcactttaatttccaaagtatgtttcatgcagccccctgtcagctgctctgtggaaaaggggttctgttatgaaataaatgttgcactccctgcatcccat

SEQ ID NO: 290921 - DNA, 891 bp, Homo sapiens
tgacaaaagcatgttgaaatgtattagaatcagaacctgtccaaaaaaaaaaaaattaaaatataacctgaaactgttcaagttcagaagtctagttaagatctttaactcctcctggctgcacctgggtagggatggtggcatcgatgcccctctgtctgctgaaggacctgttgctgcttctgtcttttcacccctccttggctgatgacccagagccctctgatgatggcattctcctggcaagagaaaaagacttaactagacttctgaacttgaacagtttcaggttatattttaatttttttttttttgtacaggttctgattctaatacatttcaacatgcttttgtcccccctcgtgtcaatatttgttatagactaatcgccggggatttttcacctggttggagggtgggggtgggtgtgtgtgtgtgtgtgtgtgtgtgtgtgtgtgtgtgtgtgtgtgtgtgtgtgtttgtaggtcctggactgattaaagttcattgaggaaaaagcacattttacaacaaaaaaataaaagtgtagatttaatgtatgtgactggggtttggggttgcatacctggtggatcttgaggggctgggattagggtggttcaggaaaatgtgatgctgtttccccatgtttagccatggtcaaaaaatggatttctcctttttctaaaatgtccagcaactgcctactgttgatcaaatgttgaagtattcttgtttcccttttaagccaatccatgtgcccacataacattatgcccaagtggagagttcactttaatttccaaagtatgtttcatgcagccccctgtcagctgctctgtggaaaaggggttctgttatgaaataaatgttgcactccctgcatcccat

SEQ ID NO: 290922 - DNA, 817 bp, Homo sapiens
gcctggtaccacagtcctcacgatggtaccagggctggagaggagtgccccctcctcacaaggggaggggcctccttcacaatcatccctgggggctggttaaagctgcctccggcttataaccagcctgacaaaatgacgtggagcaaaagaaaaactgggagggagacaaggtaccacagtcctcacgatggtgcagtgatttctagccaggcgtcaagatgcgctgctttccctctcctgcctcatcccttgttggcagctccagttcaggccgtggagggacgtgatgctgggctgtgtttactaaacccacgggttttcagcctcttaagcccagctccgatctccaattagttgagagcgctgggttgactaacctctggtatctgagcacagacagagggtgctgtgggtctgctgggtggcagaaatggttccttccggcttggcgttctctcctggccactcttcctgctgcctctgactactcagccttgttttcggtgtgtaggccccagctgcccactggaactgccggctaatgcttgctctcccaagatctttaactcctcctggctgcacctgggtagggatggtggcatcgatgcccctctgtctgctgaaggacctgttgctgcttctgtcttttcacccctccttggctgatgacccagagccctctgatgatggcattctcctggcaagagaaaaagacttaactagacttctgaacttgaacagtttcaggttatattttaatttttttttttttgtacaggttctgattctaatacatttcaacatgcttttgtcc

SEQ ID NO: 290923 - DNA, 2014 bp, Homo sapiens
ggcgacgggtcggcggagacagaaaagcgccggacgccggggtgatcatggacgcttgacaacctgcgggcaggcgccgggaggccgagccagcgactaagaggaccgagaggtggcgtggacagatttcaaggccagagaatggcaggggaacagaaaccctcaagtaatctcctggagcagtttattttactagccaaaggtaccagtggctcagccctcactgctctcataagccaggtcttagaggctcccggagtgtatgtctttggagaacttctggagctggccaacgtgcaggagcttgcggaaggagctaatgctgcttatttgcagttgttgaacctgtttgcctatgggacatacccagattacatagccaacaaggagagcctgccagaactgagcacagctcagcagaacaagctgaagcatcttaccatcgtgagcttggcatcaagaatgaagtgtatcccctactccgtgttgctgaaagacctggagatgcggaatctccgggaactagaagaccttatcattgaggctgtctacactgacatcatccagggcaagctggaccagcgaaaccagctgctggaagtggatttctgcattggccgtgacatccgaaagaaggatatcaataatattgtcaagaccctgcatgaatggtgtgatggctgtgaagcagttctactgggcatcgagcagcaagttctgagagccaaccagtacaaagagaaccacaaccgaactcagcagcaggtagaagcagaggttaccaacatcaagaagacactcaaagccaccgcatcctcctcggctcaggagatggagcagcagctggctgaacgggagtgtccccctcacgctgagcagaggcagcccaccaagaagatgtccaaagtgaaaggtctggtctccagccgccactagggccggctggggcagctggcactcaccaggcctgggtcaggtggggaggggacaccaagggcccatttcctcccctctctacctgcagtgagttccagacctgcccgtcccctcaccagcgcctccccaccctgttggtactgttccagaaaaactgttactccccctcacccactccctccttccccagttgttcccttcagactcaggggctccaccaatgccatcccaaaacagggtcagacactgcccagcttccctccaggaggttcttgtctctgtgtaagggcttgtctccctcccagtttttcttttgctccacgtcattttgtcaggctggttataagccggaggcagctttaaccagcccccagggatgattgtgaaggaggcccctccccttgtgaggagggggcactcctctccagcccctggtaccacagtcctcacgatggtgcagtgatttctagccaggcgtcaagatgcgctgctttccctctcctgcctcatcccttgttggcagctccagttcaggccgtggagggacgtgatgctgggctgtgtttactaaacccacgggttttcagcctcttaagcccagctccgatctccaattagttgagagcgctgggttgactaacctctggtatctgagcacagacagagggtgctgtgggtctgctgggtggcagaaatggttccttccggcttggcgttctctcctggccactcttcctgctgcctctgactactcagccttgttttcggtgtgtaggccccagctgcccactggaactgccggctaatgcttgctctcccaagatctttaactcctcctggctgcacctgggtagggatggtggcatcgatgcccctctgtctgctgaaggacctgttgctgcttctgtcttttcacccctccttggctgatgacccagagccctctgatgatggcattctcctggcaagagaaaaagacttaactagacttctgaacttgaacagtttcaggttatattttaatttttttttttttgtacaggttctgattctaatacatttcaacatgcttttgtcc

SEQ ID NO: 290924 - DNA, 2353 bp, Homo sapiens
ctccccgggaagtcccataggacacaatattcatctggtgttgttgcctagagtttgtcccagcggagggttggcttcggatctgcagaggctttagggacctgctccagccactgagcacactagccgtctgagacggcagctgagttgcactgtgcgacgcgacagagactacatttcccagcattccagcggcgcactcgggggaccacagatcccagcgcaccacaaagaggcccggggactacaaatcccagcatcccctgcactcggttcctctgtaacttagactccagtgtgccgcgcagtgtgcgcaaattcacaaacccgcccgctgagttggtcgtttcggaatcccgagacttgaaacccaacgggaagacccttctcaccctcaaaagaagatgacagcccgcagagagttaacttctgtttacatggaactcagacatctgcaaatcatgatttcaaggccagagaatggcaggggaacagaaaccctcaagtaatctcctggagcagtttattttactagccaaaggtaccagtggctcagccctcactgctctcataagccaggtcttagaggctcccggagtgtatgtctttggagaacttctggagctggccaacgtgcaggagcttgcggaaggagctaatgctgcttatttgcagttgttgaacctgtttgcctatgggacatacccagattacatagccaacaaggagagcctgccagaactgagcacagctcagcagaacaagctgaagcatcttaccatcgtgagcttggcatcaagaatgaagtgtatcccctactccgtgttgctgaaagacctggagatgcggaatctccgggaactagaagaccttatcattgaggctgtctacactgacatcatccagggcaagctggaccagcgaaaccagctgctggaagtggatttctgcattggccgtgacatccgaaagaaggatatcaataatattgtcaagaccctgcatgaatggtgtgatggctgtgaagcagttctactgggcatcgagcagcaagttctgagagccaaccagtacaaagagaaccacaaccgaactcagcagcaggtagaagcagaggttaccaacatcaagaagacactcaaagccaccgcatcctcctcggctcaggagatggagcagcagctggctgaacgggagtgtccccctcacgctgagcagaggcagcccaccaagaagatgtccaaagtgaaaggtctggtctccagccgccactagggccggctggggcagctggcactcaccaggcctgggtcaggtggggaggggacaccaagggcccatttcctcccctctctacctgcagtgagttccagacctgcccgtcccctcaccagcgcctccccaccctgttggtactgttccagaaaaactgttactccccctcacccactccctccttccccagttgttcccttcagactcaggggctccaccaatgccatcccaaaacagggtcagacactgcccagcttccctccaggaggttcttgtctctgtgtaagggcttgtctccctcccagtttttcttttgctccacgtcattttgtcaggctggttataagccggaggcagctttaaccagcccccagggatgattgtgaaggaggcccctccccttgtgaggagggggcactcctctccagcccctggtaccacagtcctcacgatggtgcagtgatttctagccaggcgtcaagatgcgctgctttccctctcctgcctcatcccttgttggcagctccagttcaggccgtggagggacgtgatgctgggctgtgtttactaaacccacgggttttcagcctcttaagcccagctccgatctccaattagttgagagcgctgggttgactaacctctggtatctgagcacagacagagggtgctgtgggtctgctgggtggcagaaatggttccttccggcttggcgttctctcctggccactcttcctgctgcctctgactactcagccttgttttcggtgtgtaggccccagctgcccactggaactgccggctaatgcttgctctcccaagatctttaactcctcctggctgcacctgggtagggatggtggcatcgatgcccctctgtctgctgaaggacctgttgctgcttctgtcttttcacccctccttggctgatgacccagagccctctgatgatggcattctcctggcaagagaaaaagacttaactagacttctgaacttgaacagtttcaggttatattttaatttttttttttttgtacaggttctgattctaatacatttcaacatgcttttgtcc

SEQ ID NO: 290925 - DNA, 1663 bp, Homo sapiens
gatttttgtggtgggtgggactgagcagccaacaaggagagcctgccagaactgagcacagctcagcagaacaagctgaagcatcttaccatcgtgagcttggcatcaagaatgaagtgtatcccctactccgtgttgctgaaagacctggagatgcggaatctccgggaactagaagaccttatcattgaggctgtctacactgacatcatccagggcaagctggaccagcgaaaccagctgctggaagtggatttctgcattggccgtgacatccgaaagaaggatatcaataatattgtcaagaccctgcatgaatggtgtgatggctgtgaagcagttctactgggcatcgagcagcaagttctgagagccaaccagtacaaagagaaccacaaccgaactcagcagcaggtagaagcagaggttaccaacatcaagaagacactcaaagccaccgcatcctcctcggctcaggagatggagcagcagctggctgaacgggagtgtccccctcacgctgagcagaggcagcccaccaagaagatgtccaaagtgaaaggtctggtctccagccgccactagggccggctggggcagctggcactcaccaggcctgggtcaggtggggaggggacaccaagggcccatttcctcccctctctacctgcagtgagttccagacctgcccgtcccctcaccagcgcctccccaccctgttggtactgttccagaaaaactgttactccccctcacccactccctccttccccagttgttcccttcagactcaggggctccaccaatgccatcccaaaacagggtcagacactgcccagcttccctccaggaggttcttgtctctgtgtaagggcttgtctccctcccagtttttcttttgctccacgtcattttgtcaggctggttataagccggaggcagctttaaccagcccccagggatgattgtgaaggaggcccctccccttgtgaggagggggcactcctctccagcccctggtaccacagtcctcacgatggtgcagtgatttctagccaggcgtcaagatgcgctgctttccctctcctgcctcatcccttgttggcagctccagttcaggccgtggagggacgtgatgctgggctgtgtttactaaacccacgggttttcagcctcttaagcccagctccgatctccaattagttgagagcgctgggttgactaacctctggtatctgagcacagacagagggtgctgtgggtctgctgggtggcagaaatggttccttccggcttggcgttctctcctggccactcttcctgctgcctctgactactcagccttgttttcggtgtgtaggccccagctgcccactggaactgccggctaatgcttgctctcccaagatctttaactcctcctggctgcacctgggtagggatggtggcatcgatgcccctctgtctgctgaaggacctgttgctgcttctgtcttttcacccctccttggctgatgacccagagccctctgatgatggcattctcctggcaagagaaaaagacttaactagacttctgaacttgaacagtttcaggttatattttaatttttttttttttgtacaggttctgattctaatacatttcaacatgcttttgtcc

SEQ ID NO: 290926 - DNA, 2188 bp, Homo sapiens
ctccccgggaagtcccataggacacaatattcatctggtgttgttgcctagagtttgtcccagcggagggttggcttcggatctgcagaggctttagggacctgctccagccactgagcacactagccgtctgagacggcagctgagttgcactgtgcgacgcgacagagactacatttcccagcattccagcggcgcactcgggggaccacagatcccagcgcaccacaaagaggcccggggactacaaatcccagcatcccctgcactcggttcctctgtaacttagactccagtgtgccgcgcagtgtgcgcaaattcacaaacccgcccgctgagttggtcgtttcggaatcccgagacttgaaacccaacgggaagacccttctcaccctcaaaagaagatgacagcccgcagagagttaacttctgtttacatggaactcagacatctgcaaatcatgatttcaaggccagagaatggcaggggaacagaaaccctcaagtaatctcctggagcagtttattttactagccaaaggtaccagtggctcagccctcactgctctcataagccaggtcttagaggctcccggagtgtatgtctttggagaacttctggagctggccaacgtgcaggagtgtatcccctactccgtgttgctgaaagacctggagatgcggaatctccgggaactagaagaccttatcattgaggctgtctacactgacatcatccagggcaagctggaccagcgaaaccagctgctggaagtggatttctgcattggccgtgacatccgaaagaaggatatcaataatattgtcaagaccctgcatgaatggtgtgatggctgtgaagcagttctactgggcatcgagcagcaagttctgagagccaaccagtacaaagagaaccacaaccgaactcagcagcaggtagaagcagaggttaccaacatcaagaagacactcaaagccaccgcatcctcctcggctcaggagatggagcagcagctggctgaacgggagtgtccccctcacgctgagcagaggcagcccaccaagaagatgtccaaagtgaaaggtctggtctccagccgccactagggccggctggggcagctggcactcaccaggcctgggtcaggtggggaggggacaccaagggcccatttcctcccctctctacctgcagtgagttccagacctgcccgtcccctcaccagcgcctccccaccctgttggtactgttccagaaaaactgttactccccctcacccactccctccttccccagttgttcccttcagactcaggggctccaccaatgccatcccaaaacagggtcagacactgcccagcttccctccaggaggttcttgtctctgtgtaagggcttgtctccctcccagtttttcttttgctccacgtcattttgtcaggctggttataagccggaggcagctttaaccagcccccagggatgattgtgaaggaggcccctccccttgtgaggagggggcactcctctccagcccctggtaccacagtcctcacgatggtgcagtgatttctagccaggcgtcaagatgcgctgctttccctctcctgcctcatcccttgttggcagctccagttcaggccgtggagggacgtgatgctgggctgtgtttactaaacccacgggttttcagcctcttaagcccagctccgatctccaattagttgagagcgctgggttgactaacctctggtatctgagcacagacagagggtgctgtgggtctgctgggtggcagaaatggttccttccggcttggcgttctctcctggccactcttcctgctgcctctgactactcagccttgttttcggtgtgtaggccccagctgcccactggaactgccggctaatgcttgctctcccaagatctttaactcctcctggctgcacctgggtagggatggtggcatcgatgcccctctgtctgctgaaggacctgttgctgcttctgtcttttcacccctccttggctgatgacccagagccctctgatgatggcattctcctggcaagagaaaaagacttaactagacttctgaacttgaacagtttcaggttatattttaatttttttttttttgtacaggttctgattctaatacatttcaacatgcttttgtcc

SEQ ID NO: 290927 - DNA, 554 bp, Homo sapiens
gtggcctgggtgctggacttttcatattaagtcctgtcttagccaagggagaagaatgtaaggataagaccaccaatatcacaggggctgtctgagcctttacctgtgattttctaccactctgtggccttctggagcaatggacaaccaagtcagctatgcagttcataaaagtggacctggttatatgtcatccaacagcatatggtccctgcaagcctgtttggaagccaatattctataacctacaggaatccactgaatctgatgtctttggaagcaatatattttccagggttccaatggactacggaataaggcaacacagggcctgttttcccgcagtgtcctctgctccaaggaactttcttaaggaagcgggacgtgtcaatgaggtacctcccggggttctacagttcctcctgcccactggccagggggaatctggcgggagcctctcggtggatgctgtcacatgactgtgccttctgaaagaacatctgtgaagagcagtttctggtgtccctgagtaacccttttctaacaattcagcc

SEQ ID NO: 290928 - DNA, 572 bp, Homo sapiens
cagctataatgaatacacccagtgtccagtttcggtttatcttattttattttattttttttgagacagagttttgctctcgttgcccaggctgggatgcaatggcgcaatcttgactcactgcaacctccctctgcccccagccccccagattcaagcaattctcctgcctcagcctcccaagtagctgagattacagccgtgagccaccgtgcgcagccccatcctgctgatttgttccttccagactgttcgttccttcttcttccagtcagtaggtgtcttgggtgggggcacatttccgttgtcttgctctggcaaacctttcatttgtctgctcattcattcatttattcaacaaactttttaaagtacctactaagtgctaaaagaatacagaattgaatgtaccatggccactgcctgtaaggcactcatggtccagcgagccctcccctcagagtctccctctcactagtggaacttctctagcagaagctcttactccactgctgtatgccctttgtattctctgttttctgtctcacatcgttgcttttctggcccttcat

SEQ ID NO: 290929 - DNA, 779 bp, Homo sapiens
agaccgagagtcggtggaaggactgggtgagctcatcgcgggcgtagctgagcgaattgggcacgtggttgtggccagagcaccgacccttcttggggctcttgcattcttcattccagtcggttttcacatcacggacagcccgtgaatactcatcgatgtcgaactgttcttggcagatacctagccagtgatggaccagggtttcgggccagctctctcccttcaccaggtgttctgggaggctgaacttggggacagtcaagtgcaaaggaaagtgcatggggaggatcttgttgttccgcagcacacagcaaaccaccaccgtcttggtctggatgttcacaaacttatagcggtgcccctcacggatgaagtggaggtcgtatgggtttctcggtggagggcttggcacagtcacattcacaggaagcctggttttctccacaatgttgcggatggtgtgttcgccctcttgcatctgaagttccaggggacttcgggtgctaaatctgcccttgcactggaatggaaggctaatgctttcgttggtccggtgattcatacaaatgaggcacggcattttgccttttcccagcttgctgatggaattgagcttcccaatctttttgaagattgtgttgagtcgtgacttttccttgaatgtctttgcataaaggatttctgcctgccccattagaatctgataacaaaagccctgacttgtgtttattctgactcaaaaagtatgtggatggcagaaaacaagagaaataaag

SEQ ID NO: 290930 - DNA, 1214 bp, Homo sapiens
aggcccggggcagttaacccttctcttgctgcggcagagtccgcacccgggcaggcccatctcagaattaacgctttgatggcatcaccgcgtcgggaatccctggggatggtgttctccaccgtcaagacctttgagccgcctgagcgactaactcctgcgcccctgaggtcacagctacttggaaggctgagatgtgaagactacttgagctcagaagttccactgcactccagcctgggttacagagggaaaccttgtctctaaaaaaaagaaaaaagaaagaaagaaaaagaaaacataggacattttattcagaaattaaatcattcagagttccagcactgtcgggggtcatcgggctctgtccaccgccataggcctagcattgtcaccaacggagccatagagggacctcggcccaagctggggcctcttcattgtcgaagaaggcctcttgccagaccaggatctgtgggcgcggccaggctggaggactagggcggtggcagtggccaggtgagtgcacatggctgtgggtggtccctcaattgctccctcctctctttcgctaccccctgggctggagggaggcagggcacccagccggaatggcatgatcctgaagcccaacttccacaaggactggcagtggtgtggccatgtggctcagccagcccatggggcagacctgcagaagcaaggtggccagcaaaagcaggctgcatggcccactgatatgggcccatccacccatagtaaggtgccccatgctgaggcatcactacaaagcacaagctggcaggggcctcagcttggaggagttaagggtggctggcatttacaagaaggtggcccagaccattggcatctctgaggatgcaaggaggaggaaccagtccacccaggccctgcaggccaaggtgcagaggctgaaggaggaccgctcctcactcatcctcttccccaggaagcccttggcccccaagaagggagacagttctgctgaagaactcgaactggatactcagctgacaggaccagaaatgcccatcggcaatgtctacaaggagaaagccagagtcatcgctgactaggaggaaaacttccaggccttgttagtctctgtatggcccatgcaaatgcccagctcttcggcatataggcacaaagagccaaggaagctgtagaagaggacgcttaaaaaaaaaaaa

SEQ ID NO: 290931 - DNA, 763 bp, Homo sapiens
aggcccggggcagttaacccttctcttgctgcggcagagtccgcacccgggcaggcccatctcagaattaacgctttgatggcatcaccgcgtcgggaatccctggggatggtgttctccaccgtcaagacctttgagccgcctgagcgactaactcctgcgcccctgaggtcacagctacttggaaggctgagatgtgaagactacttgagctcagaagttccactgcactccagcctgggttacagagggaaaccttgtctctaaaaaaaagaaaaaagaaagaaagaaaaagaaaacataggacattttattcagaaattaaatcattcagagttccagcactgtcgggggtcatcgggctctgtccaccgccataggcctagcattgtcaccaacggagccatagagggacctcggcccaagctggggcctcttcattgtcgaagaaggcctcttgccagaccaggatctgtgggcgcggccaggctggaggactagggcggtggcagtggccaggaagcccttggcccccaagaagggagacagttctgctgaagaactcgaactggatactcagctgacaggaccagaaatgcccatcggcaatgtctacaaggagaaagccagagtcatcgctgactaggaggaaaacttccaggccttgttagtctctgtatggcccatgcaaatgcccagctcttcggcatataggcacaaagagccaaggaagctgtagaagaggacgcttaaaaaaaaaaaa

SEQ ID NO: 290932 - DNA, 1109 bp, Homo sapiens
  misc_feature (88)..(88): n is a, c, g, or t
  misc_feature (636)..(636): n is a, c, g, or t
gcagaaggcaagcccggaggcactttcaagaatgagcatatctcatcttcccggagaaaaaaaaaaaagaatggtacgtctgagaatnaaattttgaaagagtgcaatgatgggtcgtttgataatttgtcggaaaaacaatctacctgttatctagctttgggctaggccattccagttccagacgcaggctgaacgtcgtgaagcggaaggggcgggcccgcaggcgtccgtgtggtcctccgtgcagccctcggcccgagccggttcttcctggtaggaggcggaactcgaattcatttctcccgctgccccatctcttagctcgcggttgtttcattccgcagtttcttcccatgcacctgccgcgtaccggccactttgtgccgtacttacgtcatctttttcctaaatcgaggtggcatttacacacagcgccagtgcacacagcaagtgcacaggaagatgagttttggcccctaaccgctccgtgatgcctaccaagtcacagacccttttcatcgtcccagaaacgtttcatcacgtctcttcccagtcgattcccgaccccacctttattttgatctccataaccattttgcctgttggagaacttcatatagaatggaatcaggntgggcgctgtggctcacgcctgcactttgggaggccgaggcgggcggattacttgaggataggagttccagaccagcgtggccaacgtggtgaatccccgtctctactaaaaaatacaaaaattagctgggcgtggtgggtgcctgtaatcccagctattcgggagggtgaggcaggagaatcgcttgaacccgggaggcagaggttgcagtgagccaagatcgtgccactacactccagcctgggcgacaagaacgaaactccgtctcaaaaaaaaggggggaatcatacattatgtgctcatttttgtcgggcttctgtccttcaatgtactgtctgacattcgttcatgttgtatatatcagtattttgctccttttcatttagtatagtccatcgattgtatatccgtccttttgatggccttttgagttgtttcccatttgcggttatgaaataaagctgctataaac

SEQ ID NO: 290933 - DNA, 132 bp, Homo sapiens
gctcgacgaggaccctctgcaatttggcctgagactccagggtcctgaagagcactggactaagagtctagtggttccagggccctgaccagtaggtgctcaataaatgtttgttgttgaatgaaaaaaaaa

SEQ ID NO: 290934 - DNA, 3369 bp, Homo sapiens
aactggctccccctcttcctgtcctctttccctacccccgccctggctggtccacgtggaatgggggctgggaagactgagctggcctggccgggaggagcgggggagggggttgcaataggaggagggggccaggctgagtgtgttagagtctgagggaggcactacaaagaactctaggttccccctccccccatctccatccctggctgcgagacctggggcctggccagggagagaggctcgggaaagatgagaactctgagtggacaccaaaggaaaaaaaaaaaaaaaagttcaatgactttttccggagcccccgggtcctaaagccgggcggagatgaaccttgcttctttcgcgggcacttcgaattctagtcccctccaggtgggtggtgaagccgcggagtgtgagaggcatctccgtgctcatccgtgaccccagctgtactccaagggaaggcatctccagggaagagcagcttggtcccgcaaaagctggactgaaagaaggactttgtgacttgggatgtgacgggcacggagatggagtggggggtggtggcagcgcaaggtgtgcaggtgacagcaggtgtgtgcctccgacgtgggcgggggagacactcggagggtgcaggagggcgcagcgacggaaggcccggctccagggcttccttctcgtatgggcagcgcagaggaggcggccctcactcagtgtcctgatctcaggcgggggcactgtttgcatggggaggggcttcctgggcttcccatctctggcgggaagcgctccccgacgcattctctacctaggggacacccccaaggcaggagcccgggccgacggagaggacttaacgacactatcggaccctctgggaaaagaggggagacgtcgtgacccaggccccgccccaccttgccgcctcgtgcccggcgctaagacccagcgggcgcgccgcccgcccggggcccggccctgtccccttccgtccgcggggcagccagctcagctccggagagccggcggcgcggcgggcatggctcgggtggcgtgggggctgctgtggttgctgctgggcagcgccggggcgcagtacgagaagtacagcttccggggcttcccgcccgaggacctgatgccgctggccgcggcgtacgggcacgctctggagcagtacgagggagagagctggcgcgagagcgcgcgctacctggaggcggcgctgcggctgcaccggctcctgcgcgacagcgaggccttctgccacgccaactgcagcggccccgcgcccgcggccaagcccgatcccgacggcggccgcgcagacgagtgggcctgcgagctgcggctcttcggccgcgtcctggagcgagccgcctgcctgcggcgctgcaagcggacgctgcccgccttccaggtgccctacccgccgcggcagctgctgcgtgacttccagagccgcctgccctaccagtacctgcactacgcgctgttcaaggctaaccggctggagaaggcggtggcggcggcctacaccttcctccagaggaacccgaagcacgagctgaccgccaagtatctcaactactatcaggggatgctggacgtcgccgacgagtccctcacggacctagaggcccagccctacgaggccgtgttcctccgggctgtgaagctctacaacagcggggatttccgcagcagcacggaggacatggagcgggccttgtcagagtacctggcagtctttgcccggtgcctggccggctgtgaaggggcccatgagcaggtggacttcaaggacttctacccggccatagcagatctctttgcagagtccctgcagtgcaaggtggactgtgaggccaatttgacccccaatgtgggtggctacttcgtggacaagttcgtggccaccatgtaccactacctgcagtttgcctactataagttgaatgatgtgcgccaggctgcccgcagcgccgccagctacatgctcttcgaccccaaggacagcgtcatgcagcagaacctggtgtattaccggttccaccgggctcgctggggcctggaagaggaggacttccagccccgggaggaggccatgctctaccacaaccagaccgccgagctgcgggagctgctggagttcacccacatgtacctgcagtcagatgatgagatggagctggaggagacagaaccgcccctggagcctgaggatgccctatctgacgccgagtttgagggggagggtgactacgaggagggcatgtatgctgactggtggcaggagccggatgccaagggtgacgaggccgaggctgagccagagcctgaactcgcatgagaaggggacaccccacacccctcaagcttgggaagcctggtgccgatggccccaccctcaccagcctgggcagcagcaagaactatttattaaaaacttaagatgggccaggtgcggtggctcacacctgtaatcccagcattttgggaggccaaggtgggtggatcacttgaggccaggagttcaagaccagcctggccaacatgatgagacctccgtctctactaaaatacataaattagccgggtgtggtggcaggcgcctgaaatcccagctactcaagaggctgaggcaggagaatcgcttgaacctgggaggcaaaggttgcagtgaactgagattgcgccaccgcactccagcctgggcgacagagcgagactccatctttaaaaaaaaacaagacgggccggcacggtggctcacgcctgtaatcccagcactgagaggccgatcacttgaggtcaggagttcaagaccagcctggccaacatggtgaaaccccatctctactaaaaaatacaaaaattagccaggcatggtggcacacacctgtaatcgtagctgaggcaggagaatcgcctgaacccaggaggcggagcttgcagtgagccgagatcgtgccactgcactccagcctgggcgacagagtgagactccatctcaaaaaaaaaaaaaaaaaacttaagatggacacagctgactggacccccatcctgcctcacccatgggtgctgcaccccagacccatcctgccacttctatgtctctggaccacaggatggtggtggcattgcaggttggcaagtgggctgatggggtccgccctcctcactgctgagctcctcacctggacagtctcctggacgaggagtttccagctgctggctggagtctcaggccaaattgcagagggtcctccagggtcctgaagagcactggactaagagtctagtggttccagggccctgaccagtaggtgctcaataaatgtttgttgttgaatgaaaaaaaaa

SEQ ID NO: 290935 - DNA, 2390 bp, Homo sapiens
gctagtaggccggtggttatcggccgaggagctcagctccggagagccggcggcgcggcgggcatggctcgggtggcgtgggggctgctgtggttgctgctgggcagcgccggggcgcagtacgagaagtacagcttccggggcttcccgcccgaggacctgatgccgctggccgcggcgtacgggcacgctctggagcagtacgagggagagagctggcgcgagagcgcgcgctacctggaggcggcgctgcggctgcaccggctcctgcgcgacagcgaggccttctgccacgccaactgcagcggccccgcgcccgcggccaagcccgatcccgacggcggccgcgcagacgagtgggcctgcgagctgcggctcttcggccgcgtcctggagcgagccgcctgcctgcggcgctgcaagcggacgctgcccgccttccaggtgccctacccgccgcggcagctgctgcgtgacttccagagccgcctgccctaccagtacctgcactacgcgctgttcaaggctaaccggctggagaaggcggtggcggcggcctacaccttcctccagaggaacccgaagcacgagctgaccgccaagtatctcaactactatcaggggatgctggacgtcgccgacgagtccctcacggacctagaggcccagccctacgaggccgtgttcctccgggctgtgaagctctacaacagcggggatttccgcagcagcacggaggacatggagcgggccttgtcagagtacctggcagtctttgcccggtgcctggccggctgtgaaggggcccatgagcaggtggacttcaaggacttctacccggccatagcagatctctttgcagagtccctgcagtgcaaggtggactgtgaggccaatttgacccccaatgtgggtggctacttcgtggacaagttcgtggccaccatgtaccactacctgcagtttgcctactataagttgaatgatgtgcgccaggctgcccgcagcgccgccagctacatgctcttcgaccccaaggacagcgtcatgcagcagaacctggtgtattaccggttccaccgggctcgctggggcctggaagaggaggacttccagccccgggaggaggccatgctctaccacaaccagaccgccgagctgcgggagctgctggagttcacccacatgtacctgcagtcagatgatgagatggagctggaggagacagaaccgcccctggagcctgaggatgccctatctgacgccgagtttgagggggagggtgactacgaggagggcatgtatgctgactggtggcaggagccggatgccaagggtgacgaggccgaggctgagccagagcctgaactcgcatgagaaggggacaccccacacccctcaagcttgggaagcctggtgccgatggccccaccctcaccagcctgggcagcagcaagaactatttattaaaaacttaagatgggccaggtgcggtggctcacacctgtaatcccagcattttgggaggccaaggtgggtggatcacttgaggccaggagttcaagaccagcctggccaacatgatgagacctccgtctctactaaaatacataaattagccgggtgtggtggcaggcgcctgaaatcccagctactcaagaggctgaggcaggagaatcgcttgaacctgggaggcaaaggttgcagtgaactgagattgcgccaccgcactccagcctgggcgacagagcgagactccatctttaaaaaaaaacaagacgggccggcacggtggctcacgcctgtaatcccagcactgagaggccgatcacttgaggtcaggagttcaagaccagcctggccaacatggtgaaaccccatctctactaaaaaatacaaaaattagccaggcatggtggcacacacctgtaatcgtagctgaggcaggagaatcgcctgaacccaggaggcggagcttgcagtgagccgagatcgtgccactgcactccagcctgggcgacagagtgagactccatctcaaaaaaaaaaaaaaaaaacttaagatggacacagctgactggacccccatcctgcctcacccatgggtgctgcaccccagacccatcctgccacttctatgtctctggaccacaggatggtggtggcattgcaggttggcaagtgggctgatggggtccgccctcctcactgctgagctcctcacctggacagtctcctggacgaggagtttccagctgctggctggagtctcaggccaaattgcagagggtcctccagggtcctgaagagcactggactaagagtctagtggttccagggccctgaccagtaggtgctcaataaatgtttgttgttgaatgaaaaaaaaa

SEQ ID NO: 290936 - DNA, 3359 bp, Homo sapiens
aactggctccccctcttcctgtcctctttccctacccccgccctggctggtccacgtggaatgggggctgggaagactgagctggcctggccgggaggagcgggggagggggttgcaataggaggagggggccaggctgagtgtgttagagtctgagggaggcactacaaagaactctaggttccccctccccccatctccatccctggctgcgagacctggggcctggccagggagagaggctcgggaaagatgagaactctgagtggacaccaaaggaaaaaaaaaaaaaaaagttcaatgactttttccggagcccccgggtcctaaagccgggcggagatgaaccttgcttctttcgcgggcacttcgaattctagtcccctccaggtgggtggtgaagccgcggagtgtgagaggcatctccgtgctcatccgtgaccccagctgtactccaagggaaggcatctccagggaagagcagcttggtcccgcaaaagctggactgaaagaaggactttgtgacttgggatgtgacgggcacggagatggagtggggggtggtggcagcgcaaggtgtgcaggtgacagcaggtgtgtgcctccgacgtgggcgggggagacactcggagggtgcaggagggcgcagcgacggaaggcccggctccagggcttccttctcgtatgggcagcgcagaggaggcggccctcactcagtgtcctgatctcaggcgggggcactgtttgcatggggaggggcttcctgggcttcccatctctggcgggaagcgctccccgacgcattctctacctaggggacacccccaaggcaggagcccgggccgacggagaggacttaacgacactatcggaccctctgggaaaagaggggagacgtcgtgacccaggccccgccccaccttgccgcctcgtgcccggcgctaagacccagcgggcgcgccgcccgcccggggcccggccctgtccccttccgtccgcggggcagccagctcagctccggagagccggcggcgcggcgggcatggctcgggtggcgtgggggctgctgtggttgctgctgggcagcgccggggcgcagtacgagaagtacagcttccggggcttcccgcccgaggacctgatgccgctggccgcggcgtacgggcacgctctggagcagtacgagggagagagctggcgcgagagcgcgcgctacctggaggcggcgctgcggctgcaccggctcctgcgcgacagcgaggccttctgccacgccaactgcagcggccccgcgcccgcggccaagcccgatcccgacggcggccgcgcagacgagtgggcctgcgagctgcggctcttcggccgcgtcctggagcgagccgcctgcctgcggcgctgcaagcggacgctgcccgccttccaggtgccctacccgccgcggcagctgctgcgtgacttccagagccgcctgccctaccagtacctgcactacgcgctgttcaaggctaaccggctggagaaggcggtggcggcggcctacaccttcctccagaggaacccgaagcacgagctgaccgccaagtatctcaactactatcaggggatgctggacgtcgccgacgagtccctcacggacctagaggcccagccctacgaggccgtgttcctccgggctgtgaagctctacaacagcggggatttccgcagcagcacggaggacatggagcgggccttgtcagagtacctggcagtctttgcccggtgcctggccggctgtgaaggggcccatgagcaggtggacttcaaggacttctacccggccatagcagatctctttgcagagtccctgcagtgcaaggtggactgtgaggccaatttgacccccaatgtgggtggctacttcgtggacaagttcgtggccaccatgtaccactacctgcagtttgcctactataagttgaatgatgtgcgccaggctgcccgcagcgccgccagctacatgctcttcgaccccaaggacagcgtcatgcagcagaacctggtgtattaccggttccaccgggctcgctggggcctggaagaggaggacttccagccccgggaggaggccatgctctaccacaaccagaccgccgagctgcgggagctgctggagttcacccacatgtacctgcagtcagatgatgagatggagctggaggagacagaaccgcccctggagcctgaggatgccctatctgacgccgagtttgagggggagggtgactacgaggagggcatgtatgctgactggtggcaggagccggatgccaagggtgacgaggccgaggctgagccagagcctgaactcgcatgagaaggggacaccccacacccctcaagcttgggaagcctggtgccgatggccccaccctcaccagcctgggcagcagcaagaactatttattaaaaacttaagatgggccaggtgcggtggctcacacctgtaatcccagcattttgggaggccaaggtgggtggatcacttgaggccaggagttcaagaccagcctggccaacatgatgagacctccgtctctactaaaatacataaattagccgggtgtggtggcaggcgcctgaaatcccagctactcaagaggctgaggcaggagaatcgcttgaacctgggaggcaaaggttgcagtgaactgagattgcgccaccgcactccagcctgggcgacagagcgagactccatctttaaaaaaaaacaagacgggccggcacggtggctcacgcctgtaatcccagcactgagaggccgatcacttgaggtcaggagttcaagaccagcctggccaacatggtgaaaccccatctctactaaaaaatacaaaaattagccaggcatggtggcacacacctgtaatcgtagctgaggcaggagaatcgcctgaacccaggaggcggagcttgcagtgagccgagatcgtgccactgcactccagcctgggcgacagagtgagactccatctcaaaaaaaaaaaaaaaaaacttaagatggacacagctgactggacccccatcctgcctcacccatgggtgctgcaccccagacccatcctgccacttctatgtctctggaccacaggatggtggtggcattgcaggttggcaagtgggctgatggggtccgccctcctcactgctgagctcctcacctggacagtctcctggacgaggagtttccagctgctggctggagtctcagccccacttccaatggtctctcatgattctctatacctaatggtttatacttaatgggcttcaggggcctgaaaggtccgttatcaccagaaaggtgattgtgagca

SEQ ID NO: 290937 - DNA, 2928 bp, Homo sapiens
aactggctccccctcttcctgtcctctttccctacccccgccctggctggtccacgtggaatgggggctgggaagactgagctggcctggccgggaggagcgggggagggggttgcaataggaggagggggccaggctgagtgtgttagagtctgagggaggcactacaaagaactctaggttccccctccccccatctccatccctggctgcgagacctggggcctggccagggagagaggctcgggaaagatgagaactctgagtggacaccaaaggaaaaaaaaaaaaaaaagttcaatgactttttccggagcccccgggtcctaaagccgggcggagatgaaccttgcttctttcgcgggcacttcgaattctagtcccctccaggtgggtggtgaagccgcggagtgtgagaggcatctccgtgctcatccgtgaccccagctgtactccaagggaaggcatctccagggaagagcagcttggtcccgcaaaagctggactgaaagaaggactttgtgacttgggatgtgacgggcacggagatggagtggggggtggtggcagcgcaaggtgtgcaggtgacagcaggtgtgtgcctccgacgtgggcgggggagacactcggagggtgcaggagggcgcagcgacggaaggcccggctccagggcttccttctcgtatgggcagcgcagaggaggcggccctcactcagtgtcctgatctcaggcgggggcactgtttgcatggggaggggcttcctgggcttcccatctctggcgggaagcgctccccgacgcattctctacctaggggacacccccaaggcaggagcccgggccgacggagaggacttaacgacactatcggaccctctgggaaaagaggggagacgtcgtgacccaggccccgccccaccttgccgcctcgtgcccggcgctaagacccagcgggcgcgccgcccgcccggggcccggccctgtccccttccgtccgcggggcagccagctcagctccggagagccggcggcgcggcgggcatggctcgggtggcgtgggggctgctgtggttgctgctgggcagcgccggggcgcagtacgagaagtacagcttccggggcttcccgcccgaggacctgatgccgctggccgcggcgtacgggcacgctctggagcagtacgagggagagagctggcgcgagagcgcgcgctacctggaggcggcgctgcggctgcaccggctcctgcgcgacagcgaggccttctgccacgccaactgcagcggccccgcgcccgcggccaagcccgatcccgacggcggccgcgcagacgagtgggcctgcgagctgcggctcttcggccgcgtcctggagcgagccgcctgcctgcggcgctgcaagcggacgctgcccgccttccaggtgccctacccgccgcggcagctgctgcgtgacttccagagccgcctgccctaccagtacctgcactacgcgctgttcaaggctaaccggctggagaaggcggtggcggcggcctacaccttcctccagaggaacccgaagcacgagctgaccgccaagtatctcaactactatcaggggatgctggacgtcgccgacgagtccctcacggacctagaggcccagccctacgaggccgtgttcctccgggctgtgaagctctacaacagcggggatttccgcagcagcacggaggacatggagcgggccttgtcagagtacctggcagtctttgcccggtgcctggccggctgtgaaggggcccatgagcaggtggacttcaaggacttctacccggccatagcagatctctttgcagagtccctgcagtgcaaggtggactgtgaggccaatttgacccccaatgtgggtggctacttcgtggacaagttcgtggccaccatgtaccactacctgcagtttgcctactataagtcgatggccccaccctcaccagcctgggcagcagcaagaactatttattaaaaacttaagatgggccaggtgcggtggctcacacctgtaatcccagcattttgggaggccaaggtgggtggatcacttgaggccaggagttcaagaccagcctggccaacatgatgagacctccgtctctactaaaatacataaattagccgggtgtggtggcaggcgcctgaaatcccagctactcaagaggctgaggcaggagaatcgcttgaacctgggaggcaaaggttgcagtgaactgagattgcgccaccgcactccagcctgggcgacagagcgagactccatctttaaaaaaaaacaagacgggccggcacggtggctcacgcctgtaatcccagcactgagaggccgatcacttgaggtcaggagttcaagaccagcctggccaacatggtgaaaccccatctctactaaaaaatacaaaaattagccaggcatggtggcacacacctgtaatcgtagctgaggcaggagaatcgcctgaacccaggaggcggagcttgcagtgagccgagatcgtgccactgcactccagcctgggcgacagagtgagactccatctcaaaaaaaaaaaaaaaaaacttaagatggacacagctgactggacccccatcctgcctcacccatgggtgctgcaccccagacccatcctgccacttctatgtctctggaccacaggatggtggtggcattgcaggttggcaagtgggctgatggggtccgccctcctcactgctgagctcctcacctggacagtctcctggacgaggagtttccagctgctggctggagtctcaggccaaattgcagagggtcctccagggtcctgaagagcactggactaagagtctagtggttccagggccctgaccagtaggtgctcaataaatgtttgttgttgaatgaaaaaaaaa

SEQ ID NO: 290938 - DNA, 3374 bp, Homo sapiens
aactggctccccctcttcctgtcctctttccctacccccgccctggctggtccacgtggaatgggggctgggaagactgagctggcctggccgggaggagcgggggagggggttgcaataggaggagggggccaggctgagtgtgttagagtctgagggaggcactacaaagaactctaggttccccctccccccatctccatccctggctgcgagacctggggcctggccagggagagaggctcgggaaagatgagaactctgagtggacaccaaaggaaaaaaaaaaaaaaaagttcaatgactttttccggagcccccgggtcctaaagccgggcggagatgaaccttgcttctttcgcgggcacttcgaattctagtcccctccaggtgggtggtgaagccgcggagtgtgagaggcatctccgtgctcatccgtgaccccagctgtactccaagggaaggcatctccagggaagagcagcttggtcccgcaaaagctggactgaaagaaggactttgtgacttgggatgtgacgggcacggagatggagtggggggtggtggcagcgcaaggtgtgcaggtgacagcaggtgtgtgcctccgacgtgggcgggggagacactcggagggtgcaggagggcgcagcgacggaaggcccggctccagggcttccttctcgtatgggcagcgcagaggaggcggccctcactcagtgtcctgatctcaggcgggggcactgtttgcatggggaggggcttcctgggcttcccatctctggcgggaagcgctccccgacgcattctctacctaggggacacccccaaggcaggagcccgggccgacggagaggacttaacgacactatcggaccctctgggaaaagaggggagacgtcgtgacccaggccccgccccaccttgccgcctcgtgcccggcgctaagacccagcgggcgcgccgcccgcccggggcccggccctgtccccttccgtccgcggggcagccagctcagctccggagagccggcggcgcggcgggcatggctcgggtggcgtgggggctgctgtggttgctgctgggcagcgccggggcgcagtacgagaagtacagcttccggggcttcccgcccgaggacctgatgccgctggccgcggcgtacgggcacgctctggagcagtacgagggagagagctggcgcgagagcgcgcgctacctggaggcggcgctgcggctgcaccggctcctgcgcgacagcgaggccttctgccacgccaactgcagcggccccgcgcccgcggccaagcccgatcccgacggcggccgcgcagacgagtgggcctgcgagctgcggctcttcggccgcgtcctggagcgagccgcctgcctgcggcgctgcaagcggacgctgcccgccttccaggtgccctacccgccgcggcagctgctgcgtgacttccagagccgcctgccctaccagtacctgcactacgcgctgttcaaggctaaccggctggagaaggcggtggcggcggcctacaccttcctccagaggaacccgaagcacgagctgaccgccaagtatctcaactactatcaggggatgctggacgtcgccgacgagtccctcacggacctagaggcccagccctacgaggtggggtggagggtcaggaggaggcttgtagaggagggctagtagaggaggggagatgttgggggcgccctgactccccctgccacgccccttccaggccgtgttcctccgggctgtgaagctctacaacagcggggatttccgcagcagcacggaggacatggagcgggccttgtcagagtacctggcagtctttgcccggtgcctggccggctgtgaaggggcccatgagcaggtggacttcaaggacttctacccggccatagcaggtatctgccacccagaccacggtgggcggtcctctcacccacagggcccggtaaggcagatgtccccttcatgcacgtggagcactgcgaatgcggaggagccagccgggaggaaggccttgtctgttgagaaagacgctgggtgcaggggccccagctgggagtgtccaaggggctggatcagaggccatgctctaccacaaccagaccgccgagctgcgggagctgctggagttcacccacatgtacctgcagtcagatgatgagatggagctggaggagacagaaccgcccctggagcctgaggatgccctatctgacgccgagtttgagggggagggtgactacgaggagggcatgtatgctgactggtggcaggagccggatgccaagggtgacgaggccgaggctgagccagagcctgaactcgcatgagaaggggacaccccacacccctcaagcttgggaagcctggtgccgatggccccaccctcaccagcctgggcagcagcaagaactatttattaaaaacttaagatgggccaggtgcggtggctcacacctgtaatcccagcattttgggaggccaaggtgggtggatcacttgaggccaggagttcaagaccagcctggccaacatgatgagacctccgtctctactaaaatacataaattagccgggtgtggtggcaggcgcctgaaatcccagctactcaagaggctgaggcaggagaatcgcttgaacctgggaggcaaaggttgcagtgaactgagattgcgccaccgcactccagcctgggcgacagagcgagactccatctttaaaaaaaaacaagacgggccggcacggtggctcacgcctgtaatcccagcactgagaggccgatcacttgaggtcaggagttcaagaccagcctggccaacatggtgaaaccccatctctactaaaaaatacaaaaattagccaggcatggtggcacacacctgtaatcgtagctgaggcaggagaatcgcctgaacccaggaggcggagcttgcagtgagccgagatcgtgccactgcactccagcctgggcgacagagtgagactccatctcaaaaaaaaaaaaaaaaaacttaagatggacacagctgactggacccccatcctgcctcacccatgggtgctgcaccccagacccatcctgccacttctatgtctctggaccacaggatggtggtggcattgcaggttggcaagtgggctgatggggtccgccctcctcactgctgagctcctcacctggacagtctcctggacgaggagtttccagctgctggctggagtctcaggccaaattgcagagggtcctccagggtcctgaagagcactggactaagagtctagtggttccagggccctgaccagtaggtgctcaataaatgtttgttgttgaatgaaaaaaaaa

SEQ ID NO: 290939 - DNA, 2428 bp, Homo sapiens
aactggctccccctcttcctgtcctctttccctacccccgccctggctggtccacgtggaatgggggctgggaagactgagctggcctggccgggaggagcgggggagggggttgcaataggaggagggggccaggctgagtgtgttagagtctgagggaggcactacaaagaactctaggttccccctccccccatctccatccctggctgcgagacctggggcctggccagggagagaggctcgggaaagatgagaactctgagtggacaccaaaggaaaaaaaaaaaaaaaagttcaatgactttttccggagcccccgggtcctaaagccgggcggagatgaaccttgcttctttcgcgggcacttcgaattctagtcccctccaggtgggtggtgaagccgcggagtgtgagaggcatctccgtgctcatccgtgaccccagctgtactccaagggaaggcatctccagggaagagcagcttggtcccgcaaaagctggactgaaagaaggactttgtgacttgggatgtgacgggcacggagatggagtggggggtggtggcagcgcaaggtgtgcaggtgacagcaggtgtgtgcctccgacgtgggcgggggagacactcggagggtgcaggagggcgcagcgacggaaggcccggctccagggcttccttctcgtatgggcagcgcagaggaggcggccctcactcagtgtcctgatctcaggcgggggcactgtttgcatggggaggggcttcctgggcttcccatctctggcgggaagcgctccccgacgcattctctacctaggggacacccccaaggcaggagcccgggccgacggagaggacttaacgacactatcggaccctctgggaaaagaggggagacgtcgtgacccaggccccgccccaccttgccgcctcgtgcccggcgctaagacccagcgggcgcgccgcccgcccggggcccggccctgtccccttccgtccgcggggcagccagctcagctccggagagccggcggcgcggcgggcatggctcgggtggcgtgggggctgctgtggttgctgctgggcagcgccggggcgcagtacgagaagtacagcttccggggcttcccgcccgaggacctgatgccgctggccgcggcgtacgggcacgctctggagcagtacgagggagagagctggcgcgagagcgcgcgctacctggaggcggcgctgcggctgcaccggctcctgcgcgacagcgaggccttctgccacgccaactgcagcggccccgcgcccgcggccaagcccgatcccgacggcggccgcgcagacgagtgggcctgcgagctgcggctcttcggccgcgtcctggagcgagccgcctgcctgcggcgctgcaagcggacgctgcccgccttccaggtgccctacccgccgcggcagctgctgcgtgacttccagagccgcctgccctaccagtacctgcactacgcgctgttcaaggctaaccggctggagaaggcggtggcggcggcctacaccttcctccagaggaacccgaagcacgagctgaccgccaagtatctcaactactatcaggggatgctggacgtcgccgacgagtccctcacggacctagaggcccagccctacgaggtggggtggagggtcaggaggaggcttgtagaggagggctagtagaggaggggagatgttgggggcgccctgactccccctgccacgccccttccaggccgtgttcctccgggctgtgaagctctacaacagcggggatttccgcagcagcacggaggacatggagcgggccttgtcagagtacctggcagtctttgcccggtgcctggccggctgtgaaggggcccatgagcaggtggacttcaaggacttctacccggccatagcaggtatctgccacccagaccacggtgggcggtcctctcacccacagggcccggtaaggcagatgtccccttcatgcacgtggagcactgcgaatgcggaggagccagccgggaggaaggccttgtctgttgagaaagacgctgggtgcaggggccccagctgggagtgtccaaggggctggatcagaggccatgctctaccacaaccagaccgccgagctgcgggagctgctggagttcacccacatgtacctgcagtcagatgatgagagccagagcctgaactcgcatgagaaggggacaccccacacccctcaagcttgggaagcctggtgccgatggccccaccctcaccagcctgggcagcagcaagaactatttattaaaaacttaagatgggcagtggggggtcaactgtgatccagattgggaggcaggggggtactggggggacggggtagacagtgggaatgtgaaatcggtttaaaaataatacggggggggg

SEQ ID NO: 290940 - DNA, 355 bp, Homo sapiens
cggccgcgcagacgagtgggcctgcgagctgcggctcttcggccgcgtcctggagcgagccgcctgcctgcggcgctgcaagcggacgctgcccgccttccaggtgccctacccgccgcggcagctgctgcgtgacttccagagccgcctgccctaccagtacctgcactacgcgctgttcaagaggtgggagcccgcccccacccggggacctgtctcgggctgggcgtcgtggctccccacagatcggtcgaaggagcgttatcttcacccaaggcacgaagcccgccgtgcgctcggggccgcgagctccggtcttgctgacccgctcccccaccccctaccccccgaccag

SEQ ID NO: 290941 - DNA, 419 bp, Homo sapiens
agcgggccttgtcagagtacctggcagtctttgcccggtgcctggccggctgtgaaggggcccatgagcaggtggacttcaaggacttctacccggccatagcaggtatctgccacccagaccacggtgggcggtcctctcacccacagggcccggtaaggcagatgtccccttcatgcacgtggagcactgcgaatgcggaggagccagccgggaggaaggccttgtctgttgagaaagacgctgggtgcaggggccccagctgggagtgtccaaggggctggatcagtgagtagaggcagtgacatccctaaagggtttgggaagcttgggttcataggccttccaggcagagggcagtgcagatgcaaaggtgcagcggtgagaagtaacccagcagatgtgtgcagaaagcagtt

SEQ ID NO: 290942 - DNA, 2930 bp, Homo sapiens
aactggctccccctcttcctgtcctctttccctacccccgccctggctggtccacgtggaatgggggctgggaagactgagctggcctggccgggaggagcgggggagggggttgcaataggaggagggggccaggctgagtgtgttagagtctgagggaggcactacaaagaactctaggttccccctccccccatctccatccctggctgcgagacctggggcctggccagggagagaggctcgggaaagatgagaactctgagtggacaccaaaggaaaaaaaaaaaaaaaagttcaatgactttttccggagcccccgggtcctaaagccgggcggagatgaaccttgcttctttcgcgggcacttcgaattctagtcccctccaggcaggagcccgggccgacggagaggacttaacgacactatcggaccctctgggaaaagaggggagacgtcgtgacccaggccccgccccaccttgccgcctcgtgcccggcgctaagacccagcgggcgcgccgcccgcccggggcccggccctgtccccttccgtccgcggggcagccagctcagctccggagagccggcggcgcggcgggcatggctcgggtggcgtgggggctgctgtggttgctgctgggcagcgccggggcgcagtacgagaagtacagcttccggggcttcccgcccgaggacctgatgccgctggccgcggcgtacgggcacgctctggagcagtacgagggagagagctggcgcgagagcgcgcgctacctggaggcggcgctgcggctgcaccggctcctgcgcgacagcgaggccttctgccacgccaactgcagcggccccgcgcccgcggccaagcccgatcccgacggcggccgcgcagacgagtgggcctgcgagctgcggctcttcggccgcgtcctggagcgagccgcctgcctgcggcgctgcaagcggacgctgcccgccttccaggtgccctacccgccgcggcagctgctgcgtgacttccagagccgcctgccctaccagtacctgcactacgcgctgttcaaggctaaccggctggagaaggcggtggcggcggcctacaccttcctccagaggaacccgaagcacgagctgaccgccaagtatctcaactactatcaggggatgctggacgtcgccgacgagtccctcacggacctagaggcccagccctacgaggccgtgttcctccgggctgtgaagctctacaacagcggggatttccgcagcagcacggaggacatggagcgggccttgtcagagtacctggcagtctttgcccggtgcctggccggctgtgaaggggcccatgagcaggtggacttcaaggacttctacccggccatagcagatctctttgcagagtccctgcagtgcaaggtggactgtgaggccaatttgacccccaatgtgggtggctacttcgtggacaagttcgtggccaccatgtaccactacctgcagtttgcctactataagttgaatgatgtgcgccaggctgcccgcagcgccgccagctacatgctcttcgaccccaaggacagcgtcatgcagcagaacctggtgtattaccggttccaccgggctcgctggggcctggaagaggaggacttccagccccgggaggaggccatgctctaccacaaccagaccgccgagctgcgggagctgctggagttcacccacatgtacctgcagtcagatgatgagatggagctggaggagacagaaccgcccctggagcctgaggatgccctatctgacgccgagtttgagggggagggtgactacgaggagggcatgtatgctgactggtggcaggagccggatgccaagggtgacgaggccgaggctgagccagagcctgaactcgcatgagaaggggacaccccacacccctcaagcttgggaagcctggtgccgatggccccaccctcaccagcctgggcagcagcaagaactatttattaaaaacttaagatgggccaggtgcggtggctcacacctgtaatcccagcattttgggaggccaaggtgggtggatcacttgaggccaggagttcaagaccagcctggccaacatgatgagacctccgtctctactaaaatacataaattagccgggtgtggtggcaggcgcctgaaatcccagctactcaagaggctgaggcaggagaatcgcttgaacctgggaggcaaaggttgcagtgaactgagattgcgccaccgcactccagcctgggcgacagagcgagactccatctttaaaaaaaaacaagacgggccggcacggtggctcacgcctgtaatcccagcactgagaggccgatcacttgaggtcaggagttcaagaccagcctggccaacatggtgaaaccccatctctactaaaaaatacaaaaattagccaggcatggtggcacacacctgtaatcgtagctgaggcaggagaatcgcctgaacccaggaggcggagcttgcagtgagccgagatcgtgccactgcactccagcctgggcgacagagtgagactccatctcaaaaaaaaaaaaaaaaaacttaagatggacacagctgactggacccccatcctgcctcacccatgggtgctgcaccccagacccatcctgccacttctatgtctctggaccacaggatggtggtggcattgcaggttggcaagtgggctgatggggtccgccctcctcactgctgagctcctcacctggacagtctcctggacgaggagtttccagctgctggctggagtctcaggccaaattgcagagggtcctccagggtcctgaagagcactggactaagagtctagtggttccagggccctgaccagtaggtgctcaataaatgtttgttgttgaatgaaaaaaaaa

SEQ ID NO: 290943 - DNA, 2402 bp, Homo sapiens
aaataggctaggtcggaggctgggtggttaatcggccgaggagctcagctccggagagccggcggcgcggcgggcatggctcgggtggcgtgggggctgctgtggttgctgctgggcagcgccggggcgcagtacgagaagtacagcttccggggcttcccgcccgaggacctgatgccgctggccgcggcgtacgggcacgctctggagcagtacgagggagagagctggcgcgagagcgcgcgctacctggaggcggcgctgcggctgcaccggctcctgcgcgacagcgaggccttctgccacgccaactgcagcggccccgcgcccgcggccaagcccgatcccgacggcggccgcgcagacgagtgggcctgcgagctgcggctcttcggccgcgtcctggagcgagccgcctgcctgcggcgctgcaagcggacgctgcccgccttccaggtgccctacccgccgcggcagctgctgcgtgacttccagagccgcctgccctaccagtacctgcactacgcgctgttcaaggctaaccggctggagaaggcggtggcggcggcctacaccttcctccagaggaacccgaagcacgagctgaccgccaagtatctcaactactatcaggggatgctggacgtcgccgacgagtccctcacggacctagaggcccagccctacgaggccgtgttcctccgggctgtgaagctctacaacagcggggatttccgcagcagcacggaggacatggagcgggccttgtcagagtacctggcagtctttgcccggtgcctggccggctgtgaaggggcccatgagcaggtggacttcaaggacttctacccggccatagcagatctctttgcagagtccctgcagtgcaaggtggactgtgaggccaatttgacccccaatgtgggtggctacttcgtggacaagttcgtggccaccatgtaccactacctgcagtttgcctactataagttgaatgatgtgcgccaggctgcccgcagcgccgccagctacatgctcttcgaccccaaggacagcgtcatgcagcagaacctggtgtattaccggttccaccgggctcgctggggcctggaagaggaggacttccagccccgggaggaggccatgctctaccacaaccagaccgccgagctgcgggagctgctggagttcacccacatgtacctgcagtcagatgatgagatggagctggaggagacagaaccgcccctggagcctgaggatgccctatctgacgccgagtttgagggggagggtgactacgaggagggcatgtatgctgactggtggcaggagccggatgccaagggtgacgaggccgaggctgagccagagcctgaactcgcatgagaaggggacaccccacacccctcaagcttgggaagcctggtgccgatggccccaccctcaccagcctgggcagcagcaagaactatttattaaaaacttaagatgggccaggtgcggtggctcacacctgtaatcccagcattttgggaggccaaggtgggtggatcacttgaggccaggagttcaagaccagcctggccaacatgatgagacctccgtctctactaaaatacataaattagccgggtgtggtggcaggcgcctgaaatcccagctactcaagaggctgaggcaggagaatcgcttgaacctgggaggcaaaggttgcagtgaactgagattgcgccaccgcactccagcctgggcgacagagcgagactccatctttaaaaaaaaacaagacgggccggcacggtggctcacgcctgtaatcccagcactgagaggccgatcacttgaggtcaggagttcaagaccagcctggccaacatggtgaaaccccatctctactaaaaaatacaaaaattagccaggcatggtggcacacacctgtaatcgtagctgaggcaggagaatcgcctgaacccaggaggcggagcttgcagtgagccgagatcgtgccactgcactccagcctgggcgacagagtgagactccatctcaaaaaaaaaaaaaaaaaacttaagatggacacagctgactggacccccatcctgcctcacccatgggtgctgcaccccagacccatcctgccacttctatgtctctggaccacaggatggtggtggcattgcaggttggcaagtgggctgatggggtccgccctcctcactgctgagctcctcacctggacagtctcctggacgaggagtttccagctgctggctggagtctcaggccaaattgcagagggtcctccagggtcctgaagagcactggactaagagtctagtggttccagggccctgaccagtaggtgctcaataaatgtttgttgttgaatgaaaaaaaaa

SEQ ID NO: 290944 - DNA, 3277 bp, Homo sapiens
aactggctccccctcttcctgtcctctttccctacccccgccctggctggtccacgtggaatgggggctgggaagactgagctggcctggccgggaggagcgggggagggggttgcaataggaggagggggccaggctgagtgtgttagagtctgagggaggcactacaaagaactctaggttccccctccccccatctccatccctggctgcgagacctggggcctggccagggagagaggctcgggaaagatgagaactctgagtggacaccaaaggaaaaaaaaaaaaaaaagttcaatgactttttccggagcccccgggtcctaaagccgggcggagatgaaccttgcttctttcgcgggcacttcgaattctagtcccctccaggtgggtggtgaagccgcggagtgtgagaggcatctccgtgctcatccgtgaccccagctgtactccaagggaaggcatctccagggaagagcagcttggtcccgcaaaagctggactgaaagaaggactttgtgacttgggatgtgacgggcacggagatggagtggggggtggtggcagcgcaaggtgtgcaggtgacagcaggtgtgtgcctccgacgtgggcgggggagacactcggagggtgcaggagggcgcagcgacggaaggcccggctccagggcttccttctcgtatgggcagcgcagaggaggcggccctcactcagtgtcctgatctcaggcgggggcactgtttgcatggggaggggcttcctgggcttcccatctctggcgggaagcgctccccgacgcattctctacctaggggacacccccaaggcaggagcccgggccgacggagaggacttaacgacactatcggaccctctgggaaaagaggggagacgtcgtgacccaggccccgccccaccttgccgcctcgtgcccggcgctaagacccagcgggcgcgccgcccgcccggggcccggccctgtccccttccgtccgcggggcagccagctcagctccggagagccggcggcgcggcgggcatggctcgggtggcgtgggggctgctgtggttgctgctgggcagcgccggggcgcagtacgagaagtacagcttccggggcttcccgcccgaggacctgatgccgctggccgcggcgtacgggcacgctctggagcagtacgagggagagagctggcgcgagagcgcgcgctacctggaggcggcgctgcggctgcaccggctcctgcgcgacagcgaggccttctgccacgccaactgcagcggccccgcgcccgcggccaagcccgatcccgacggcggccgcgcagacgagtgggcctgcgagctgcggctcttcggccgcgtcctggagcgagccgcctgcctgcggcgctgcaagcggacgctgcccgccttccaggtgccctacccgccgcggcagctgctgcgtgacttccagagccgcctgccctaccagtacctgcactacgcgctgttcaaggctaaccggctggagaaggcggtggcggcggcctacaccttcctccagaggaacccgaagcacgagctgaccgccaagtatctcaactactatcaggggatgctggacgtcgccgacgagtccctcacggacctagaggcccagccctacgaggccgtgttcctccgggctgtgaagctctacaacagcggggatttccgcagcagcacggaggacatggagcgggccttgtcagagtacctggcagtctttgcccggtgcctggccggctgtgaaggggcccatgagcaggtggacttcaaggacttctacccggccatagcaggtatctgccacccagaccacggtgggcggtcctctcacccacagggcccggtaaggcagatgtccccttcatgcacgtggagcactgcgaatgcggaggagccagccgggaggaaggccttgtctgttgagaaagacgctgggtgcaggggccccagctgggagtgtccaaggggctggatcagaggccatgctctaccacaaccagaccgccgagctgcgggagctgctggagttcacccacatgtacctgcagtcagatgatgagatggagctggaggagacagaaccgcccctggagcctgaggatgccctatctgacgccgagtttgagggggagggtgactacgaggagggcatgtatgctgactggtggcaggagccggatgccaagggtgacgaggccgaggctgagccagagcctgaactcgcatgagaaggggacaccccacacccctcaagcttgggaagcctggtgccgatggccccaccctcaccagcctgggcagcagcaagaactatttattaaaaacttaagatgggccaggtgcggtggctcacacctgtaatcccagcattttgggaggccaaggtgggtggatcacttgaggccaggagttcaagaccagcctggccaacatgatgagacctccgtctctactaaaatacataaattagccgggtgtggtggcaggcgcctgaaatcccagctactcaagaggctgaggcaggagaatcgcttgaacctgggaggcaaaggttgcagtgaactgagattgcgccaccgcactccagcctgggcgacagagcgagactccatctttaaaaaaaaacaagacgggccggcacggtggctcacgcctgtaatcccagcactgagaggccgatcacttgaggtcaggagttcaagaccagcctggccaacatggtgaaaccccatctctactaaaaaatacaaaaattagccaggcatggtggcacacacctgtaatcgtagctgaggcaggagaatcgcctgaacccaggaggcggagcttgcagtgagccgagatcgtgccactgcactccagcctgggcgacagagtgagactccatctcaaaaaaaaaaaaaaaaaacttaagatggacacagctgactggacccccatcctgcctcacccatgggtgctgcaccccagacccatcctgccacttctatgtctctggaccacaggatggtggtggcattgcaggttggcaagtgggctgatggggtccgccctcctcactgctgagctcctcacctggacagtctcctggacgaggagtttccagctgctggctggagtctcaggccaaattgcagagggtcctccagggtcctgaagagcactggactaagagtctagtggttccagggccctgaccagtaggtgctcaataaatgtttgttgttgaatgaaaaaaaaa

SEQ ID NO: 290945 - DNA, 2963 bp, Homo sapiens
aactggctccccctcttcctgtcctctttccctacccccgccctggctggtccacgtggaatgggggctgggaagactgagctggcctggccgggaggagcgggggagggggttgcaataggaggagggggccaggctgagtgtgttagagtctgagggaggcactacaaagaactctaggttccccctccccccatctccatccctggctgcgagacctggggcctggccagggagagaggctcgggaaagatgagaactctgagtggacaccaaaggaaaaaaaaaaaaaaaagttcaatgactttttccggagcccccgggtcctaaagccgggcggagatgaaccttgcttctttcgcgggcacttcgaattctagtcccctccaggtgggtggtgaagccgcggagtgtgagaggcatctccgtgctcatccgtgaccccagctgtactccaagggaaggcatctccagggaagagcagcttggtcccgcaaaagctggactgaaagaaggactttgtgacttgggatgtgacgggcacggagatggagtggggggtggtggcagcgcaaggtgtgcaggtgacagcaggtgtgtgcctccgacgtgggcgggggagacactcggagggtgcaggagggcgcagcgacggaaggcccggctccagggcttccttctcgtatgggcagcgcagaggaggcggccctcactcagtgtcctgatctcaggcgggggcactgtttgcatggggaggggcttcctgggcttcccatctctggcgggaagcgctccccgacgcattctctacctaggggacacccccaaggcaggagcccgggccgacggagaggacttaacgacactatcggaccctctgggaaaagaggggagacgtcgtgacccaggccccgccccaccttgccgcctcgtgcccggcgctaagacccagcgggcgcgccgcccgcccggggcccggccctgtccccttccgtccgcggggcagccagctcagctccggagagccggcggcgcggcgggcatggctcgggtggcgtgggggctgctgtggttgctgctgggcagcgccggggcgcagtacgagaagtacagcttccggggcttcccgcccgaggacctgatgccgctggccgcggcgtacgggcacgctctggagcagtacgagggagagagctggcgcgagagcgcgcgctacctggaggcggcgctgcggctgcaccggctcctgcgcgacagcgaggccttctgccacgccaactgcagcggccccgcgcccgcggccaagcccgatcccgacggcggccgcgcagacgagtgggcctgcgagctgcggctcttcggccgcgtcctggagcgagccgcctgcctgcggcgctgcaagcggacgctgcccgccttccaggtgccctacccgccgcggcagctgctgcgtgacttccagagccgcctgccctaccagtacctgcactacgcgctgttcaaggctaaccggctggagaaggcggtggcggcggcctacaccttcctccagaggaacccgaagcacgagctgaccgccaagtatctcaactaatgctcttcgaccccaaggacagcgtcatgcagcagaacctggtgtattaccggttccaccgggctcgctggggcctggaagaggaggacttccagccccgggaggaggccatgctctaccacaaccagaccgccgagctgcgggagctgctggagttcacccacatgtacctgcagtcagatgatgagatggagctggaggagacagaaccgcccctggagcctgaggatgccctatctgacgccgagtttgagggggagggtgactacgaggagggcatgtatgctgactggtggcaggagccggatgccaagggtgacgaggccgaggctgagccagagcctgaactcgcatgagaaggggacaccccacacccctcaagcttgggaagcctggtgccgatggccccaccctcaccagcctgggcagcagcaagaactatttattaaaaacttaagatgggccaggtgcggtggctcacacctgtaatcccagcattttgggaggccaaggtgggtggatcacttgaggccaggagttcaagaccagcctggccaacatgatgagacctccgtctctactaaaatacataaattagccgggtgtggtggcaggcgcctgaaatcccagctactcaagaggctgaggcaggagaatcgcttgaacctgggaggcaaaggttgcagtgaactgagattgcgccaccgcactccagcctgggcgacagagcgagactccatctttaaaaaaaaacaagacgggccggcacggtggctcacgcctgtaatcccagcactgagaggccgatcacttgaggtcaggagttcaagaccagcctggccaacatggtgaaaccccatctctactaaaaaatacaaaaattagccaggcatggtggcacacacctgtaatcgtagctgaggcaggagaatcgcctgaacccaggaggcggagcttgcagtgagccgagatcgtgccactgcactccagcctgggcgacagagtgagactccatctcaaaaaaaaaaaaaaaaaacttaagatggacacagctgactggacccccatcctgcctcacccatgggtgctgcaccccagacccatcctgccacttctatgtctctggaccacaggatggtggtggcattgcaggttggcaagtgggctgatggggtccgccctcctcactgctgagctcctcacctggacagtctcctggacgaggagtttccagctgctggctggagtctcaggccaaattgcagagggtcctccagggtcctgaagagcactggactaagagtctagtggttccagggccctgaccagtaggtgctcaataaatgtttgttgttgaatgaaaaaaaaa

SEQ ID NO: 290946 - DNA, 1757 bp, Homo sapiens
  misc_feature (1670)..(1670): n is a, c, g, or t
  misc_feature (1731)..(1731): n is a, c, g, or t
  misc_feature (1754)..(1754): n is a, c, g, or t
aactggctccccctcttcctgtcctctttccctacccccgccctggctggtccacgtggaatgggggctgggaagactgagctggcctggccgggaggagcgggggagggggttgcaataggaggagggggccaggctgagtgtgttagagtctgagggaggcactacaaagaactctaggttccccctccccccatctccatccctggctgcgagacctggggcctggccagggagagaggctcgggaaagatgagaactctgagtggacaccaaaggaaaaaaaaaaaaaaaagttcaatgactttttccggagcccccgggtcctaaagccgggcggagatgaaccttgcttctttcgcgggcacttcgaattctagtcccctccaggtgggtggtgaagccgcggagtgtgagaggcatctccgtgctcatccgtgaccccagctgtactccaagggaaggcatctccagggaagagcagcttggtcccgcaaaagctggactgaaagaaggactttgtgacttgggatgtgacgggcacggagatggagtggggggtggtggcagcgcaaggtgtgcaggtgacagcaggtgtgtgcctccgacgtgggcgggggagacactcggagggtgcaggagggcgcagcgacggaaggcccggctccagggcttccttctcgtatgggcagcgcagaggaggcggccctcactcagtgtcctgatctcaggcgggggcactgtttgcatggggaggggcttcctgggcttcccatctctggcgggaagcgctccccgacgcattctctacctaggggacacccccaaggcaggagcccgggccgacggagaggacttaacgacactatcggaccctctgggaaaagaggggagacgtcgtgacccaggccccgccccaccttgccgcctcgtgcccggcgctaagacccagcgggcgcgccgcccgcccggggcccggccctgtccccttccgtccgcggggcagccagctcagctccggagagccggcggcgcggcgggcatggctcgggtggcgtgggggctgctgtggttgctgctgggcagcgccggggcgcagtacgagaagtacagcttccggggcttcccgcccgaggacctgatgccgctggccgcggcgtacgggcacgctctggagcagtacgagggagagagctggcgcgagagcgcgcgctacctggaggcggcgctgcggctgcaccggctcctgcgcgacagcgaggccttctgccacgccaactgcagcggccccgcgcccgcggccaagcccgatcccgacggcggccgcgcagacgagtgggcctgcgagctgcggctcttcggccgcgtcctggagcgagccgcctgcctgcggcgctgcaagcggacgctgcccgccttccaggtgccctacccgccgcggcagctgctgcgtgacttccagagccgcctgccctaccagtacctgcactacgcgctgttcaagtgaatgatgtgcgccaggctgcccgcagcgccgccagctacatgctcttcgaccccaaggacagcgtcatgcagcagaacctggtgtattaccggttccaccgggctcgctggggcctggaagaggaggacttccagccccgggagctaccacaaccaggaaccgncgagctgccgggaacttgcttggaagtttaaccccaacaatggttaaccccttgccaagtncaggaatgggaattgaaggaatnggg

SEQ ID NO: 290947 - DNA, 450 bp, Homo sapiens
tggtgccactcctgccttccttgtcagtggcagacattgctaatcgattgagggactctttgtcaccaaactctcagaatccttaacccagtgttccaagcagccacgatgatctgatgagcttgtgagctgatacctattctctgatccttgagctagaagagggccagtgggcccagatcctaggagccctggcttcttgccatctggcaacagggtatggctcaccccccaccccgtccttccctccttccaggaggccatgctctaccacaaccagaccgccgagctgcgggagctgctggagttcacccacatgtacctgcagtcagatgatgaggtgagtgcctcctgctttccaggattgggctgtgatggggacaccttggaccttttcctggggccaccagtgtgccagaattcagccccagcccctggtggtcagctgtc

SEQ ID NO: 290948 - DNA, 1496 bp, Homo sapiens
cgggtggggacgctggtcgctgccgggggcaagtctgccgactccagaaagaaaggcgaaagaatagattgtgaagctaagtgctgtgagggaaaccagaggcagctgagatgtcgtggaagtaacagcgaatgaagccaggatgctggattctgaccttggaactgttctgagaggctgtttgatgcaagactcccacctgcgggtatcatagtccagggtaaggccattgggccaacccaggtctgtgttgatgaggaccttccgctcagaaccatccaagtttgcccgttcgatcttggcaatgtggccccagtctgtccagaagaggtacctgagacacaacagtgccatcatcatcaaggcatgggaagacagcacccagaggttgagagaacacagaggacccactaacaccatctttccacccagcccttcttccctggatctctcttctgctggccataaacttaccccttcctggggaaaacagcaatggcccggggctcatccaggctattgttgatcagtactttgcggcaggaaccatccagcctggacgcctcaatggtatttcgacctgtgtctgtccagtacaggttcctggccacccagtccactgccagcccgtcagtggtcttcagccctcgcccgatcactgtctccatgttgctgccgttcaggtctgctcgccttggggagagcccagtgttggatgagcaaccagactgacccagaatagagtagaactttaacccatgttcccataactggaccccactgaactgtaagctccacagggatagagaccaggtatctatgagtacattcctcagcacccagcatgatagatgctcaataaaataattgcagaatgaaggaaccagttcttaggaggacacagtatttcctgctaactggacataatggcggttgccaggggatgtcttgctagaagacaagtttatcattccccacatacctttgggaagagacaaggattgctaggtggtgatgataagaaacgcagatttgtcaaaaccaacctgtgcattttttaaaagttaaaaacaattttaaatacaagtagatatgaggtttcattatgttgcctaggctggtcttgaactcctgggctcaagcaatcttcccgccttggcctcccaaagtgctgggattataggcgcgagctaccacgccagaccctaactgtgcacttttgcaaaggccctatgggcaggagggaactctacctcagaatggggagcatgtcactgtcacctaggggacttccctaaactgtatatgcctacctgtccccagtttgagattctaatacatcccttggggagagcaaaggggaatgttccctgttcctccatgtgagaatatctgccatggtaaaccactcttactggtggcaggacatcatattcctaagctgtgttagggccacaaatttaaagactaaaaataaaacaacgaaaaaataaaaa

SEQ ID NO: 290949 - DNA, 475 bp, Homo sapiens
gtctccgaggcagattgcgtgcgggaagaggctcccgctgaactccagcgccacgcgctgcacgtagctaactgacctcatggcacctccaagagcagagggagcggagaggcccagtaaatattccctgaacccccgtcgcgacagccgccagagcggaaggccacctaaggcagcaagttacgtcactgcctgaacctccaatctctgcctcttcctcctttaaccttacagaggaggcgggtcttccgggcttggaggcgggcttcccaactctgatgatgcagagctggaagaaacctcaggaatgctttcgattttgcagatgaggacagaagcccaggacttgccaaaggaacctcatgggagagtctggattagttcagagacctcacctttccatttaacttctgagtcttggttttcttatctgtaaatagggttattaaagttataccttctttgtaaaaaaaaa

SEQ ID NO: 290950 - DNA, 358 bp, Homo sapiens
cctgagaatcttactaatcttcgtaataactgataattgcatggttttgaaaagtgtttttaaaaaactacccattaggagtgaaaacaatgtagtgagttgcaatcagcatataaaaaattaaatacaatagtaatataccaagtgactcccaggtagtaaggatgcagagctggaagaaacctcaggaatgctttcgattttgcagatgaggacagaagcccaggacttgccaaaggaacctcatgggagagtctggattagttcagagacctcacctttccatttaacttctgagtcttggttttcttatctgtaaatagggttattaaagttataccttctttgtaaaaaaaaa

SEQ ID NO: 290951 - DNA, 2164 bp, Homo sapiens
gcaaagccagctgggctcctgagtccggtgggtacttggagaacttactacgtctagctggaggattgtaaatgcaccaatcagcatgctgtgtctagctcaagattttctccatccccttattttgggccagtggctgtcattacatatgagatgagtctcttgaagactacagatgaactcaagctccatgaggagatgtttcattgtcgagagcagtcatgatggcctgcactccacacaatgcaacagagtgaaagagcaggttctgcttctttggtgtagtcctgaagcttcctaagaaacttcacatcaggtgatggataggagcaaccctgtaaaaccagccttagactatttttcaaacaggctggtgaattaccagatctccgtcaagtgcagtaaccagttcaagttggaagtgtgtcttttgaatgcagagaacaaagtcgtggacaaccaggctgggacccagggccagctgaaggtgctgggtgccaacctctggtggccgtacctgatgcacgaacaccccgcctacctgtactcctgggaggatggtgattgctcacaccaaagccttggacccctcccagcctgtgacctttgggaccaactccacctacgcagcagacaagggggctctgtatgtggatgtgatccgtgtgaacagctactactcttggtatcgcaactacgggcacctggagttgattcggctgcagctggccgcccagtttgagaattggtgtgagacatcacaatcccattattcagagcgcgtatggagtggaaacgcttgtagggtttcaccagggctggtgaattaccagatctccgtcaagtgcagtaaccagttcaagttggaagtgtgtcttttgaatgcagaaaacaaagtcgtggacaaccaggctgggacccagggccagctgaaggtgctggtgccaacctctggtggccgtacctgatgcacgaacaccccgcctacctgtactcgtgggaggatggtgattgctcacaccaaagccttggacccctcccagcctgtgacctttgggaccaactccacctacgcagcagacaagggggctctgtatgtggatgtgatccgtgtgaacagctactactcttggtatcgcaactacgggcacctggagttgattcggctgcagctggccgcccagtttgagaattggtgtaagacatcacaatcccattattcagagcgcgtatggagtggaaacgcttgtagggtttcaccagtctttcccagggaactccgatgaagtgttccaacaaaatgagcgagtgaaccaagaagaggatgacattagatccaggagatacaacagaggagataatctccaggatgcctgtgaagaaagatccctggatcccaggatgattataggacaagttgttcataatccagcaggccagaagacttccagggaaactcatttcaagatgaaaatggaccagccgcagtggctcacgcctgtaataccagcactttgggaggctgaggcaggcggatcacttgaggtcaggagtttgaaactagcctggccaacgtggcaaaactccatctctattaaaaatacaaaaattagccaggcatagtggtgcatgcctgtagtcccagctacttgggatgctgaggcaggaagaattgcttgaacctgggaggcagagtctgcagtgagccgagatcatgccactgcactccagcctgggtgacagagccagactccgtctcaaaaaaaaaagaaaaagaaaatgaataaaaataaaaatctcaggaaagaagtttactgattggtgcttctaaggactggtttgcttgtacctgagacacgttgcctactatcagtttggtcctgcctgcactctggagaagccacaagaatcttgacttttgctcatacacgacactgttgcaatgctgctcctctttggaagctctttggacaattataaatactcttttttttgcaactgccctgtatacaaatatatttacaaatacatataatcccacgtgctacttcaaagttcttacctggcactataggaccaactgctattgaatcttcaagattgctttcacttgtggtttcctttgaaaaataaaatcttttcttaaatcaaaaaaaaaaacctc

SEQ ID NO: 290952 - DNA, 1404 bp, Homo sapiens
cagatattttctatggtttagattgcttatgagaaccaatatagggtttggtttctcactgacattaaagccatcactgaaaatatagctttaaaaaaaactatttgtcaacattgaaatctgaacaacgataaggaaaatcttttaaagtcatatacataaattcccttcccgaagctcatactgtccaaaataagtttatttaaaaatactcacagagagatgtagttgccattgttcaataagaaaatggagttgtgcacatttggtaccaccacacccagcctcaaaatatggccctttttaaagagtgcttaatatgactctgtgtccatagaaacattttaaaccaccattgtaatattataactcttaccaaatgggacggcttgaaaaaatgaatccgaaaacttaatttctgtgagtttcttacaggaaacaagcatagtcatgagagacccaaaatccgaaaagaagttacacttcagatggaaaacatgaagtctttcccagggaactccgatgaagtgttccaacaaaatgagcgagtgaaccaagaagaggatgacattagatccaggagatacaacagaggagataatctccaggatgcctgtgaagaaagatccctggatcccaggatgattataggacaagttgttcataatccagcaggccagaagacttccagggaaactcatttcaagatgaaaatggaccagccgcagtggctcacgcctgtaataccagcactttgggaggctgaggcaggcggatcacttgaggtcaggagtttgaaactagcctggccaacgtggcaaaactccatctctattaaaaatacaaaaattagccaggcatagtggtgcatgcctgtagtcccagctacttgggatgctgaggcaggaagaattgcttgaacctgggaggcagagtctgcagtgagccgagatcatgccactgcactccagcctgggtgacagagccagactccgtctcaaaaaaaaaagaaaaagaaaatgaataaaaataaaaatctcaggaaagaagtttactgattggtgcttctaaggactggtttgcttgtacctgagacacgttgcctactatcagtttggtcctgcctgcactctggagaagccacaagaatcttgacttttgctcatacacgacactgttgcaatgctgctcctctttggaagctctttggacaattataaatactcttttttttgcaactgccctgtatacaaatatatttacaaatacatataatcccacgtgctacttcaaagttcttacctggcactataggaccaactgctattgaatcttcaagattgctttcacttgtggtttcctttgaaaaataaaatcttttcttaaatcaaaaaaaaaaacctc

SEQ ID NO: 290953 - DNA, 745 bp, Homo sapiens
tgttttatttttgtttttaccactatacaaatgagcaggaagcattcattttaaaatctgtatgtgttcatattcatttctaaaaaaaaaactcttactaattacatagtgaaaacacaaatttcttcttgcaattaaacatttctaaagagtttgatgggtaaaaaaaaattaagtttaaagattcatagaaaagaaatatttcttcataaaattttagaacagatatttttctgaaagcttccagcacaggaaaaaaaaaaattttgtttgcagtaaaaggattgacaagcagaaaggcatggaacttctcgacagcacattaggaaccagtagaaatgtagcagtgcctctacaatttagaattaaaatgacttccaacctataattctacacctagctaaactatcaaataagtgtgagaatacaggaaaaacatatatctagatagatctatatgtctgtatatgcattatatgcaactaaaagtgtgtatttcttatgcagtctttcccagggaactccgatgaagtgttccaacaaaatgagcgagtgaaccaagaagaggatgacattagatccaggagatacaacagaggagataatctccaggatgcctgtgaagaaagatccctggatcccaggatgattataggacaagttgttcataatccagcaggccagaagacttccagggaaactcatttcaagatgaaaatggaccagccgcagtggctcacgcctg

SEQ ID NO: 290954 - DNA, 1513 bp, Homo sapiens
  misc_feature (81)..(81): n is a, c, g, or t
tcgacttagagatcccctccgaacggttatccccagtgcccagacatttctcatccaccagcagaagactgttgatggggncaccatgagccttggaaacacgtctttccagttggccctgctccacatctagaacatggatggctttgtccttggagacagtaatgagctctggggaaaaggtgcccaggtcatggtgctgctcactgctcccttccaccacattgctggttgtcttccccagtactcactctgctcatcttcagagaaggccacagctcggcaggccttgagatggtgacctgatgaccagagctccttggtttctccctcttggcaagagtaggaaaagctggggagagggcaaggagggtaaatgactcccacacccagcctcaaaatatggccctttttaaagagtgcttaatatgactctgtgtccatagaaacattttaaaccaccattgtaatattataactcttaccaaatgggacggcttgaaaaaatgaatccgaaaacttaatttctgtgagtttcttacaggaaacaagcatagtcatgagagacccaaaatccgaaaagaagttacacttcagatggaaaacatgaagtctttcccagggaactccgatgaagtgttccaacaaaatgagcgagtgaaccaagaagaggatgacattagatccaggagatacaacagaggagataatctccaggatgcctgtgaagaaagatccctggatcccaggatgattataggacaagttgttcataatccagcaggccagaagacttccagggaaactcatttcaagatgaaaatggaccagccgcagtggctcacgcctgtaataccagcactttgggaggctgaggcaggcggatcacttgaggtcaggagtttgaaactagcctggccaacgtggcaaaactccatctctattaaaaatacaaaaattagccaggcatagtggtgcatgcctgtagtcccagctacttgggatgctgaggcaggaagaattgcttgaacctgggaggcagagtctgcagtgagccgagatcatgccactgcactccagcctgggtgacagagccagactccgtctcaaaaaaaaaagaaaaagaaaatgaataaaaataaaaatctcaggaaagaagtttactgattggtgcttctaaggactggtttgcttgtacctgagacacgttgcctactatcagtttggtcctgcctgcactctggagaagccacaagaatcttgacttttgctcatacacgacactgttgcaatgctgctcctctttggaagctctttggacaattataaatactcttttttttgcaactgccctgtatacaaatatatttacaaatacatataatcccacgtgctacttcaaagttcttacctggcactataggaccaactgctattgaatcttcaagattgctttcacttgtggtttcctttgaaaaataaaatcttttcttaaatcaaaaaaaaaaacctc

SEQ ID NO: 290955 - DNA, 844 bp, Homo sapiens
tggcatccatgtcactgaggtggcttctgtctgactccaatgtcaataataatagcagtgactaacattaattggccactttccatgtacaagacatcatagtaagcgttttctgtaaatgatcacacttaatcctcacagtgctgctatgagtcagatactttacagacaacaggacggaagtcagagaggccacaggcctaatgattggctgcctggtctaccctgatggttgggactcaagtgaggtgcggcgcatgtgtggggagcagacgggcaagtacacgctgggccactgcaccatccgctgggccttcatgctggccatcctcagcattggcgacgccctcatcctctccttcctggccttcgtgttgggctaccggcaggacaagctcctccctgacgactacaaggcagatggaaccgaggaggtgtgaagcagctgaagggtcgatggaatttcgctcttgttgcccaagctggagtgcaatggtgcgatctcggctcactgcaacctccacctcctgggttcaagccattctcctgcctcagcctcccgagtagctgggattacaggaacatgtctgatttcaggagtacccaatgaaggatccgatgaatggctggccagttactcagagtaatatgtttatgagttaaatggattgcataacggcaccacttttcctttgtcactgtggtggataaatgacaaagtagattccaatctcctgtatagaaaggtggttacccaatagcctcactggtggcttgctagcagagcctcaagttgcacctctgtggctttctgtaaattcgagtcctacagccacttcgagaa

SEQ ID NO: 290956 - DNA, 442 bp, Homo sapiens
tctgctcccaggggccctgggacgctgggctgcccgctctgccctaaggccttccctctgcagcgcatgctgacaaggcacctcaagtgccacagccccgtgcgccgccacctgtgccgctgttgtggcaagggctttcatgacgccttcgatctcaagcgccacatgaggactcacactgggatccggcccttccgctgcagtgcttgcgggaaagcgtttacgcagcgctgctccctggaagctcaccttgctaaggtgcatggacagccggccagctacgcttaccgtgagcgccgcgagaagctgcacgtgtgcgaggactgcggcttcaccagctcccggcccgacacctacgcacagcaccgcgccctgcaccgcgcagcctgatacggtgtgccagcgtcctccccacgaggcaaataaacacagaaaactcacg

SEQ ID NO: 290957 - DNA, 498 bp, Homo sapiens
agaaaaactaggaacaaaaaagatatatataagtctctgatacttacatatatttggagaacatgttggagaattggaaggggaaagtcggcattcaaaaatgcaaagcaacttcactttataacagcctgctctcacaggaagtgatacttccagaaaaataagtttgtattgagcatgcactacatgcaaggcaattttattttatatgggatattggacctaataagaagaggagcttgatgaattttaggcagaatgacttaagggctgtagactaaataaaaagcaaaaaggatagggacatttctatgtgttttgatatgaaataaaaaactaataataaggcttacaaacttaagtcatcccaactggcctcacaaaactcaagtgtggtgccaggtagagagccaaatagcagtggaagatttggatggtaggtcaggttcccatttattatgtttagtctagtacaaggaatagagagaattgaatgga

SEQ ID NO: 290958 - DNA, 390 bp, Homo sapiens
ggacctcacccctgagcaggtcaggactcagaacagtctggcgtctccagactctcacatgcagtatgtgcaggcacctgatacttctgttgcccttgtgctccagtcattgcacaaggcagaaaacagctctggcaggaagggactgccaaagttaggagccctagggcctggaaggagagtatggtcctcagatcccccttctctcctgcttcctccagggaacccaacagtcatgaccctgatagtttcccataacaacctgggcattccttgggactcaggagctgctaaactctttcatcccctggtggcttcagcagtccttatcaccaacagctcgactaacagatcgccaaccgatcggccaccagatcgcccaccagctcg

SEQ ID NO: 290959 - DNA, 571 bp, Homo sapiens
ggacctcacccctgagcaggtcaggactcagaacagtctggcgtctccagactctcacatgcagtatgtgcaggcacctgatacttctgttgcccttgtgctccagtcattgcacaaggcagaaaacagctctggcaggaagggactgccaaagttaggagccctagggcctggaaggagagtatggtcctcagatcccccttctctcctgcttcctccagggaacccaacagtcatgaccctgatagtttcccataacaacctgggcattccttgggactcaggagctgctaaactctttcatcccctggtggcttcagcagtccttatcaccagcctcacaatcccacaggcccacccccagtgggcctgtggcattcatatttcatattcatatttcaaaccacaatatccagcaaaatgtctcctgagcacccagaactccataccatcggccgggtgtggtggctcatgccttaatcccagcactttgggaggtcaagatgggaggattgcttgagcccagaagttcgagactagcctgggaaacataggaagccctcgtctctac

SEQ ID NO: 290960 - DNA, 467 bp, Homo sapiens
gaagctactacccttccaaagctatgattctcaagataactattaccatcccagcaggatgggcagtccaggggccaactggtcccactgctggagcagatcacacaggacggccagggccagggccagagcgatggaggcatccacctggcagaaggcaaactctgcaaagacaggagaaagtgtcaccagaaggatcaggaaggcttccctgtccagtgtctcctctgcacatctgcctggatttgactggtttgccctttccttggaaagcagatctcttgggcacaagacacatcctagagcagggcatcggcaagcttttccttaaagggccagagagtcaatattttagactttgcaagcctatacctcctcacctcggctgaaagcagccatggacaatctgtaaacaaatggttgtggctgtgttccaataaaactttatttatggacactgaaatttg

SEQ ID NO: 290961 - DNA, 351 bp, Homo sapiens
atgaatatactgctcagggccgaccccagggcagcctgcaggaccctgggaacaataaaggcctcagtgtcaccagaaggatcaggaaggcttccctgtccagtgtctcctctgcacatctgcctggatttgactggtttgccctttccttggaaagcagatctcttgggcacaagacacatcctagagcagggcatcggcaagcttttccttaaagggccagagagtcaatattttagactttgcaagcctatacctcctcacctcggctgaaagcagccatggacaatctgtaaacaaatggttgtggctgtgttccaataaaactttatttatggacactgaaatttg

SEQ ID NO: 290962 - DNA, 667 bp, Homo sapiens
aggcagcacaatggctggcactctgaggaagccggactcatcccgtgcaggccgcatacacactccactgcccttccggccaaacaagcccggacacgggagagggatgagagtcggggatgcctagcggcgaggagagaagggataggcaaaagggaagaagagcgggctgtgatacctcctcgacgccgtcaaacactgctccccgcattccagagcccggggcccacccgacggcagcgcgccccgccaccgcgcagccgccccggtcccttctcccgcccgtctgtagtaaaacaatcgctctcccggcgtctgcggccgctgccagcggttctgacactgcaggaatgcgcggtctggggaaggctccgcactctggggaggggcacgagcggggtcggggaaactccaagatgaaagcgtgcaataactaccaatatggatacctcgcaaagcctgacactagtttctggataaaatgcaggcgatggctgctggcggatgccggcagacacactcaaagacccttttggactttccgagtttcccattctcctctactggaggctgaggcgggcaggcccagcgacgtctcccagctccaactgggttcggacctcaagccaaaaatgaggaggccggcaggagagcttttctcgcccaa

SEQ ID NO: 290963 - DNA, 791 bp, Homo sapiens
gggtaaatcatactttgtccttttcatctgtggtttgttaggaaaagtttttgaagtttcaggtttcttgggtaggaatttaatctgatcacttatcttccttacaggcatactacctggcgtcttcctacatttattgctcctctgggaaagtgtaaagtctttaagatggaaagcatgagaaaatgtgtatctaatgagaaccggatatagttctgtcccttccaagttgaggtggtgtcccagaatttagtcaaactgcggctaccaaggcagtcatagtgtatattaacttgtgtgtgttacttgataaagctagatgattagtgagaagcttaagctttgaatacaggtgtttaaacgagtactatagtaataatttgaaaaatgtattggttagaatgtttttatttcagtgcacagcccagcttctgattagagaaagcatagtgatgcagaagagtctttgggtcacttaatgagaacttgggtcagagagaaaggaaaggaatcctgtgtattataggtgtgattaagagcctatattccaacaatgtatcttcttccataggcttgccacttaatattaacgcactgcttttatagtggagactttggaagtacaacagtgaggcaaaacaaaatcaatagagcttcccttaaacattttttgttggtggccagtatagtattctatttaaaaattaagttttacagtctgtaaaatatacaggacaatgacttttttaaaatgtaagttaatacctcctcctcacttgtcttaattgaac

SEQ ID NO: 290964 - DNA, 286 bp, Homo sapiens
aagtgggaggtagagaagcccactcacctccctctccagactcagggaagggaatgagaaggtgccacacagagccctggcaggaccgagggccacacaggctgcctggccgccgtcccagacctgtggccacatgagatttaggtttcgatgtggcacagcttcaaatggatacacgaggggatagtcatcttctgtgagaaacagtggcaccttttcccaaagacaaatagttaagacatcactcctattttttcagctgccccaagtaattgctcttttgacg

SEQ ID NO: 290965 - DNA, 714 bp, Homo sapiens
tgtgtgcagaatgtataatgtatttattaatgtggctcatggttaaaaacaaccaccaaacaaaacctgaccatggagtaaccagccagatgctcatctgttcacccctctccaaacctgcgtcacggcttgtacatgaaacagaacctaggaatctcaactagatccattgataccagcgaaaattgagcttccagttgaacccaccataggtcatatcagagcctgccatgtactcaaaagtatcatcactgatcacatcgatgatgggacacaccactgttctcctgatgtcataaaaggtatcactactctgtcaccacccaggctggaatgcagtagtgcaatcaggggccactgcagcctcgacctcctcaagtgatcttcccacctcagcttcctgagtagctgggaccacggctgggatcacataacaccacactcaactaattaaaaaaattttttttttgttttttatatttaagactttaatcttcaagggactgattttaactatgatatacattccgtatcaatgctagaatcggcctgtacagtctctcaaagaaaattctgtggagatttcaattggaaatgcactgaatttatatatgaatttgggtagaattgatactcttatgatattgactttcctatccatttctctctcaagattttttcgtgaatttcagtaaatcttttgataaacatatt

SEQ ID NO: 290966 - DNA, 480 bp, Homo sapiens
cagatattttctatggataaccagttgttccaccactatttatgtaatgatccctttttcttctgctgtaactatgagtgactgctctgtcataaatcaagattacatacaaaaatgagctggtttctagaccctaccctgtttcactagtctatttgtgaattcctgcatcaatataccactgccataattaacacagctttaaaataagtcttgacgcctagtaaggcaagcccccttagatctgattcttcttcagaagcatcccaactattttttttctctttacagttccgtatcaatgctagaatcggcctgtacagtctctcaaagaaaattctgtggagatttcaattggaaatgcactgaatttatatatgaatttgggtagaattgatactcttatgatattgactttcctatccatttctctctcaagattttttcgtgaatttcagtaaatcttttgataaacatatt

SEQ ID NO: 290967 - DNA, 791 bp, Homo sapiens
ggaactgaagcagtttctgtgggcggacagggaaccctgcgtttctactgtgtgattctgccaccttcctggcccgacgccatgggagtgacttgtgtgtcccagatgcctgtggccgagggcaagagtgttcagcaaaccgtagagctccttacccggaaattggagatgcttggggcagagaagcaaggaacattttgtgtggactgtgagacttaccatacggccgcctctacccttggcagccaaggtcagaccgggaagctgatgtatgtgatgcacaactcagagtacccattgagctgtttcgccctctttgagaatggcccttgccttattgctgacaccaactttgatgtgcttatggtgaagctcaagggctttttccagagtgctaaggccagcaagattgagacccggggcaccaggtaccagtactgtgacttcctggtgaaggtgggcacggtcacaatggggccagtgccggggatctctgtggaggtggagtatggcccctgtgtggtagctagtgactgctggagtctgctgctcgagttcctacagagttttctaggcagccacacaccaggggctcccgcagtgtttgggaacagacatgatgcggtctacggcccagcagataccatggtccagtacatggaactcttcaacaagatccgcaagcagcagcaggtggctgggattcgttagtgatgagcagctgcagctgagctctgtcacaagggtactccacaggaggagcagtgctgacttcagtcctgacccagaaa

SEQ ID NO: 290968 - DNA, 429 bp, Homo sapiens
ttgttatcagatctgaaaatataagatgaagacacaaaaacaatatagttacagtgggaaaatagaaaggtcgctaagataaatggcctgaaaataaatgcaaatataggtatatatttgaatgtattttatgaacttagtatataatactttatatatttttaatttatgatataaaagtatataatattagtatacagtaaaagtgacactgcaaattagtgatgaaagggatgactctttaggaagtgcactcaacactcagttaacttacacacacacacaaaaaaaaacctaccttaaataagccaccagagtaaatacagttacattccctgttgggctagtggttaggattcaaaaaatagagatacatagcaaagtattaaaagaaaacactggtaattataccagcgtttctcaacctca

SEQ ID NO: 290969 - DNA, 317 bp, Homo sapiens
agaatcatctgaagaaactgaaggaaaaataagaatttacaattgtctgttttggaaataaagctctaagtacaactttcaaaatgacctggcttattaataagcctgtagtaaagacaaattgcctgcaattttcaaggctcttagtcacctcatccttcccccaagtttcttactctttaagatacacaatactgtattctagccaagttactgtacagcaaattctcttgttactaagtcctgttttaccattgattttcaaaatctttcagttgggggaaattaaagtggtcagttacatcttcagaatctct

SEQ ID NO: 290970 - DNA, 450 bp, Homo sapiens
ggcggccgctcgcgatctagaactatgtttccatttttgtttttacaaatcctttgggtctaattctgtgagcctacctatagcactggattaaaatgtctgcatcatttctttagttatccagttaactttaaaactgttgtaaaagtgtaaaccagcccatgacaggtttttgtacatgttaaagaacttcattgttcagttttcatgattattgtgtaaggaagactgatgtagatgttctgtgctgtcctggaccatgttaattacacttacgacgtattttagttccacatcacaatgatttgtccccagtgacccttttatcctttctaggcacatttcttgttgttgttgttgttgcagttcccctttgcattgtattgctttgacaactgtaatttgaatcagatctgaaagaggtccagaataaaatatattttgatatta

SEQ ID NO: 290971 - DNA, 2714 bp, Homo sapiens
gagatatttagaacatattaccctgtgacttacgtaggaaacctaatatgctgagtatctggcacttgaattcctgcttttattgctggaggtccacatctgtggttgacctctgttattgtttaaaaaaaataaataaaaattaaaaaaatctgtgcaataattttaaaatgtgctcccaggaatagacacaaatgttttgagtatcttttaagctgcattttcctttagtgatgcatttgtcaattgcactgaatttaaatctgaaagtcagaggtgattattgatagtacttttgtattttgatatggacagtttattcatttgcatacagttattgactttttcccagctgattaaaagatagtcaagaaattctgcaatatagctgccaaaatagacagctacatttttatgatattgtcatcttttctgttttttttttcttttttttctttagctattttacttaagcataatagccacaataggacatataaaagattataaatacagagctttattatcctgacgtcttgggtcttttaagtatatacttttctgaaaggtatccattttgtaggcttgggttcttcatgagcatacgattgtttatttttgctgctgttctcaacatcatcattgcctgctgatgtgccacgatgctgctccaatagacagcaataagattgtctctaatttgagcagtaacatgattgcaagagaccaagtttcacagcttgtaaagttctgtatttgggattcttgcttatttttccgcctgtgtttttctgagaacttattcctgatgatcaattgaatccagtagtttttctatgctatttgttgttgtataagctactgtaagaaacttatcataaggaaaaatagaaaggaaaacttgaatcaatactcattgattaaaatggaataaagaaagagcagctgccacttttaaacaacataaaggaatatctttttttgtctccgtgtaggaaatcccataagttcttatatttgttccagttcccatttcctgccattgaccagataacatcattgactttcaaatgacttttagaagtgataactcttaatttcctaatagatactagattgtattgaattctgttttaattattctctaggtaagtatgttttaggattaaataccttttacagatactgaaagtgcctccttttgtggtgtaaaaaacaaattatggtgcaaaaagtaatcactagattgaaatacatgaaggttttttgctttttgacatacgaaaatgtcaagagaaaggccaaagatttgtactttttcacttacaaagcactcctttttcccttaaacttctttctgtcaaattagatttaatgagagagtactatttttaaggagctatctgtttatgtagaatgattttgttaagagtaatgtaaactattattgagtagaggcctaaagaggactgtgcatttttgctatttaaaggaatcacaaatgatcatacttaagtgagcaaaaatgacaagttttactagctaagtagagaaataaatctcaaatgcagcgctacaattttcattatcttaagtacattgtacatttctacagaacctgtgattattctcgcatgataaggatggtacttgcatatggtgaattactactgttgacagtttccgcagaaatcctatttcagtggaccaacattgtggcatggcagcaaatgccaacattttgtggaatagcagcaaatctacaagagaccctggttggtttttcgtttgttttctttgttttttcccccttctcctgaatcagcagggatggaaggagggtagggaagttatgaattactccttccagtagtagctctgaagtgtcacatttaatatcagttttttttaaacatgattctagttaaatgtagaagagagaagaaagaggaagtgttcacttttttaatacactgatttagaaatttgatgtcttatatcagtagttctgaggtattgatagcttgctttatttctgcctttacgttgacagtgttgaagcagggtgaataactagggcatatatttttttttttggtaagctgtttcatgatgttttcttgggaatttccggataagttcaggaaaacattctgcatgttgtatctagtctgatgtacttatccatctcattacaaacaaaaacacacagactgcatttgtagctctgtaatccttgaatacggaagtaaattttcttctttcctgactttgacattgtagctatactgtttccatttttgtttttacaaatcctttgggtctaattctgtgagcctacctatagcactggattaaaatgtctgcatcatttctttagttatccagttaactttaaaactgttgtaaaagtgtaaaccagcccatgacaggtttttgtacatgttaaagaacttcattgttcagttttcatgattattgtgtaaggaagactgatgtagatgttctgtgctgtcctggaccatgttaattacacttacgacgtattttagttccacatcacaatgatttgtccccagtgacccttttatcctttctaggcacatttcttgttgttgttgttgttgcagttcccctttgcattgtattgctttgacaactgtaatttgaatcagatctgaaagaggtccagaataaaatatattttgatatta

SEQ ID NO: 290972 - DNA, 2335 bp, Homo sapiens
ctttttaacattttttccccgataactacatttttatgatattgtcatcttttctgttttttttttcttttttttctttagctattttacttaagcataatagccacaataggacatataaaagattataaatacagagctttattatcctgacgtcttgggtcttttaagtatatacttttctgaaaggtatccattttgtaggcttgggttcttcatgagcatacgattgtttatttttgctgctgttctcaacatcatcattgcctgctgatgtgccacgatgctgctccaatagacagcaataagattgtctctaatttgagcagtaacatgattgcaagagaccaagtttcacagcttgtaaagttctgtatttgggattcttgcttatttttccgcctgtgtttttctgagaacttattcctgatgatcaattgaatccagtagtttttctatgctatttgttgttgtataagctactgtaagaaacttatcataaggaaaaatagaaaggaaaacttgaatcaatactcattgattaaaatggaataaagaaagagcagctgccacttttaaacaacataaaggaatatctttttttgtctccgtgtaggaaatcccataagttcttatatttgttccagttcccatttcctgccattgaccagataacatcattgactttcaaatgacttttagaagtgataactcttaatttcctaatagatactagattgtattgaattctgttttaattattctctaggtaagtatgttttaggattaaataccttttacagatactgaaagtgcctccttttgtggtgtaaaaaacaaattatggtgcaaaaagtaatcactagattgaaatacatgaaggttttttgctttttgacatacgaaaatgtcaagagaaaggccaaagatttgtactttttcacttacaaagcactcctttttcccttaaacttctttctgtcaaattagatttaatgagagagtactatttttaaggagctatctgtttatgtagaatgattttgttaagagtaatgtaaactattattgagtagaggcctaaagaggactgtgcatttttgctatttaaaggaatcacaaatgatcatacttaagtgagcaaaaatgacaagttttactagctaagtagagaaataaatctcaaatgcagcgctacaattttcattatcttaagtacattgtacatttctacagaacctgtgattattctcgcatgataaggatggtacttgcatatggtgaattactactgttgacagtttccgcagaaatcctatttcagtggaccaacattgtggcatggcagcaaatgccaacattttgtggaatagcagcaaatctacaagagaccctggttggtttttcgtttgttttctttgttttttcccccttctcctgaatcagcagggatggaaggagggtagggaagttatgaattactccttccagtagtagctctgaagtgtcacatttaatatcagttttttttaaacatgattctagttaaatgtagaagagagaagaaagaggaagtgttcacttttttaatacactgatttagaaatttgatgtcttatatcagtagttctgaggtattgatagcttgctttatttctgcctttacgttgacagtgttgaagcagggtgaataactagggcatatatttttttttttggtaagctgtttcatgatgttttcttgggaatttccggataagttcaggaaaacattctgcatgttgtatctagtctgatgtacttatccatctcattacaaacaaaaacacacagactgcatttgtagctctgtaatccttgaatacggaagtaaattttcttctttcctgactttgacattgtagctatactgtttccatttttgtttttacaaatcctttgggtctaattctgtgagcctacctatagcactggattaaaatgtctgcatcatttctttagttatccagttaactttaaaactgttgtaaaagtgtaaaccagcccatgacaggtttttgtacatgttaaagaacttcattgttcagttttcatgattattgtgtaaggaagactgatgtagatgttctgtgctgtcctggaccatgttaattacacttacgacgtattttagttccacatcacaatgatttgtccccagtgacccttttatcctttctaggcacatttcttgttgttgttgttgttgcagttcccctttgcattgtattgctttgacaactgtaatttgaatcagatctgaaagaggtccagaataaaatatattttgatatta

SEQ ID NO: 290973 - DNA, 3073 bp, Homo sapiens
gagatatttagaacatattaccctgtgacttacgtaggaaacctaatatgctgagtatctggcacttgaattcctgcttttattgctggaggtccacatctgtggttgacctctgttattgtttaaaaaaaataaataaaaattaaaaaaatctgtgcaataattttaaaatgtgctcccaggaatagacacaaatgttttgagtatcttttaagctgcattttcctttagtgatgcatttgtcaattgcactgaatttaaatctgaaagtcagaggtgattattgatagtacttttgtattttgatatggacagtttattcatttgcatacagttattgactttttcccagctgattaaaagatagtcaagaaattctgcaatatagctgccaaaatagacagctacatttttatgatattgtcatcttttctgttttttttttcttttttttctttagctattttacttaagcataatagccacaataggacatataaaagattataaatacagagctttattatcctgacgtcttgggtcttttaagtatatacttttctgaaaggtatccattttgtaggcttgggttcttcatgagcatacgattgtttatttttgctgctgttctcaacatcatcattgcctgctgatgtgccacgatgctgctccaatagacagcaataagattgtctctaatttgagcagtaacatgattgcaagagaccaagtttcacagcttgtaaagttctgtatttgggattcttgcttatttttccgcctgtgtttttctgagaacttattcctgatgatcaattgaatccagtagtttttctatgctatttgttgttgtataagctactgtaagaaacttatcataaggaaaaatagaaaggaaaacttgaatcaatactcattgattaaaatggaataaagaaagagcagctgccacttttaaacaacataaaggaatatctttttttgtctccgtgtaggaaatcccataagttcttatatttgttccagttcccatttcctgccattgaccagataacatcattgactttcaaatgacttttagaagtgataactcttaatttcctaatagatactagattgtattgaattctgttttaattattctctaggtaagtatgttttaggattaaataccttttacagatactgaaagtgcctccttttgtggtgtaaaaaacaaattatggtgcaaaaagtaatcactagattgaaatacatgaaggttttttgctttttgacatacgaaaatgtcaagagaaaggccaaagatttgtactttttcacttacaaagcactcctttttcccttaaacttctttctgtcaaattagatttaatgagagagtactatttttaaggagctatctgtttatgtagaatgattttgttaagagtaatgtaaactattattgagtagaggcctaaagaggactgtgcatttttgctatttaaaggaatcacaaatgatcatacttaagtgagcaaaaatgacaagttttactagctaagtagagaaataaatctcaaatgcagcgctacaattttcattatcttaagtacattgtacatttctacagaacctgtgattattctcgcatgataaggatggtacttgcatatggtgaattactactgttgacagtttccgcagaaatcctatttcagtggaccaacattgtggcatggcagcaaatgccaacattttgtggaatagcagcaaatctacaagagaccctggttggtttttcgtttgttttctttgttttttcccccttctcctgaatcagcagggatggaaggagggtagggaagttatgaattactccttccagtagtagctctgaagtgtcacatttaatatcagttttttttaaacatgattctagttaaatgtagaagagagaagaaagaggaagtgttcacttttttaatacactgatttagaaatttgatgtcttatatcagtagttctgaggtattgatagcttgctttatttctgcctttacgttgacagtgttgaagcagggtgaataactagggcatatatttttttttttggtaagctgtttcatgatgttttcttgggaatttccggataagttcaggaaaacattctgcatgttgtatctagtctgatgtacttatccatctcattacaaacaaaaacacacagactgcatttgtagctctgtaatccttgaatacggaagtaaattttcttctttcctgactttgacattgtagctatactgtttccatttttgtttttacaaatcctttgggtctaattctgtgagcctacctatagcactggattaaaatgtctgcatcatttctttagttatccagttaactttaaaactgttgtaaaagtgtaaaccagcccatgacaggtttttgtacatgttaaagaacttcattgttcagttttcatgattattgtgtaaggaagactgatgtagatgttctgtgctgtcctggaccatgttaattacacttacgacgtattttagttccacatcacaatgatttgtccccagtgacccttttatcctttctaggcacatttcttgttgttgttgttgttgcagttcccctttgcattgtattgctttgacaactgtaatttgaatcagatctgaaagaggtccagaataaaatatattttgatattaaaaaaaaaaaaaaaaaaaaaaaaaaaaaaaaaaaaaaaaaaaaaaaaaaaaacacagtgtgtgtggggccgcgccacagggcccacaagaaagacacttcaaaaacacacaggggtgggacgcggaggacccccaaaagagaaagcgaaacaggggcacaaagagcgcacccaagagaaacaccggggcagagacaacaggaggcgaggggtctcacacacaaaaaaaaaaaacggcacgggggagacacacgagaggtgttgtgaaaacgacacccacaagagggatacacagaagagaaaagacgggggaaccacataacaaggagagatccaaggagaccagcaaaataaataccg

SEQ ID NO: 290974 - DNA, 3198 bp, Homo sapiens
gagatatttagaacatattaccctgtgacttacgtaggaaacctaatatgctgagtatctggcacttgaattcctgcttttattgctggaggtccacatctgtggttgacctctgttattgtttaaaaaaaataaataaaaattaaaaaaatctgtgcaataattttaaaatgtgctcccaggaatagacacaaatgttttgagtatcttttaagctgcattttcctttagtgatgcatttgtcaattgcactgaatttaaatctgaaagtcagaggtgattattgatagtacttttgtattttgatatggacagtttattcatttgcatacagttattgactttttcccagctgattaaaagatagtcaagaaattctgcaatatagctgccaaaatagacagctacatttttatgatattgtcatcttttctgttttttttttcttttttttctttagctattttacttaagcataatagccacaataggacatataaaagattataaatacagagctttattatcctgacgtcttgggtcttttaagtatatacttttctgaaaggtatccattttgtaggcttgggttcttcatgagcatacgattgtttatttttgctgctgttctcaacatcatcattgcctgctgatgtgccacgatgctgctccaatagacagcaataagattgtctctaatttgagcagtaacatgattgcaagagaccaagtttcacagcttgtaaagttctgtatttgggattcttgcttatttttccgcctgtgtttttctgagaacttattcctgatgatcaattgaatccagtagtttttctatgctatttgttgttgtataagctactgtaagaaacttatcataaggaaaaatagaaaggaaaacttgaatcaatactcattgattaaaatggaataaagaaagagcagctgccacttttaaacaacataaaggaatatctttttttgtctccgtgtaggaaatcccataagttcttatatttgttccagttcccatttcctgccattgaccagataacatcattgactttcaaatgacttttagaagtgataactcttaatttcctaatagatactagattgtattgaattctgttttaattattctctaggtaagtatgttttaggattaaataccttttacagatactgaaagtgcctccttttgtggtgtaaaaaacaaattatggtgcaaaaagtaatcactagattgaaatacatgaaggttttttgctttttgacatacgaaaatgtcaagagaaaggccaaagatttgtactttttcacttacaaagcactcctttttcccttaaacttctttctgtcaaattagatttaatgagagagtactatttttaaggagctatctgtttatgtagaatgattttgttaagagtaatgtaaactattattgagtagaggcctaaagaggactgtgcatttttgctatttaaaggaatcacaaatgatcatacttaagtgagcaaaaatgacaagttttactagctaagtagagaaataaatctcaaatgcagcgctacaattttcattatcttaagtacattgtacatttctacagaacctgtgattattctcgcatgataaggatggtacttgcatatggtgaattactactgttgacagtttccgcagaaatcctatttcagtggaccaacattgtggcatggcagcaaatgccaacattttgtggaatagcagcaaatctacaagagaccctggttggtttttcgtttgttttctttgttttttcccccttctcctgaatcagcagggatggaaggagggtagggaagttatgaattactccttccagtagtagctctgaagtgtcacatttaatatcagttttttttaaacatgattctagttaaatgtagaagagagaagaaagaggaagtgttcacttttttaatacactgatttagaaatttgatgtcttatatcagtagttctgaggtattgatagcttgctttatttctgcctttacgttgacagtgttgaagcagggtgaataactagggcatatatttttttttttggtaagctgtttcatgatgttttcttgggaatttccggataagttcaggaaaacattctgcatgttgtatctagtctgatgtacttatccatctcattacaaacaaaaacacacagactgcatttgtagctctgtaatccttgaatacggaagtaaattttcttctttcctgactttgacattgtagctatactgtttccatttttgtttttacaaatcctttgggtctaattctgtgagcctacctatagcactggattaaaatgtctgcatcatttctttagttatccagttaactttaaaactgttgtaaaagtgtaaaccagcccatgacaggtttttgtacatgttaaagaacttcattgttcagttttcatgattattgtgtaaggaagactgatgtagatgttctgtgctgtcctggaccatgttaattacacttacgacgtattttagttccacatcacaatgatttgtccccagtgacccttttatcctttctaggcacatttcttgttgttgttgttgttgcagttcccctttgcattgtattgctttgacaactgtaatttgaatcagatctgaaagaggtccagaataaaatatattttgatattagttggctgtgtacatatataaaacctttgatgtctatgtagtttatatagactatttactagtcaggtaaagagagagggatggtatttcttgtttacagtttgtttacattttaattgcttttacttctccagtgttctattgtagaataaacctttttttccaagttagccttcataacctataacacattcattctctcccatactggtgttactgattaataactgccatcagaacccaaaccactgtttttcataaacgtattgtttcccaagatatatactttaagcccataataaaattacaaattttactatttttattacttcttgcaggagataagatttttttaaatgaaggggttatttactatttttattaaagtataatagagcatctaatcagctaagggattgtaatttttaattcttttgaaaaataaatattgtatttaaaagacgttatttcacagaagctgaaa

SEQ ID NO: 290975 - DNA, 2662 bp, Homo sapiens
gagatatttagaacatattaccctgtgacttacgtaggaaacctaatatgctgagtatctggcacttgaattcctgcttttattgctggaggtccacatctgtggttgacctctgttattgtttaaaaaaaataaataaaaattaaaaaaatctgtgcaataattttaaaatgtgctcccaggaatagacacaaatgttttgagtatcttttaagctgcattttcctttagtgatgcatttgtcaattgcactgaatttaaatctgaaagtcagaggtgattattgatagtacttttgtattttgatatggacagtttattcatttgcatacagttattgactttttcccagctgattaaaagatagtcaagaaattctgcaatatagctgccaaaatagacagctacatttttatgatattgtcatcttttctgttttttttttcttttttttctttagctattttacttaagcataatagccacaataggacatataaaagattataaatacagagctttattatcctgacgtcttgggtcttttaagtatatacttttctgaaaggtatccattttgtaggcttgggttcttcatgagcatacgattgtttatttttgctgctgttctcaacatcatcattgcctgctgatgtgccacgatgctgctccaatagacagcaataagattgtctctaatttgagcagtaacatgattgcaagagaccaagtttcacagcttgtaaagttctgtatttgggattcttgcttatttttccgcctgtgtttttctgagaacttattcctgatgatcaattgaatccagtagtttttctatgctatttgttgttgtataagctactgtaagaaacttatcataaggaaaaatagaaaggaaaacttgaatcaatactcattgattaaaatggaataaagaaagagcagctgccacttttaaacaacataaaggaatatctttttttgtctccgtgtaggaaatcccataagttcttatatttgttccagttcccatttcctgccattgaccagataacatcattgactttcaaatgacttttagaagtgataactcttaatttcctaatagatactagattgtattgaattctgttttaattattctctaggtaagtatgttttaggattaaataccttttacagatactgaaagtgcctccttttgtggtgtaaaaaacaaattatggtgcaaaaagtaatcactagattgaaatacatgaaggttttttgctttttgacatacgaaaatgtcaagagaaaggccaaagatttgtactttttcacttacaaagcactcctttttcccttaaacttctttctgtcaaattagatttaatgagagagtactatttttaaggagctatctgtttatgtagaatgattttgttaagagtaatgtaaactattattgagtagaggcctaaagaggactgtgcatttttgctatttaaaggaatcacaaatgatcatacttaagtgagcctacaattttcattatcttaagtacattgtacatttctacagaacctgtgattattctcgcatgataaggatggtacttgcatatggtgaattactactgttgacagtttccgcagaaatcctatttcagtggaccaacattgtggcatggcagcaaatgccaacattttgtggaatagcagcaaatctacaagagaccctggttggtttttcgtttgttttctttgttttttcccccttctcctgaatcagcagggatggaaggagggtagggaagttatgaattactccttccagtagtagctctgaagtgtcacatttaatatcagttttttttaaacatgattctagttaaatgtagaagagagaagaaagaggaagtgttcacttttttaatacactgatttagaaatttgatgtcttatatcagtagttctgaggtattgatagcttgctttatttctgcctttacgttgacagtgttgaagcagggtgaataactagggcatatatttttttttttggtaagctgtttcatgatgttttcttgggaatttccggataagttcaggaaaacattctgcatgttgtatctagtctgatgtacttatccatctcattacaaacaaaaacacacagactgcatttgtagctctgtaatccttgaatacggaagtaaattttcttctttcctgactttgacattgtagctatactgtttccatttttgtttttacaaatcctttgggtctaattctgtgagcctacctatagcactggattaaaatgtctgcatcatttctttagttatccagttaactttaaaactgttgtaaaagtgtaaaccagcccatgacaggtttttgtacatgttaaagaacttcattgttcagttttcatgattattgtgtaaggaagactgatgtagatgttctgtgctgtcctggaccatgttaattacacttacgacgtattttagttccacatcacaatgatttgtccccagtgacccttttatcctttctaggcacatttcttgttgttgttgttgttgcagttcccctttgcattgtattgctttgacaactgtaatttgaatcagatctgaaagaggtccagaataaaatatattttgatatta

SEQ ID NO: 290976 - DNA, 2313 bp, Homo sapiens
gagatatttagaacatattaccctgtgacttacgtaggaaacctaatatgctgagtatctggcacttgaattcctgcttttattgctggaggtccacatctgtggttgacctctgttattgtttaaaaaaaataaataaaaattaaaaaaatctgtgcaataattttaaaatgtgctcccaggaatagacacaaatgttttgagtatcttttaagctgcattttcctttagtgatgcatttgtcaattgcactgaatttaaatctgaaagtcagaggtgattattgatagtacttttgtattttgatatggacagtttattcatttgcatacagttattgactttttcccagctgattaaaagatagtcaagaaattctgcaatatagctgccaaaatagacagctacatttttatgatattgtcatcttttctgttttttttttcttttttttctttagctattttacttaagcataatagccacaataggacatataaaagattataaatacagagctttattatcctgacgtcttgggtcttttaagtatatacttttctgaaaggtatccattttgtaggcttgggttcttcatgagcatacgattgtttatttttgctgctgttctcaacatcatcattgcctgctgatgtgccacgatgctgctccaatagacagcaataagattgtctctaatttgagcagtaacatgattgcaagagaccaagtttcacagcttgtaaagttctgtatttgggattcttgcttatttttccgcctgtgtttttctgagaacttattcctgatgatcaattgaatccagtagtttttctatgctatttgttgttgtataagctactgtaagaaacttatcataaggaaaaatagaaaggaaaacttgaatcaatactcattgattaaaatggaataaagaaagagcagctgccacttttaaacaacataaaggaatatctttttttgtctccgtgtaggaaatcccataagttcttatatttgttccagttcccatttcctgccattgaccagataacatcattgactttcaaatgacttttagaagtgataactcttaatttcctaatagatactagattgtattgaattctgttttaattattctctaggtaagtatgttttaggattaaataccttttacagatactgaaagtgcctccttttgtggtgtaaaaaacaaattatggtgcaaaaagtaatcactagattgaaatacatgaaggttttttgctttttgacatacgaaaatgtcaagagaaaggccaaagatttgtactttttcacttacaaagcactcctttttcccttaaacttctttctgtcaaattagatttaatgagagagtactatttttaaggagctatctgtttatgtagaatgattttgttaagagtaatgtaaactattattgagtagaggcctaaagaggactgtgcatttttgctatttaaaggaatcacaaatgatcatacttaagtgagcaaaaatgacaagttttactagctaagtagagaaataaatctcaaatgcagcgctacaattttcattatcttaagtacattgtacatttctacagaacctgtgattattctcgcatgataaggatggtacttgcatatggtgaattactactgttgacagtttccgcagaaatcctatttcagtggaccaacattgtggcatggcagcaaatgccaacattttgtggaatagcagcaaatctacaagagaccctggttggtttttcgtttgttttctttgttttttcccccttctcctgaatcagcagggatggaaggagggtagggaagttatgaattactccttccagtagtagctctgaagtgtcacatttaatatcagttttttttaaacatgattctagttaaatgtagaagagagaagaaagaggaagtgttcacttttttaatacactgatttagaaatttgatgtcttatatcagtagttctgaggtattgatagcttgctttatttctgcctttacgttgacagtgttgaagcagggtgaataactagggcatatatttttttttttggtaagctgtttcatgatgttttcttgggaatttccggataagttcaggaaaacattctgcatgttgtatctagtctgatgtacttatccatctcattacaaacaaaaacacacagactgcatttgtagctctgtaatccttgaataccgacagtgtttttacaatccctttggggtcacatccgtgagtcaaactttatgctctggcttaaacgtc

SEQ ID NO: 290977 - DNA, 1146 bp, Homo sapiens
gtgactccagaggattacctagcacttcccattgtacatttctacagaacctgtgattattctcgcatgataaggatggtacttgcatatggtgaattactactgttgacagtttccgcagaaatcctatttcagtggaccaacattgtggcatggcagcaaatgccaacattttgtggaatagcagcaaatctacaagagaccctggttggtttttcgtttgttttctttgttttttcccccttctcctgaatcagcagggatggaaggagggtagggaagttatgaattactccttccagtagtagctctgaagtgtcacatttaatatcagttttttttaaacatgattctagttaaatgtagaagagagaagaaagaggaagtgttcacttttttaatacactgatttagaaatttgatgtcttatatcagtagttctgaggtattgatagcttgctttatttctgcctttacgttgacagtgttgaagcagggtgaataactagggcatatatttttttttttggtaagctgtttcatgatgttttcttgggaatttccggataagttcaggaaaacattctgcatgttgtatctagtctgatgtacttatccatctcattacaaacaaaaacacacagactgcatttgtagctctgtaatccttgaatacggaagtaaattttcttctttcctgactttgacattgtagctatactgtttccatttttgtttttacaaatcctttgggtctaattctgtgagcctacctatagcactggattaaaatgtctgcatcatttctttagttatccagttaactttaaaactgttgtaaaagtgtaaaccagcccatgacaggtttttgtacatgttaaagaacttcattgttcagttttcatgattattgtgtaaggaagactgatgtagatgttctgtgctgtcctggaccatgttaattacacttacgacgtattttagttccacatcacaatgatttgtccccagtgacccttttatcctttctaggcacatttcttgttgttgttgttgttgcagttcccctttgcattgtattgctttgacaactgtaatttgaatcagatctgaaagaggtccagaataaaatatattttgatatta

SEQ ID NO: 290978 - DNA, 1749 bp, Homo sapiens
gagatatttagaacatattaccctgtgacttacgtaggaaacctaatatgctgagtatctggcacttgaattcctgcttttattgctggaggtccacatctgtggttgacctctgttattgtttaaaaaaaataaataaaaattaaaaaaatctgtgcaataattttaaaatgtgctcccaggaatagacacaaatgttttgagtatcttttaagctgcattttcctttagtgatgcatttgtcaattgcactgaatttaaatctgaaagtcagaggtgattattgatagtacttttgtattttgatatggacagtttattcatttgcatacagttattgactttttcccagctgattaaaagatagtcaagaaattctgcaatatagctgccaaaatagacagctacatttttatgatattgtcatcttttctgttttttttttcttttttttctttagctattttacttaagcataatagccacaataggacatataaaagattataaatacagagctttattatcctgacgtcttgggtcttttaagtatatacttttctgaaaggtatccattttgtaggcttgggttcttcatgagcatacgattgtttatttttgctgctgttctcaacatcatcattgcctgctgatgtgccacgatgctgctccaatagacagcaataagattgtctctaatttgagcagtaacatgattgcaagagaccaagtttcacagcttgtaaagttctgtatttgggattcttgcttatttttccgcctgtgtttttctgagaacttattcctgatgatcaattgaatccagtagtttttctatgctatttgttgttgtataagctactgtaagaaacttatcataaggaaaaatagaaaggaaaacttgaatcaatactcattgattaaaatggaataaagaaagagcagctgccacttttaaacaacataaaggaatatctttttttgtctccgtgtaggaaatcccataagttcttatatttgttccagttcccatttcctgccattgaccagataacatcattgactttcaaatgacttttagaagtgataactcttaatttcctaatagatactagattgtattgaattctgttttaattattctctaggtaagtatgttttaggattaaataccttttacagatactgaaagtgcctccttttgtggtgtaaaaaacaaattatggtgcaaaaagtaatcactagattgaaatacatgaaggttttttgctttttgacatacgaaaatgtcaagagaaaggccaaagatttgtactttttcacttacaaagcactcctttttcccttaaacttctttctgtcaaattagatttaatgagagagtactatttttaaggagctatctgtttatgtagaatgattttgttaagagtaatgtaaactattattgagtagaggcctaaagaggactgtgcatttttgctatttaaaggaatcacaaatgatcatacttaagtgagcaaaaatgacaagttttactagctaagtagagaaataaatctcaaatgcagcgctacaattttcattatcttaagtacattgtacatttctacagaacctgtgattattctcgcatgataaggatggtacttgcatatggtgaattactactgttgacagtttccgcagaaatcctatttcagtggaccaacattgtgcagccagccataagggtcgctagtcagcacc

SEQ ID NO: 290979 - DNA, 2462 bp, Homo sapiens
agagagagagagagagagagagagagagagagagagagagagagagacacgatgctgctccaatagacagcaataagattgtctctaatttgagcagtaacatgattgcaagagaccaagtttcacagcttgtaaagttctgtatttgggattcttgcttatttttccgcctgtgtttttctgagaacttattcctgatgatcaattgaatccagtagtttttctatgctatttgttgttgtataagctactgtaagaaacttatcataaggaaaaatagaaaggaaaacttgaatcaatactcattgattaaaatggaataaagaaagagcagctgccacttttaaacaacataaaggaatatctttttttgtctccgtgtaggaaatcccataagttcttatatttgttccagttcccatttcctgccattgaccagataacatcattgactttcaaatgacttttagaagtgataactcttaatttcctaatagatactagattgtattgaattctgttttaattattctctaggtaagtatgttttaggattaaataccttttacagatactgaaagtgcctccttttgtggtgtaaaaaacaaattatggtgcaaaaagtaatcactagattgaaatacatgaaggttttttgctttttgacatacgaaaatgtcaagagaaaggccaaagatttgtactttttcacttacaaagcactcctttttcccttaaacttctttctgtcaaattagatttaatgagagagtactatttttaaggagctatctgtttatgtagaatgattttgttaagagtaatgtaaactattattgagtagaggcctaaagaggactgtgcatttttgctatttaaaggaatcacaaatgatcatacttaagtgagcaaaaatgacaagttttactagctaagtagagaaataaatctcaaatgcagcgctacaattttcattatcttaagtacattgtacatttctacagaacctgtgattattctcgcatgataaggatggtacttgcatatggtgaattactactgttgacagtttccgcagaaatcctatttcagtggaccaacattgtggcatggcagcaaatgccaacattttgtggaatagcagcaaatctacaagagaccctggttggtttttcgtttgttttctttgttttttcccccttctcctgaatcagcagggatggaaggagggtagggaagttatgaattactccttccagtagtagctctgaagtgtcacatttaatatcagttttttttaaacatgattctagttaaatgtagaagagagaagaaagaggaagtgttcacttttttaatacactgatttagaaatttgatgtcttatatcagtagttctgaggtattgatagcttgctttatttctgcctttacgttgacagtgttgaagcagggtgaataactagggcatatatttttttttttggtaagctgtttcatgatgttttcttgggaatttccggataagttcaggaaaacattctgcatgttgtatctagtctgatgtacttatccatctcattacaaacaaaaacacacagactgcatttgtagctctgtaatccttgaatacggaagtaaattttcttctttcctgactttgacattgtagctatactgtttccatttttgtttttacaaatcctttgggtctaattctgtgagcctacctatagcactggattaaaatgtctgcatcatttctttagttatccagttaactttaaaactgttgtaaaagtgtaaaccagcccatgacaggtttttgtacatgttaaagaacttcattgttcagttttcatgattattgtgtaaggaagactgatgtagatgttctgtgctgtcctggaccatgttaattacacttacgacgtattttagttccacatcacaatgatttgtccccagtgacccttttatcctttctaggcacatttcttgttgttgttgttgttgcagttcccctttgcattgtattgctttgacaactgtaatttgaatcagatctgaaagaggtccagaataaaatatattttgatattaaaaaaaaaaaaaaaaaaaaaaaaaaaaaaaaaaaaaaaaaaaaaaaaaaaaacacagtgtgtgtggggccgcgccacagggcccacaagaaagacacttcaaaaacacacaggggtgggacgcggaggacccccaaaagagaaagcgaaacaggggcacaaagagcgcacccaagagaaacaccggggcagagacaacaggaggcgaggggtctcacacacaaaaaaaaaaaacggcacgggggagacacacgagaggtgttgtgaaaacgacacccacaagagggatacacagaagagaaaagacgggggaaccacataacaaggagagatccaaggagaccagcaaaataaataccg

SEQ ID NO: 290980 - DNA, 907 bp, Homo sapiens
tgggaattgtctgtatcagacatcatgggagcagatccagggcgacatcaaagggaagcatgagtctccaggaccagaggggcttggatgcagatgatcatcatctgggcactgctggatactgaggcagagagctccgctaagggcgtccactccttctacaacaacatcagcgggctgactgactttggtgagaaggtggtggcagaaatgaaccgcctgggcatgatggtagacttatcccatgtctcagatgctgtggcacggcgggccctggaagtgtcacaggcacctgtgatcttctcccactcggctgcccggggtgtgtgcaacagtgctcggaatgttcctgatgacatcctgcagcttctgaagaagaacggtggcgtcgtgatggtgtctttgtccatgggagtaatacagtgcaacccatcagccaatgtgtccactgtggcagatcacttcgaccacatcaaggctgtcattggatccaagttcatcgggattggtggagattatgatggggccggcaagtacaggaagaaaacaaatggcaaagccccttggaggacaagttcccggatgagcagctgagcagttcctgccactccgacctctcacgtctgcgtcagagacagagtctgacttcaggccaggaactcactgagattcccatacactggacagccaagttaccagccaagtggtcagtctcagagtcctccccccacatggccccagtccttgcagttgtggccaccttcccagtccttattctgtggctctgatgacccagttagtcctgccagatgtcactgtagcaagccacagacaccccacaaagttcccctgttgtgcaggcacaaatatttcctgaaataaatgttttggacatagaaaaaaaaaa

SEQ ID NO: 290981 - DNA, 727 bp, Homo sapiens
ttgtcttagtgtgtccggaattggtgggttcttggtctcactgagttctagaatgaagctgcagaccctcgcagtgagtgttacagctcttaagttctggtcagcctatgtgccatgccagacccaggaccgggatgccctgcgcctcaccctggagcagattgacctcatacgccgcatgtgtgcctcctattctgagctggagcttgtgacctcggctaaaggtaggcaagttgatgggaagcgttaggaacttgattgagctactccagccctggaaagtaatcacctgacctacctgcccccagctctgaacgacactcagaaattggcctgcctcatcggtgtagagggtggccactcgctggacaatagcctctccatcttacgtaccttctacatgctgggagtgcgctacctgacgctcacccacacctgcaacacaccctgctggtgagcctagtgcagatggtgtgggaccgctgaggcaggggcagagatctgcctgaggtcactgtgggcccagaacaagctttacccatgggatgtggcactgactctggagtggggaggggagctgggattctggttttcagaatacgacttgacccctggccagacgcggtggctcatgcctgtaatcccaaaactttgggaggctgaggcggacagataacttaaggccaggagttcgagaccagcctggccaagatggtgaaaccctatc

SEQ ID NO: 290982 - DNA, 1719 bp, Homo sapiens
ttgtcttagtgtgtccggaattggtgggttcttggtctcactgagttctagaatgaagctgcagaccctcgcagtgagtgttacagctcttaaggctctctgactgccacccctgcctgcctgcccggccctgcacaacatgcagccctccggcctcgagggtcccggcacgtttggtcggtggcctctgctgagtctgctgctcctgctgctgctgctccagcctgtaacctgtgcctacaccacgccaggcccccccagagccctcaccacgctgggcgcccccagagcccacaccatgccgggcacctacgctccctcgaccacactcagtagtcccagcacccagggcctgcaagagcaggcacgggccctgatgcgggacttcccgctcgtggacggccacaacgacctgcccctggtcctaaggcaggtttaccagaaagggctacaggatgttaacctgcgcaatttcagctacggccagaccagcctggacaggcttagagatggcctcgtgggcgcccagttctggtcagcctatgtgccatgccagacccaggaccgggatgccctgcgcctcaccctggagcagattgacctcatacgccgcatgtgtgcctcctattctgagctggagcttgtgacctcggctaaagctctgaacgacactcagaaattggcctgcctcatcggtgtagagggtggccactcgctggacaatagcctctccatcttacgtaccttctacatgctgggagtgcgctacctgacgctcacccacacctgcaacacaccctgggcagagagctccgctaagggcgtccactccttctacaacaacatcagcgggctgactgactttggtgagaaggtggtggcagaaatgaaccgcctgggcatgatggtagacttatcccatgtctcagatgctgtggcacggcgggccctggaagtgtcacaggcacctgtgatcttctcccactcggctgcccggggtgtgtgcaacagtgctcggaatgttcctgatgacatcctgcagcttctgaagaagaacggtggcgtcgtgatggtgtctttgtccatgggagtaatacagtgcaacccatcagccaatgtgtccactgtggcagatcacttcgaccacatcaaggctgtcattggatccaagttcatcgggattggtggagattatgatggggccggcaaattccctcaggggctggaagacgtgtccacatacccggtcctgatagaggagttgctgagtcgtggctggagtgaggaagagcttcagggtgtccttcgtggaaacctgctgcgggtcttcagacaagtggaaaaggtacaggaagaaaacaaatggcaaagccccttggaggacaagttcccggatgagcagctgagcagttcctgccactccgacctctcacgtctgcgtcagagacagagtctgacttcaggccaggaactcactgagattcccatacactggacagccaagttaccagccaagtggtcagtctcagagtcctccccccacatggccccagtccttgcagttgtggccaccttcccagtccttattctgtggctctgatgacccagttagtcctgccagatgtcactgtagcaagccacagacaccccacaaagttcccctgttgtgcaggcacaaatatttcctgaaataaatgttttggacatagaaaaaaaaaa

SEQ ID NO: 290983 - DNA, 1698 bp, Homo sapiens
ttgtcttagtgtgtccggaattggtgggttcttggtctcactgagttctagaatgaagctgcagaccctcgcagctctctgactgccacccctgcctgcctgcccggccctgcacaacatgcagccctccggcctcgagggtcccggcacgtttggtcggtggcctctgctgagtctgctgctcctgctgctgctgctccagcctgtaacctgtgcctacaccacgccaggcccccccagagccctcaccacgctgggcgcccccagagcccacaccatgccgggcacctacgctccctcgaccacactcagtagtcccagcacccagggcctgcaagagcaggcacgggccctgatgcgggacttcccgctcgtggacggccacaacgacctgcccctggtcctaaggcaggtttaccagaaagggctacaggatgttaacctgcgcaatttcagctacggccagaccagcctggacaggcttagagatggcctcgtgggcgcccagttctggtcagcctatgtgccatgccagacccaggaccgggatgccctgcgcctcaccctggagcagattgacctcatacgccgcatgtgtgcctcctattctgagctggagcttgtgacctcggctaaagctctgaacgacactcagaaattggcctgcctcatcggtgtagagggtggccactcgctggacaatagcctctccatcttacgtaccttctacatgctgggagtgcgctacctgacgctcacccacacctgcaacacaccctgggcagagagctccgctaagggcgtccactccttctacaacaacatcagcgggctgactgactttggtgagaaggtggtggcagaaatgaaccgcctgggcatgatggtagacttatcccatgtctcagatgctgtggcacggcgggccctggaagtgtcacaggcacctgtgatcttctcccactcggctgcccggggtgtgtgcaacagtgctcggaatgttcctgatgacatcctgcagcttctgaagaagaacggtggcgtcgtgatggtgtctttgtccatgggagtaatacagtgcaacccatcagccaatgtgtccactgtggcagatcacttcgaccacatcaaggctgtcattggatccaagttcatcgggattggtggagattatgatggggccggcaaattccctcaggggctggaagacgtgtccacatacccggtcctgatagaggagttgctgagtcgtggctggagtgaggaagagcttcagggtgtccttcgtggaaacctgctgcgggtcttcagacaagtggaaaaggtacaggaagaaaacaaatggcaaagccccttggaggacaagttcccggatgagcagctgagcagttcctgccactccgacctctcacgtctgcgtcagagacagagtctgacttcaggccaggaactcactgagattcccatacactggacagccaagttaccagccaagtggtcagtctcagagtcctccccccacatggccccagtccttgcagttgtggccaccttcccagtccttattctgtggctctgatgacccagttagtcctgccagatgtcactgtagcaagccacagacaccccacaaagttcccctgttgtgcaggcacaaatatttcctgaaataaatgttttggacatagaaaaaaaaaa

SEQ ID NO: 290984 - DNA, 1753 bp, Homo sapiens
ggtttctgtgagagctcaagccacaggagccacaagataagaggagtgtggctgcagaacccaggtggcagggctttcctcaggccccttactcctgacctggacgaggccggggcttcctcaaggaggctctctgactgccacccctgcctgcctgcccggccctgcacaacatgcagccctccggcctcgagggtcccggcacgtttggtcggtggcctctgctgagtctgctgctcctgctgctgctgctccagcctgtaacctgtgcctacaccacgccaggcccccccagagccctcaccacgctgggcgcccccagagcccacaccatgccgggcacctacgctccctcgaccacactcagtagtcccagcacccagggcctgcaagagcaggcacgggccctgatgcgggacttcccgctcgtggacggccacaacgacctgcccctggtcctaaggcaggtttaccagaaagggctacaggatgttaacctgcgcaatttcagctacggccagaccagcctggacaggcttagagatggcctcgtgggcgcccagttctggtcagcctatgtgccatgccagacccaggaccgggatgccctgcgcctcaccctggagcagattgacctcatacgccgcatgtgtgcctcctattctgagctggagcttgtgacctcggctaaagctctgaacgacactcagaaattggcctgcctcatcggtgtagagggtggccactcgctggacaatagcctctccatcttacgtaccttctacatgctgggagtgcgctacctgacgctcacccacacctgcaacacaccctgggcagagagctccgctaagggcgtccactccttctacaacaacatcagcgggctgactgactttggtgagaaggtggtggcagaaatgaaccgcctgggcatgatggtagacttatcccatgtctcagatgctgtggcacggcgggccctggaagtgtcacaggcacctgtgatcttctcccactcggctgcccggggtgtgtgcaacagtgctcggaatgttcctgatgacatcctgcagcttctgaagaagaacggtggcgtcgtgatggtgtctttgtccatgggagtaatacagtgcaacccatcagccaatgtgtccactgtggcagatcacttcgaccacatcaaggctgtcattggatccaagttcatcgggattggtggagattatgatggggccggcaaattccctcaggggctggaagacgtgtccacatacccggtcctgatagaggagttgctgagtcgtggctggagtgaggaagagcttcagggtgtccttcgtggaaacctgctgcgggtcttcagacaagtggaaaaggtacaggaagaaaacaaatggcaaagccccttggaggacaagttcccggatgagcagctgagcagttcctgccactccgacctctcacgtctgcgtcagagacagagtctgacttcaggccaggaactcactgagattcccatacactggacagccaagttaccagccaagtggtcagtctcagagtcctccccccacatggccccagtccttgcagttgtggccaccttcccagtccttattctgtggctctgatgacccagttagtcctgccagatgtcactgtagcaagccacagacaccccacaaagttcccctgttgtgcaggcacaaatatttcctgaaataaatgttttggacatagaaaaaaaaaa

SEQ ID NO: 290985 - DNA, 1750 bp, Homo sapiens
tgggaattgtctgtatcagacatcatgggagcagatccagggcgacatcaaagggaagcatgagtctccaggaccagaggggcttggatgcagatgatcatcatctgggcactgctggatactgagctctctgactgccacccctgcctgcctgcccggccctgcacaacatgcagccctccggcctcgagggtcccggcacgtttggtcggtggcctctgctgagtctgctgctcctgctgctgctgctccagcctgtaacctgtgcctacaccacgccaggcccccccagagccctcaccacgctgggcgcccccagagcccacaccatgccgggcacctacgctccctcgaccacactcagtagtcccagcacccagggcctgcaagagcaggcacgggccctgatgcgggacttcccgctcgtggacggccacaacgacctgcccctggtcctaaggcaggtttaccagaaagggctacaggatgttaacctgcgcaatttcagctacggccagaccagcctggacaggcttagagatggcctcgtgggcgcccagttctggtcagcctatgtgccatgccagacccaggaccgggatgccctgcgcctcaccctggagcagattgacctcatacgccgcatgtgtgcctcctattctgagctggagcttgtgacctcggctaaagctctgaacgacactcagaaattggcctgcctcatcggtgtagagggtggccactcgctggacaatagcctctccatcttacgtaccttctacatgctgggagtgcgctacctgacgctcacccacacctgcaacacaccctgggcagagagctccgctaagggcgtccactccttctacaacaacatcagcgggctgactgactttggtgagaaggtggtggcagaaatgaaccgcctgggcatgatggtagacttatcccatgtctcagatgctgtggcacggcgggccctggaagtgtcacaggcacctgtgatcttctcccactcggctgcccggggtgtgtgcaacagtgctcggaatgttcctgatgacatcctgcagcttctgaagaagaacggtggcgtcgtgatggtgtctttgtccatgggagtaatacagtgcaacccatcagccaatgtgtccactgtggcagatcacttcgaccacatcaaggctgtcattggatccaagttcatcgggattggtggagattatgatggggccggcaaattccctcaggggctggaagacgtgtccacatacccggtcctgatagaggagttgctgagtcgtggctggagtgaggaagagcttcagggtgtccttcgtggaaacctgctgcgggtcttcagacaagtggaaaaggtacaggaagaaaacaaatggcaaagccccttggaggacaagttcccggatgagcagctgagcagttcctgccactccgacctctcacgtctgcgtcagagacagagtctgacttcaggccaggaactcactgagattcccatacactggacagccaagttaccagccaagtggtcagtctcagagtcctccccccacatggccccagtccttgcagttgtggccaccttcccagtccttattctgtggctctgatgacccagttagtcctgccagatgtcactgtagcaagccacagacaccccacaaagttcccctgttgtgcaggcacaaatatttcctgaaataaatgttttggacatagaaaaaaaaaa

SEQ ID NO: 290986 - DNA, 1486 bp, Homo sapiens
tgggaattgtctgtatcagacatcatgggagcagatccagggcgacatcaaagggaagcatgagtctccaggaccagaggggcttggatgcagatgatcatcatctgggcactgctggatactgagctctctgactgccacccctgcctgcctgcccggccctgcacaacatgcagccctccggcctcgagggtcccggcacgtttggtcggtggcctctgctgagtctgctgctcctgctgctgctgctccagcctgtaacctgtgcctacaccacgccaggcccccccagagccttctggtcagcctatgtgccatgccagacccaggaccgggatgccctgcgcctcaccctggagcagattgacctcatacgccgcatgtgtgcctcctattctgagctggagcttgtgacctcggctaaagctctgaacgacactcagaaattggcctgcctcatcggtgtagagggtggccactcgctggacaatagcctctccatcttacgtaccttctacatgctgggagtgcgctacctgacgctcacccacacctgcaacacaccctgggcagagagctccgctaagggcgtccactccttctacaacaacatcagcgggctgactgactttggtgagaaggtggtggcagaaatgaaccgcctgggcatgatggtagacttatcccatgtctcagatgctgtggcacggcgggccctggaagtgtcacaggcacctgtgatcttctcccactcggctgcccggggtgtgtgcaacagtgctcggaatgttcctgatgacatcctgcagcttctgaagaagaacggtggcgtcgtgatggtgtctttgtccatgggagtaatacagtgcaacccatcagccaatgtgtccactgtggcagatcacttcgaccacatcaaggctgtcattggatccaagttcatcgggattggtggagattatgatggggccggcaaattccctcaggggctggaagacgtgtccacatacccggtcctgatagaggagttgctgagtcgtggctggagtgaggaagagcttcagggtgtccttcgtggaaacctgctgcgggtcttcagacaagtggaaaaggtacaggaagaaaacaaatggcaaagccccttggaggacaagttcccggatgagcagctgagcagttcctgccactccgacctctcacgtctgcgtcagagacagagtctgacttcaggccaggaactcactgagattcccatacactggacagccaagttaccagccaagtggtcagtctcagagtcctccccccacatggccccagtccttgcagttgtggccaccttcccagtccttattctgtggctctgatgacccagttagtcctgccagatgtcactgtagcaagccacagacaccccacaaagttcccctgttgtgcaggcacaaatatttcctgaaataaatgttttggacatagaaaaaaaaaa

SEQ ID NO: 290987 - DNA, 1737 bp, Homo sapiens
ttgtcttagtgtgtccggaattggtgggttcttggtctcactgagttctagaatgaagctgcagaccctcgcagctctctgactgccacccctgcctgcctgcccggccctgcacaacatgcagccctccggcctcgagggtcccggcacgtttggtcggtggcctctgctgagtctgctgctcctgctgctgctgctccagcctgtaacctgtgcctacaccacgccaggcccccccagagccctcaccacgctgggcgcccccagagcccacaccatgccgggcacctacgctccctcgaccacactcagtagtcccagcacccagggcctgcaagagcaggcacgggccctgatgcgggacttcccgctcgtggacggccacaacgacctgcccctggtcctaaggcaggtttaccagaaagggctacaggatgttaacctgcgcaatttcagctacggccagaccagcctggacaggcttagagatggcctcgtgggcgcccagttctggtcagcctatgtgccatgccagacccaggaccgggatgccctgcgcctcaccctggagcagattgacctcatacgccgcatgtgtgcctcctattctgagctggagcttgtgacctcggctaaagctctgaacgacactcagaaattggcctgcctcatcggtgtagagggtggccactcgctggacaatagcctctccatcttacgtaccttctacatgctgggagtgcgctacctgacgctcacccacacctgcaacacaccctgggcagagagctccgctaagggcgtccactccttctacaacaacatcagcgggctgactgactttggtgagaaggtggtggcagaaatgaaccgcctgggcatgatggtagacttatcccatgtctcagatgctgtggcacggcgggccctggaagtgtcacaggcacctgtgatcttctcccactcggctgcccggggtgtgtgcaacagtgctcggaatgttcctgatgacatcctgcagcttctgaagaagaacggtggcgtcgtgatggtgtctttgtccatgggagtaatacagtgcaacccatcagccaatgtgtccactgtggcagatcacttcgaccacatcaaggctgtcattggatccaagttcatcgggattggtggagattatgatggggccggcaaggaatcaggtctgaaacccactagctggtggccacacagattccctcaggggctggaagacgtgtccacatacccggtcctgatagaggagttgctgagtcgtggctggagtgaggaagagcttcagggtgtccttcgtggaaacctgctgcgggtcttcagacaagtggaaaaggtacaggaagaaaacaaatggcaaagccccttggaggacaagttcccggatgagcagctgagcagttcctgccactccgacctctcacgtctgcgtcagagacagagtctgacttcaggccaggaactcactgagattcccatacactggacagccaagttaccagccaagtggtcagtctcagagtcctccccccacatggccccagtccttgcagttgtggccaccttcccagtccttattctgtggctctgatgacccagttagtcctgccagatgtcactgtagcaagccacagacaccccacaaagttcccctgttgtgcaggcacaaatatttcctgaaataaatgttttggacatagaaaaaaaaaa

SEQ ID NO: 290988 - DNA, 1043 bp, Homo sapiens
tgggaattgtctgtatcagacatcatgggagcagatccagggcgacatcaaagggaagcatgagtctccaggaccagaggggcttggatgcagatgatcatcatctgggcactgctggatactgaggcagagagctccgctaagggcgtccactccttctacaacaacatcagcgggctgactgactttggtgagaaggtggtggcagaaatgaaccgcctgggcatgatggtagacttatcccatgtctcagatgctgtggcacggcgggccctggaagtgtcacaggcacctgtgatcttctcccactcggctgcccggggtgtgtgcaacagtgctcggaatgttcctgatgacatcctgcagcttctgaagaagaacggtggcgtcgtgatggtgtctttgtccatgggagtaatacagtgcaacccatcagccaatgtgtccactgtggcagatcacttcgaccacatcaaggctgtcattggatccaagttcatcgggattggtggagattatgatggggccggcaaattccctcaggggctggaagacgtgtccacatacccggtcctgatagaggagttgctgagtcgtggctggagtgaggaagagcttcagggtgtccttcgtggaaacctgctgcgggtcttcagacaagtggaaaaggtacaggaagaaaacaaatggcaaagccccttggaggacaagttcccggatgagcagctgagcagttcctgccactccgacctctcacgtctgcgtcagagacagagtctgacttcaggccaggaactcactgagattcccatacactggacagccaagttaccagccaagtggtcagtctcagagtcctccccccacatggccccagtccttgcagttgtggccaccttcccagtccttattctgtggctctgatgacccagttagtcctgccagatgtcactgtagcaagccacagacaccccacaaagttcccctgttgtgcaggcacaaatatttcctgaaataaatgttttggacatagaaaaaaaaaa

SEQ ID NO: 290989 - DNA, 1562 bp, Homo sapiens
ttgtcttagtgtgtccggaattggtgggttcttggtctcactgagttctagaatgaagctgcagaccctcgcagctctctgactgccacccctgcctgcctgcccggccctgcacaacatgcagccctccggcctcgagggtcccggcacgtttggtcggtggcctctgctgagtctgctgctcctgctgctgctgctccagcctgtaacctgtgcctacaccacgccaggcccccccagagccctcaccacgctgggcgcccccagagcccacaccatgccgggcacctacgctccctcgaccacactcagtagtcccagcacccagggcctgcaagagcaggcacgggccctgatgcgggacttcccgctcgtggacggccacaacgacctgcccctggtcctaaggcaggtttaccagaaagggctacaggatgttaacctgcgcaatttcagctacggccagaccagcctggacaggcttagagatggcctcgtgggcgcccagttctggtcagcctatgtgccatgccagacccaggaccgggatgccctgcgcctcaccctggagcagattgacctcatacgccgcatgtgtgcctcctattctgagctggagcttgtgacctcggctaaagctctgaacgacactcagaaattggcctgcctcatcggtgtagagggtggccactcgctggacaatagcctctccatcttacgtaccttctacatgctgggagtgcgctacctgacgctcacccacacctgcaacacaccctgggcagagagctccgctaagggcgtccactccttctacaacaacatcagcgggctgactgactttggtgagaaggtggtggcagaaatgaaccgcctgggcatgatggtagacttatcccatgtctcagatgctgtggcacggcgggccctggaagtgtcacaggcacctgtgatcttctcccactcggctgcccggggtgtgtgcaacagtgctcggaatgttcctgatgacatcctgcagcttctgaagaagaacggtggcgtcgtgatggtgtctttgtccatgggagtaatacagtgcaacccatcagccaatgtgtccactgtggcagatcacttcgaccacatcaaggctgtcattggatccaagttcatcgggattggtggagattatgatggggccggcaagtacaggaagaaaacaaatggcaaagccccttggaggacaagttcccggatgagcagctgagcagttcctgccactccgacctctcacgtctgcgtcagagacagagtctgacttcaggccaggaactcactgagattcccatacactggacagccaagttaccagccaagtggtcagtctcagagtcctccccccacatggccccagtccttgcagttgtggccaccttcccagtccttattctgtggctctgatgacccagttagtcctgccagatgtcactgtagcaagccacagacaccccacaaagttcccctgttgtgcaggcacaaatatttcctgaaataaatgttttggacatagaaaaaaaaaa

SEQ ID NO: 290990 - DNA, 1634 bp, Homo sapiens
ttgtcttagtgtgtccggaattggtgggttcttggtctcactgagttctagaatgaagctgcagaccctcgcagctctctgactgccacccctgcctgcctgcccggccctgcacaacatgcagccctccggcctcgagggtcccggcacgtttggtcggtggcctctgctgagtctgctgctcctgctgctgctgctccagcctgtaacctgtgcctacaccacgccaggcccccccagagccctcaccacgctgggcgcccccagagcccacaccatgccgggcacctacgctccctcgaccacactcagtagtcccagcacccagggcctgcaagagcaggcacgggccctgatgcgggacttcccgctcgtggacggccacaacgacctgcccctggtcctaaggcaggtttaccagaaagggctacaggatgttaacctgcgcaatttcagctacggccagaccagcctggacaggcttagagatggcctcgtgggcgcccagttctggtcagcctatgtgccatgccagacccaggaccgggatgccctgcgcctcaccctggagcagattgacctcatacgccgcatgtgtgcctcctattctgagctggagcttgtgacctcggctaaagctctgaacgacactcagaaattggcctgcctcatcggtgtagagggtggccactcgctggacaatagcctctccatcttacgtaccttctacatgctgggagtgcgctacctgacgctcacccacacctgcaacacaccctgggcagagagctccgctaagggcgtccactccttctacaacaacatcagcgggctgactgactttggtgagaaggtggtggcagaaatgaaccgcctgggcatgatggtagacttatcccatgtctcagatgctgtggcacggcgggccctggaagtgtcacaggcacctgtgatcttctcccactcggctgcccggggtgtgtgcaacagtgctcggaatgttcctgatgacatcctgcagcttctgaagaagaacggtggcgtcgtgatggtgtctttgtccatgggagtaatacagtgcaacccatcagccaatgtgtccactgtggcagatcacttcgaccacatcaaggctgtcattggatccaagttcatcgggattggtggagattatgatggggccggcaaattccctcaggggctggaagacgtgtccacatacccggtcctgatagaggagttgctgagtcgtggctggagtgaggaagagcttcagggtgtccttcgtggaaacctgctgcgggtcttcagacaagtggaaaaggtacaggaagaaaacaaatggcaaagccccttggaggacaagttcccggatgagcagctgagcagttcctgccactccgacctctcacagccaagttaccagccaagtggtcagtctcagagtcctccccccacatggccccagtccttgcagttgtggccaccttcccagtccttattctgtggctctgatgacccagttagtcctgccagatgtcactgtagcaagccacagacaccccacaaagttcccctgttgtgcaggcacaaatatttcctgaaataaatgttttggacatagaaaaaaaaaa

SEQ ID NO: 290991 - DNA, 431 bp, Homo sapiens
taggggggatcatttgcattcagtaaaaggcatagatcttaatagtatgattcaataagttttgataaatattcaaggaggttttgaggcctccttctgaaggataaagagcagaggagaattacctactctctccaagtctccacttcccatacctgaccagggctggggtttcatagaccctggactgtggttctgagtcatgatcagggaatcaggtctgaaacccactagctggtggccacacagattccctcaggggctggaagacgtgtccacatacccggtcctgatagaggagttgctgagtcgtggctggagtgaggaagagcttcagggtgtccttcgtggaaacctgctgcgggtcttcagacaagtggaaaaggtactctgggctgggcaagagagtagccgaggggtctgagcaagtg

SEQ ID NO: 290992 - DNA, 5375 bp, Homo sapiens
  misc_feature (32)..(32): n is a, c, g, or t
ctaagctagggctgggctgttgcgcttgcgcncagggttcgcaatgcacgtcaacgcgcatgccgaccgcttccggtgcgccgcgagggccgccgggacggtctccctggcgatccgtggtgtgccgctactgccggtgcagccgccaaaccggtgcctcggtgacgaccgtgtccctgccgtcttcctcgagctccccggggcttgacccccggggccctcggcaggcatcggtgaggagcctgcggagcgaacctgtgctcctattcttgcccttcaggaccccatatcgcgactccgaggaggggaagcgagaggggctgtcgcgactccgcgccgtgtgtcgccgggcggggccgcggggccggggctccttcagcccccgggatgcgcgcgcgagccctcgcctccacttccttgttgctgctgtcacgactggagccgcctctcgccgacagcggggagcgcgagtgcgccagccatccccctcgtccagccgccgggccaagcgcctccgggaatgtgagcggcgcagcttgcacgctcctccggccatggacgcatcatatgatggtactgaggtaactgtcgtgatggaggaaattgaggaagcctattgttacacctctcctgggccacccaagaagaagaaaaagtataaaatacatggagaaaagacaaagaaacccaggtctgcttaccttctgtactattacgacatctacctgaaagtgcagcaggagctcccccacctccctcagtctgagatcaataagaagattagtgagagttggaggcttctcagcgtggccgagaggagttactacttggagaaagccaaactagagaaggaaggtttggatcctaactctaagctctctgcactgactgctgtggttccggacatcccaggtttccgcaagatcctcccacgctcagattatatcatcatccccaagagcagcctgcaggaggaccggagctgccctcagctagagctatgtgtggctcagaaccagatgtccccgaaaggacctcctcttgtgtccaacactgccccggagacagtgcccagccatgcaggcatggcagagcagtgcctggctgtggaggccctggctgaggaggtgggagcccttacccagtcaggtgctgtacaggagattgccacctcagagatcctcagccaggatgtgctcctagaggacgcttccctagaagtaggggagagccaccaaccttaccagacaagcctggtaattgaagagaccttggtgaatggctcaccagacctccccactggaagcctggctgtgccccacccccaggttggggagagtgtatcagtggtaacagtcatgagggattccagtgagagtagctcctctgcaccagccacacagttcatcatgttgcctctgcctgcctactcggttgtggagaaccccacctccatcaaactgaccactacatatacccgccggggccatgggacatgcaccagcccagggtgctcctttacatatgtcaccaggcacaagccacctaagtgccctacctgtggtaacttcctaggagggaagtggatcccaaaggaaaagccagccaaagtaaaagtggaattggcttctggcgtctcttccaaaggctctgtggtgaaaagaaatcagcaacctgtcaccactgagcaaaattcctctaaggaaaatgcctccaaactgactctggagaattcggaagctgtaagccagctcctgaacgtagctcctcccagagaagtaggtgaggagagtgagtgggaggaagtgatcatctccgatgcccatgttttggttaaggaagctcccgggaattgtggtacagcagtcactaagacgccagtcgtcaaaagtggtgtgcagcctgaggtcactctggggacaactgacaatgacagtcctggagcagacgtaccaacaccatccgaggggacaagtacctccagtccactccctgctcctaaaaaacctacaggagttgacctgcttacccctgggtccagagctccagagcttaaaggcagagcacggggcaagccctcattactggctgcagcaagacccatgagagcaattttgccagccccagttaacgtggggcgaggcagcagcatgggactgcccagggccaggcaggccttttccctgagtgataagactccctctgtgaggacttgtggtctgaagccaagcacactgaagcagctgggccagcccattcaacagccatctggccctggtgaggtgaagctaccaagtggcccatccaacaggacttctcaggtgaaagttgtggaggtcaagcccgatatgtttcctccatataagtacagctgcactgtcacattggatttgggcctggctacatcaagaggccggggaaagtgcaagaatccctcttgtagctatgtctacaccaacaggcacaaacctcgaatttgtcccagctgtggtgttaaccttgccaaagaccggactgagaaaaccaccaaggctatcgaggtgagctcaccactcccagatgtactgaatgccacagagcccctgagcacagcccagagggagatccagcgccagtccacactgcagctgctgcgcaaagtcctgcagattcctgagaatgagtcagagctggctgaggtcttcgccttgattcatgaactcaacagctctcgacttatcttgtccaacgtgagtgaggagacagtcaccatcgagcaaacctcttggtcgaattattatgagtctccgtccacgcagtgccttctctgtagcagcccattattcaaagggggacaaaactccctggctgggccccaggagtgctggctgctgacagccagccgtctgcagacagtgactgcccaggtgaagatgtgtctgaacccccattgtctggccctgcacagcttcatagacatctacacaggtctctttaatgtggggaacaagctgctggtaagcctggacttgctttttgcaatcagaaatcagatcaagctcggagaggaccccagagtgtccatcaatgttgttctgaagtcggtgcaggagcagacagagaagactctgacctcggaggagctgagccagctgcaggagctgctgtgcaatggctattgggcctttgagtgcctcactgtccgagactacaatgacatgatctgtggcatctgtggtgtggcccccaaagtggaaatggctcagaggagtgaagagaatgtgctagcactgaagagcgtggagttcacctggcctgaattcctgggctctaatgaggtaaatgtggaggacttttgggccacgatggagacagaggtgattgagcaggtggcatttcctgccagcatccctatcaccaaatttgatgcgtctgttattgcccccttcttcccaccactcatgagaggagctgtggtcgtcaacactgagaaagacaaaaacctggatgtgcagccagtacctggcagtggcagtgccttggtgaggctgctccaggagggcacctgcaagcttgatgagattggctcctacagtgaagagaagctgcagcacctgctaaggcagtgtggaatcccctttggggcagaagactccaaggaccagctctgcttctccttgttggccctctacgaatctgtacagaatggagctagagctatacggcccccacgtcacttcacaggtggtaaaatctacaaggtgtgcccccatcaggtggtctgcggctccaagtatcttgtgcgaggtgagagtgcccgtgaccatgtggacctgcttgcctcttcccgccactggccgcctgtctatgtggtagatatggccacgtcagtggccctgtgtgctgacctctgctacccagagctgactaaccagatgtgggggaggaaccagggctgtttctctagccccacagagccacctgtgagtgtgtcctgcccagagctcttggaccagcattatactgtggacatgacagaaactgagcactctatccagcacccagtcaccaagactgccacgcggcgcatcgtccatgcaggcctacagcccaatcctggtgaccccagtgctgggcaccactccttggccctgtgccctgaattggcaccttacgcaaccatcctggcctccatcgtggacagcaaaccaaacggtgtccgccagcggcccattgccttcgacaatgccactcactattacctctacaaccgcctcatggacttcctcaccagccgcgaaattgtcaatcgtcagatccatgacattgtacagagctgccagcctggtgaggtggtcattcgtgacaccctctaccgccttggggttgctcagatcaagacagagacagaggaggagggtgaggaagaggaggtggccgcagtggcagaataagccaggctgttgtacagggactacaccatctctcaagccatagtaaggcccttgcctgaggcagagctatccaggggacctgcagaagtggtctcctgtggggagggcctctgactgctgggactgaccaaagagcttccattccctgagcatggtgggacccagggtcctcagttctcaaccctccaggggtcaggagtggtaccaggaaacctcttctggccccgagagagcacttgggggacacggtatgtttaatggaggggaggctgagggaaaggctgatagctggtgggttccgtggggcctgctgtgtgggtcagggtggaggtcctgggtgggctaaggcgtgagccccagcactaggtgggaaggctgctgaggtctctcccacccctgaggagccctggtttcagccccctcagtctgatgaattgcttagcctgttgcctttgactaggggcctgggtggcctcattaactctaggggtccctttgggctcttgattctccctgaaggagggatgcatttctctcttgctcttcctgtacccacatttgggggaagctgaggagggaggaacagtcagccacagctctcttccagcactgtcctctccaccccaagctttgaggaagagcatccccttcctcctttccctggccactgctgctgcagccaatatcctctctgggcctgggaccctctccacagaggggatgtggtccctggtcatgacataacctagcagcagtaggaaaaactcccttctatgaaggggaagcagactgggccataaggaaacagcaggactggctcaagtgcccaaggtttgtttagggcctgggaattggccatgtgttaatttattgagtggagtaggtggctttttttccctccctcttcccccaacaagaataaagtttattaaattatctggt

SEQ ID NO: 290993 - DNA, 785 bp, Homo sapiens
tgcagctggatgcatagaaggaatgttgggccaagaatagagaaatatgggttctaggtctagctctgcccttgattgatgatttgaggcaaagcatttaaacctcagtagtaataatacgtacttaatacgattgctgagagtattaaatgaaatattggtaaagtgtttagcattgtgtggtgcctagctcaatgcatagcaactatcactttcttcattcttctggtacctaactgtaatgttgggcaattgtctttccccatttgaacttagtttctccatttctaaagagtgaatttgttgtattgtaggacctttccaacactgaccttttatgatatgattatgaattggttatctttccacaagcttgtgacctcctggtgttgctgtgattatagtggtcatcagtctgagagaggttgttctattgattctgatgtgctctttatttacagaccactacatatacccgccggggccatgggacatgcaccagcccagggtgctcctttacatatgtcaccaggcacaagccacctaagtgccctacctgtggtaacttcctaggagggaagtggatcccaaaggtaaggtccattggctgttgctgctttggaagcctcacagaatagactttctgtttgccattaggaacaggtgatttttaaaaagttaacatttgtttttactgtctgactatacaagtaaatcatttccattgtatatagtttgtttaaaaaatacaaaagaaaaatggaataaattgttatccaaactca

SEQ ID NO: 290994 - DNA, 111 bp, Homo sapiens
tcaagcttctaacgatgtacggggacatgtgttaatttattgagtggagtaggtggctttttttccctccctcttcccccaacaagaataaagtttattaaattatctggt

SEQ ID NO: 290995 - DNA, 4373 bp, Homo sapiens
tgcagctggatgcatagaaggaatgttgggccaagaatagagaaatatgggttctaggtctagctctgcccttgattgatgatttgaggcaaagcatttaaacctcagtagtaataatacgtacttaatacgattgctgagagtattaaatgaaatattggtaaagtgtttagcattgtgtggtgcctagctcaatgcatagcaactatcactttcttcattcttctggtacctaactgtaatgttgggcaattgtctttccccatttgaacttagtttctccatttctaaagagtgaatttgttgtattgtaggacctttccaacactgaccttttatgatatgattatgaattggttatctttccacaagcttgtgacctcctggtgttgctgtgattatagtggtcatcagtctgagagaggttgttctattgattctgatgtgctctttatttacagaccactacatatacccgccggggccatgggacatgcaccagcccagggtgctcctttacatatgtcaccaggcacaagccacctaagtgccctacctgtggtaacttcctaggagggaagtggatcccaaaggaaaagccagccaaagtaaaagtggaattggcttctggcgtctcttccaaaggctctgtggtgaaaagaaatcagcaacctgtcaccactgagcaaaattcctctaaggaaaatgcctccaaactgactctggagaattcggaagctgtaagccagctcctgaacgtagctcctcccagagaagtaggtgaggagagtgagtgggaggaagtgatcatctccgatgcccatgttttggttaaggaagctcccgggaattgtggtacagcagtcactaagacgccagtcgtcaaaagtggtgtgcagcctgaggtcactctggggacaactgacaatgacagtcctggagcagacgtaccaacaccatccgaggggacaagtacctccagtccactccctgctcctaaaaaacctacaggagttgacctgcttacccctgggtccagagctccagagcttaaaggcagagcacggggcaagccctcattactggctgcagcaagacccatgagagcaattttgccagccccagttaacgtggggcgaggcagcagcatgggactgcccagggccaggcaggccttttccctgagtgataagactccctctgtgaggacttgtggtctgaagccaagcacactgaagcagctgggccagcccattcaacagccatctggccctggtgaggtgaagctaccaagtggcccatccaacaggacttctcaggtgaaagttgtggaggtcaagcccgatatgtttcctccatataagtacagctgcactgtcacattggatttgggcctggctacatcaagaggccggggaaagtgcaagaatccctcttgtagctatgtctacaccaacaggcacaaacctcgaatttgtcccagctgtggtgttaaccttgccaaagaccggactgagaaaaccaccaaggctatcgaggtgagctcaccactcccagatgtactgaatgccacagagcccctgagcacagcccagagggagatccagcgccagtccacactgcagctgctgcgcaaagtcctgcagattcctgagaatgagtcagagctggctgaggtcttcgccttgattcatgaactcaacagctctcgacttatcttgtccaacgtgagtgaggagacagtcaccatcgagcaaacctcttggtcgaattattatgagtctccgtccacgcagtgccttctctgtagcagcccattattcaaagggggacaaaactccctggctgggccccaggagtgctggctgctgacagccagccgtctgcagacagtgactgcccaggtgaagatgtgtctgaacccccattgtctggccctgcacagcttcatagacatctacacaggtctctttaatgtggggaacaagctgctggtaagcctggacttgctttttgcaatcagaaatcagatcaagctcggagaggaccccagagtgtccatcaatgttgttctgaagtcggtgcaggagcagacagagaagactctgacctcggaggagctgagccagctgcaggagctgctgtgcaatggctattgggcctttgagtgcctcactgtccgagactacaatgacatgatctgtggcatctgtggtgtggcccccaaagtggaaatggctcagaggagtgaagagaatgtgctagcactgaagagcgtggagttcacctggcctgaattcctgggctctaatgaggtaaatgtggaggacttttgggccacgatggagacagaggtgattgagcaggtggcatttcctgccagcatccctatcaccaaatttgatgcgtctgttattgcccccttcttcccaccactcatgagaggagctgtggtcgtcaacactgagaaagacaaaaacctggatgtgcagccagtacctggcagtggcagtgccttggtgaggctgctccaggagggcacctgcaagcttgatgagattggctcctacagtgaagagaagctgcagcacctgctaaggcagtgtggaatcccctttggggcagaagactccaaggaccagctctgcttctccttgttggccctctacgaatctgtacagaatggagctagagctatacggcccccacgtcacttcacaggtggtaaaatctacaaggtgtgcccccatcaggtggtctgcggctccaagtatcttgtgcgaggtgagagtgcccgtgaccatgtggacctgcttgcctcttcccgccactggccgcctgtctatgtggtagatatggccacgtcagtggccctgtgtgctgacctctgctacccagagctgactaaccagatgtgggggaggaaccagggctgtttctctagccccacagagccacctgtgagtgtgtcctgcccagagctcttggaccagcattatactgtggacatgacagaaactgagcactctatccagcacccagtcaccaagactgccacgcggcgcatcgtccatgcaggcctacagcccaatcctggtgaccccagtgctgggcaccactccttggccctgtgccctgaattggcaccttacgcaaccatcctggcctccatcgtggacagcaaaccaaacggtgtccgccagcggcccattgccttcgacaatgccactcactattacctctacaaccgcctcatggacttcctcaccagccgcgaaattgtcaatcgtcagatccatgacattgtacagagctgccagcctggtgaggtggtcattcgtgacaccctctaccgccttggggttgctcagatcaagacagagacagaggaggagggtgaggaagaggaggtggccgcagtggcagaataagccaggctgttgtacagggactacaccatctctcaagccatagtaaggcccttgcctgaggcagagctatccaggggacctgcagaagtggtctcctgtggggagggcctctgactgctgggactgaccaaagagcttccattccctgagcatggtgggacccagggtcctcagttctcaaccctccaggggtcaggagtggtaccaggaaacctcttctggccccgagagagcacttgggggacacggtatgtttaatggaggggaggctgagggaaaggctgatagctggtgggttccgtggggcctgctgtgtgggtcagggtggaggtcctgggtgggctaaggcgtgagccccagcactaggtgggaaggctgctgaggtctctcccacccctgaggagccctggtttcagccccctcagtctgatgaattgcttagcctgttgcctttgactaggggcctgggtggcctcattaactctaggggtccctttgggctcttgattctccctgaaggagggatgcatttctctcttgctcttcctgtacccacatttgggggaagctgaggagggaggaacagtcagccacagctctcttccagcactgtcctctccaccccaagctttgaggaagagcatccccttcctcctttccctggccactgctgctgcagccaatatcctctctgggcctgggaccctctccacagaggggatgtggtccctggtcatgacataacctagcagcagtaggaaaaactcccttctatgaaggggaagcagactgggccataaggaaacagcaggactggctcaagtgcccaaggtttgtttagggcctgggaattggccatgtgttaatttattgagtggagtaggtggctttttttccctccctcttcccccaacaagaataaagtttattaaattatctggt

SEQ ID NO: 290996 - DNA, 3948 bp, Homo sapiens
cacgaggggaaggtatctggttagcgtcggtagttttgtatatttccagcccctagattcccttcatgtacactctgttacttgggtaaaccccagtcttctctgtaaatagtttccttttgattggtgacattgggtatttgttaaaagccacaagctcttttactagtcttaaaccagtaaagaggtacatgagatattcagaaaatcaacttaaattcattattatagaataattttaattttgtatgctttatcttttcttttttttagctatataagtaaaatatacattccttataaaacatttgaggccaggcatggtggctcatgcctgtaatcccagcactttgggaggctgaggtgggagcattgcttgagtccagcagttcaagaccagcctgggcaacatagtgagacccacatcgctaccaaaaaaaaagcaaatttggtagatagtggtaaagagggagaaacaaccatgattgtcctcttaccctgtgacattttagtgaatagtctttcagacatctttctatgcaaagttgttcaaccatgtatttatatgtataaaagctattatgtgcttttataactcagtagtagttgtaaatctgattcatggtgtttctaatacatggtattagaaactgcacagaagcatgtggcaaggcctggacttgaacatgacactcagcctttggtgggcttgtgactgccaactggcagtccagagggctcatttggagaatagctctacaaattccccgggaaagcattccctcaagtcgtttcaggacatgggagctcaggagtttggctaaggttcaaaagcactaaataatttgttctgatccacagctaccaagtggcccatccaacaggacttctcaggtgaaagttgtggaggtcaagcccgatatgtttcctccatataagtacagctgcactgtcacattggatttgggcctggctacatcaagaggccggggaaagtgcaagaatccctcttgtagctatgtctacaccaacaggcacaaacctcgaatttgtcccagctgtggtgttaaccttgccaaagaccggactgagaaaaccaccaaggctatcgaggtgagctcaccactcccagatgtactgaatgccacagagcccctgagcacagcccagagggagatccagcgccagtccacactgcagctgctgcgcaaagtcctgcagattcctgagaatgagtcagagctggctgaggtcttcgccttgattcatgaactcaacagctctcgacttatcttgtccaacgtgagtgaggagacagtcaccatcgagcaaacctcttggtcgaattattatgagtctccgtccacgcagtgccttctctgtagcagcccattattcaaagggggacaaaactccctggctgggccccaggagtgctggctgctgacagccagccgtctgcagacagtgactgcccaggtgaagatgtgtctgaacccccattgtctggccctgcacagcttcatagacatctacacaggtctctttaatgtggggaacaagctgctggtaagcctggacttgctttttgcaatcagaaatcagatcaagctcggagaggaccccagagtgtccatcaatgttgttctgaagtcggtgcaggagcagacagagaagactctgacctcggaggagctgagccagctgcaggagctgctgtgcaatggctattgggcctttgagtgcctcactgtccgagactacaatgacatgatctgtggcatctgtggtgtggcccccaaagtggaaatggctcagaggagtgaagagaatgtgctagcactgaagagcgtggagttcacctggcctgaattcctgggctctaatgaggtaaatgtggaggacttttgggccacgatggagacagaggtgattgagcaggtggcatttcctgccagcatccctatcaccaaatttgatgcgtctgttattgcccccttcttcccaccactcatgagaggagctgtggtcgtcaacactgagaaagacaaaaacctggatgtgcagccagtacctggcagtggcagtgccttggtgaggctgctccaggagggcacctgcaagcttgatgagattggctcctacagtgaagagaagctgcagcacctgctaaggcagtgtggaatcccctttggggcagaagactccaaggaccagctctgcttctccttgttggccctctacgaatctgtacagaatggagctagagctatacggcccccacgtcacttcacaggtggtaaaatctacaaggtgtgcccccatcaggtggtctgcggctccaagtatcttgtgcgaggtgagagtgcccgtgaccatgtggacctgcttgcctcttcccgccactggccgcctgtctatgtggtagatatggccacgtcagtggccctgtgtgctgacctctgctacccagagctgactaaccagatgtgggggaggaaccagggctgtttctctagccccacagagccacctgtgagtgtgtcctgcccagagctcttggaccagcattatactgtggacatgacagaaactgagcactctatccagcacccagtcaccaagactgccacgcggcgcatcgtccatgcaggcctacagcccaatcctggtgaccccagtgctgggcaccactccttggccctgtgccctgaattggcaccttacgcaaccatcctggcctccatcgtggacagcaaaccaaacggtgtccgccagcggcccattgccttcgacaatgccactcactattacctctacaaccgcctcatggacttcctcaccagccgcgaaattgtcaatcgtcagatccatgacattgtacagagctgccagcctggtgaggtggtcattcgtgacaccctctaccgccttggggttgctcagatcaagacagagacagaggaggagggtgaggaagaggaggtggccgcagtggcagaataagccaggctgttgtacagggactacaccatctctcaagccatagtaaggcccttgcctgaggcagagctatccaggggacctgcagaagtggtctcctgtggggagggcctctgactgctgggactgaccaaagagcttccattccctgagcatggtgggacccagggtcctcagttctcaaccctccaggggtcaggagtggtaccaggaaacctcttctggccccgagagagcacttgggggacacggtatgtttaatggaggggaggctgagggaaaggctgatagctggtgggttccgtggggcctgctgtgtgggtcagggtggaggtcctgggtgggctaaggcgtgagccccagcactaggtgggaaggctgctgaggtctctcccacccctgaggagccctggtttcagccccctcagtctgatgaattgcttagcctgttgcctttgactaggggcctgggtggcctcattaactctaggggtccctttgggctcttgattctccctgaaggagggatgcatttctctcttgctcttcctgtacccacatttgggggaagctgaggagggaggaacagtcagccacagctctcttccagcactgtcctctccaccccaagctttgaggaagagcatccccttcctcctttccctggccactgctgctgcagccaatatcctctctgggcctgggaccctctccacagaggggatgtggtccctggtcatgacataacctagcagcagtaggaaaaactcccttctatgaaggggaagcagactgggccataaggaaacagcaggactggctcaagtgcccaaggtttgtttagggcctgggaattggccatgtgttaatttattgagtggagtaggtggctttttttccctccctcttcccccaacaagaataaagtttattaaattatctggt

SEQ ID NO: 290997 - DNA, 5159 bp, Homo sapiens
  misc_feature (32)..(32): n is a, c, g, or t
ctaagctagggctgggctgttgcgcttgcgcncagggttcgcaatgcacgtcaacgcgcatgccgaccgcttccggtgcgccgcgagggccgccgggacggtctccctggcgatccgtggtgtgccgctactgccggtgcagccgccaaaccggtgcctcggtgacgaccgtgtccctgccgtcttcctcgagctccccggggcttgacccccggggccctcggcaggcatcggtgaggagcctgcggagcgaacctgtgctcctattcttgcccttcaggaccccatatcgcgactccgaggaggggaagcgagaggggctgtcgcgactccgcgccgtgtgtcgccgggcggggccgcggggccggggctccttcagcccccgggatgcgcgcgcgagccctcgcctccacttccttgttgctgctgtcacgactggagccgcctctcgccgacagcggggagcgcgagtgcgccagccatccccctcgtccagccgccgggccaagcgcctccgggaatgtgagcggcgcagcttgcacgctcctccggccatggacgcatcatatgatggtactgaggtaactgtcgtgatggaggaaattgaggaagcctattgttacacctctcctgggccacccaagaagaagaaaaagtataaaatacatggagaaaagacaaagaaacccaggtctgcttaccttctgtactattacgacatctacctgaaagtgcagcaggagctcccccacctccctcagtctgagatcaataagaagattagtgagagttggaggcttctcagcgtggccgagaggagttactacttggagaaagccaaactagagaaggaaggtttggatcctaactctaagctctctgcactgactgctgtggttccggacatcccaggtttccgcaagatcctcccacgctcagattatatcatcatccccaagagcagcctgcaggaggaccggagctgccctcagctagagctatgtgtggctcagaaccagatgtccccgaaaggacctcctcttgtgtccaacactgccccggagacagtgcccagccatgcaggcatggcagagcagtgcctggctgtggaggccctggctgaggaggtgggagcccttacccagtcaggtgctgtacaggagattgccacctcagagatcctcagccaggatgtgctcctagaggacgcttccctagaagtaggggagagccaccaaccttaccagacaagcctggtaattgaagagaccttggtgaatggctcaccagacctccccactggaagcctggctgtgccccacccccaggttggggagagtgtatcagtggtaacagtcatgagggattccagtgagagtagctcctctgcaccagccacacagttcatcatgttgcctctgcctgcctactcggttgtggagaaccccacctccatcaaactgaccactacatatacccgccggggccatgggacatgcaccagcccagggtgctcctttacatatgtcaccaggcacaagccacctaagtgccctacctgtggtaacttcctaggagggaagtggatcccaaaggaaaagccagccaaagtaaaagtggaattggcttctggcgtctcttccaaaggctctgtggtgaaaagaaatcagcaacctgtcaccactgagcaaaattcctctaaggaaaatgcctccaaactgactctggagaattcggaagctgtaagccagctcctgaacgtagctcctcccagagaagtaggtgaggagagtgagtgggaggaagtgatcatctccgatgcccatgttttggttaaggaagctcccgggaattgtggtacagcagtcactaagacgccagtcgtcaaaagtggtgtgcagcctgaggtcactctggggacaactgacaatgacagtcctggagcagacgtaccaacaccatccgaggggacaagtacctccagtccactccctgctcctaaaaaacctacaggagttgacctgcttacccctgggtccagagctccagagcttaaaggcagagcacggggcaagccctcattactggctgcagcaagacccatgagagcaattttgccagccccagttaacgtggggcgaggcagcagcatgggactgcccagggccaggcaggccttttccctgagtgataagactccctctgtgaggacttgtggtctgaagccaagcacactgaagcagctgggccagcccattcaacagccatctggccctggtgaggtgaagctaccaagtggcccatccaacaggacttctcaggtgaaagttgtggaggtcaagcccgatatgtttcctccatataagtacagctgcactgtcacattggatttgggcctggctacatcaagaggccggggaaagtgcaagaatccctcttgtagctatgtctacaccaacaggcacaaacctcgaatttgtcccagctgtggtgttaaccttgccaaagaccggactgagaaaaccaccaaggctatcgaggtgagctcaccactcccagatgtactgaatgccacagagcccctgagcacagcccagagggagatccagcgccagtccacactgcagctgctgcgcaaagtcctgcagattcctgagaatgagtcagagctggctgaggtcttcgccttgattcatgaactcaacagctctcgacttatcttgtccaacgtgagtgaggagacagtcaccatcgagcaaacctcttggtcgaattattatgagtctccgtccacgcagtgccttctctgtagcagcccattattcaaagggggacaaaactccctggctgggccccaggagtgctggctgctgacagccagccgtctgcagacagtgactgcccaggtgaagatgtgtctgaacccccattgtctggccctgcacagcttcatagacatctacacaggtctctttaatgtggggaacaagctgctggtaagcctggacttgctttttgcaatcagaaatcagatcaagctcggagaggaccccagagtgtccatcaatgttgttctgaagtcggtgcaggagcagacagagaagactctgacctcggaggagctgagccagctgcaggagctgctgtgcaatggctattgggcctttgagtgcctcactgtccgagactacaatgacatgatctgtggcatctgtggtgtggcccccaaagtggaaatggctcagaggagtgaagagaatgtgctagcactgaagagcgtggagttcacctggcctgaattcctgggctctaatgaggtaaatgtggaggacttttgggccacgatggagacagaggtgattgagcaggtggcatttcctgccagcatccctatcaccaaatttgatgcgtctgttattgcccccttcttcccaccactcatgagaggagctgtggtcgtcaacactgagaaagacaaaaacctggatgtgcagccagtacctggcagtggcagtgccttggtgaggctgctccaggagggcacctgcaagcttgatgagattggctcctacagtgaagagaagctgcagcacctgctaaggcagtgtggaatcccctttggggcagaagactccaaggaccagctctgcttctccttgttggccctctacgaatctgtacagaatggagctagagctatacggcccccacgtcacttcacaggtggtaaaatctacaaggtgtgcccccatcaggtggtctgcggctccaagtatcttgtgcgaggtgagagtgcccgtgaccatgtggacctgcttgcctcttcccgccactggccgcctgtctatgtggtagatatggccacgtcagtggccctgtgtgctgacctctgctacccagagctgactaaccagatgtgggggaggaaccagggctgtttctctagccccacagagccacctgtgagtgtgtcctgcccagagctcttggaccagcattatactgtggacatgacagaaactgagcactctatccagcacccagtcaccaagactgccacgcggcgcatcgtccatgcaggcctacagcccaatcctggtgaccccagtgctgggcaccactccttggccctgtgccctgaattggcaccttacgcaaccatcctggcctccatcgtggacagcaaaccaaacggtgtccgccagcggcccattgccttcgacaatgccactcactattacctctacaaccgcctcatggacttcctcaccagccgcgaaattgtcaatcgtcagatccatgacattgtacagagctgccagcctggtgaggtggtcattcgtgacaccctctaccgccttggggttgctcagatcaagacagagacagaggaggagggtgaggaagaggaggtggccgcagtggcagaataagccaggctgttgtacagggactacaccatctctcaagccatagtaaggcccttgcctgaggcagagctatccaggggacctgcagaagtggtctcctgtggggagggcctctgactgctgggactgaccaaagagcttccattccctgagcatggtgggacccagggtcctcagttctcaaccctccaggggtcaggagtggtaccaggaaacctcttctggccccgagagagcacttgggggacacggtatgtttaatggaggggaggctgagggaaaggctgatagctggtgggttccgtggggcctgctgtgtgggtcagggtggaggtcctgggtgggctaaggcgtgagccccagcactaggtgggaaggctgctgaggtctctcccacccctgaggagccctggtttcagccccctcagtctgatgaattgcttagcctgttgcctttgactaggggcctgggtggcctcattaactctaggggtccctttgggctcttgattctccctggtcatgacataacctagcagcagtaggaaaaactcccttctatgaaggggaagcagactgggccataaggaaacagcaggactggctcaagtgcccaaggtttgtttagggcctgggaattggccatgtgttaatttattgagtggagtaggtggctttttttccctccctcttcccccaacaagaataaagtttattaaattatctggt

SEQ ID NO: 290998 - DNA, 1923 bp, Homo sapiens
  misc_feature (12)..(12): n is a, c, g, or t
cagtacggatgncatggctctgggagccagcaagagtggacagctgtacctggcagtggcagtgccttggtgaggctgctccaggagggcacctgcaagcttgatgagattggctcctacagtgaagagaagctgcagcacctgctaaggcagtgtggaatcccctttggggcagaagactccaaggaccagctctgcttctccttgttggccctctacgaatctgtacagaatggagctagagctatacggcccccacgtcacttcacaggtggtaaaatctacaaggtgtgcccccatcaggtggtctgcggctccaagtatcttgtgcgaggtgagagtgcccgtgaccatgtggacctgcttgcctcttcccgccactggccgcctgtctatgtggtagatatggccacgtcagtggccctgtgtgctgacctctgctacccagagctgactaaccagatgtgggggaggaaccagggctgtttctctagccccacagagccacctgtgagtgtgtcctgcccagagctcttggaccagcattatactgtggacatgacagaaactgagcactctatccagcacccagtcaccaagactgccacgcggcgcatcgtccatgcaggcctacagcccaatcctggtgaccccagtgctgggcaccactccttggccctgtgccctgaattggcaccttacgcaaccatcctggcctccatcgtggacagcaaaccaaacggtgtccgccagcggcccattgccttcgacaatgccactcactattacctctacaaccgcctcatggacttcctcaccagccgcgaaattgtcaatcgtcagatccatgacattgtacagagctgccagcctggtgaggtggtcattcgtgacaccctctaccgccttggggttgctcagatcaagacagagacagaggaggagggtgaggaagaggaggtggccgcagtggcagaataagccaggctgttgtacagggactacaccatctctcaagccatagtaaggcccttgcctgaggcagagctatccaggggacctgcagaagtggtctcctgtggggagggcctctgactgctgggactgaccaaagagcttccattccctgagcatggtgggacccagggtcctcagttctcaaccctccaggggtcaggagtggtaccaggaaacctcttctggccccgagagagcacttgggggacacggtatgtttaatggaggggaggctgagggaaaggctgatagctggtgggttccgtggggcctgctgtgtgggtcagggtggaggtcctgggtgggctaaggcgtgagccccagcactaggtgggaaggctgctgaggtctctcccacccctgaggagccctggtttcagccccctcagtctgatgaattgcttagcctgttgcctttgactaggggcctgggtggcctcattaactctaggggtccctttgggctcttgattctccctgaaggagggatgcatttctctcttgctcttcctgtacccacatttgggggaagctgaggagggaggaacagtcagccacagctctcttccagcactgtcctctccaccccaagctttgaggaagagcatccccttcctcctttccctggccactgctgctgcagccaatatcctctctgggcctgggaccctctccacagaggggatgtggtccctggtcatgacataacctagcagcagtaggaaaaactcccttctatgaaggggaagcagactgggccataaggaaacagcaggactggctcaagtgcccaaggtttgtttagggcctgggaattggccatgtgttaatttattgagtggagtaggtggctttttttccctccctcttcccccaacaagaataaagtttattaaattatctggt

SEQ ID NO: 290999 - DNA, 443 bp, Homo sapiens
ctttttgcaatcagaaatcagatcaagctcggagaggaccccagagtgtccatcaatgttgttctgaagtcggtgcaggagcagacaggtaaaagttgttttcttccctttcccaaggttagtcctaagctccctcggaattttcagtgatggcatttggttaaaagactcattttgaagaagagtctgattattttgaaaaggagacattcttgacttcctaatacactcttccttttgaattttacaaatgccaaactaattttggaaagcatgaatctttttgtgcatccagggacccttagcaagagattacgagtgacttgtagaagtaccttctttggtcatagggagacttggccccattgcatgttagactcattctgaccacacagctcctggatatctgcttccagtcccaaggctcatgccaagacctaaga

SEQ ID NO: 291000 - DNA, 530 bp, Homo sapiens
caccacgttggccaggctggtcttgaactcctgacctcaggtgatccgcccgcctcggcctcccaaagtgctgggattacaggcgtgagccgccgtgcccggccgccactagcctgtttaaagcaggtaaatagggtgctgagaacacttgaaagggttagaattggattctctcactaactgcttatgtgatcttagaagtcctaaatgtcttagaacctcagttttctcatctataaaataaacatagcacacttcctgtggaaatagttttctctttgttcttaaactttttgagataatcataaattcattccttttgataagcacattgggatgagtacactgtctgttattaaacttaatccaggcttccagtgttgagtggcctgggtgttctttattactctgtttcagtgaaactgtccttctcttcattgcccataggattccagtgagagtagctcctctgcaccagccacacagttcatcatgttgcctctgcctgcctactcggttgtggagaaccc

SEQ ID NO: 291001 - DNA, 253 bp, Homo sapiens
atgagttgaacttacattccttacgggtggatggttatagaaaagggagctgggcttcccaagaaccacagcagcatgactcacagtcattgctgcctctcctgggaattattcgacccatctaggtaaaagcaaggtaacttatttttgccgcgttgtttacgcatcggtttctagtgttgactttgcaaagcacagagttctcagtgtgttatccttatgtgttattccagatcccaactgctccgccaag

SEQ ID NO: 291002 - DNA, 495 bp, Homo sapiens
tacagatgagtaaaaacaagaaattggtgcaaggtttgaaaggcagaaaggaggcagcagctgtgactggagagcgctacagtgtaaggtggtgagagacagctgcagaggcgctggtcggttggctttcatcttccgtctttcctgctgcatgcctggtgcttcttcctgccagctttactgaccaacagcaactccaaccccattaccgatgctcggctgcaagctcagaggtaatctcaccagggaagcaaagacccttccagacttcttcactagccccttccagggtttccactcctgcagctggacattcctaacttccaaatttccccaaagttcgaacttgtccacctgtgccagggcttgaagaggacgtgccttttttccccctaatttgagtggtaaagtctgaagactgaaaaacaactttcctttttaaaatgctaacttgttttcctagaatttgaacaatattcattcatacattacaaa

SEQ ID NO: 291003 - DNA, 457 bp, Homo sapiens
tacagatgagtaaaaacaagaaattggtgcaaggtttgaaaggcagaaaggaggcagcagctgtgactggagagcgctacagtgtaaggtggtgagagacagctgcagaggcgctggtcggttggctttcatcttccgtctttcctgctgcatgcctggtgcttcttcctgccagctttactgaccaacagcaactccaaccccattaccgatgctcggctgcaagctcagagaatgaatgggttcacacagcaaccctgtcaaagaggtactatgatccagatttcacaaagcagaatataattattaagtaacttctcggagatcacagtggaggaactaagattcaaattgtcttctgaccagagctgggctctgaaaccactccaagaattgatcatcagccttaaacaatcagttttctttccttgtaataaactgagttactcatctaaga

SEQ ID NO: 291004 - DNA, 1885 bp, Homo sapiens
cattgagtataccatccagcaaaggcaccacctattatccgctacttggggctccatccacccaggaggtccccaagccagggagtttccacaacgttgaacggcgcctctctttttaatcgctcccttggccccttgacaaaaaccggtacggtaacttggccctcacggaactttaaaccgccccctttttttttttgttatttgaaaatactggatttaatagaaaatatcacattgtaaacaaatccattgatccatgagcttaaaacagaatgacggcacaatcacatagaaaagctaaagacaaaatactggtaccaaacatagcccttaggcctgggctaggctctcaaaggtctttcccagaaatggaggcagcagtagcttcaaacaggcacaaaaacagccaggaggaggcagcatccactccatgaaggcctaagacaatgaaaggaagccagagcaacagaccaccttgggatccggggagaagggtaaatgggcaaaagggttgtatttcctgatgctctcagaacatcagaccacaccatgtgaatttaagcaggactattttaagtggggaaacaatactagaagcatttggtgtattttcctggcactcacctcctaggtaagcaggagagcgggacactcaggagttgtgactaaactcacacttaagctgcctgtccagaccgtccccttggctgaacacaacactgaaattgtggcagtgtctgttgccccagtggacctcccacttactaatgagtatgtaaaacagaggagccacagtgaggcctttcacaaaaacacagggctctgggggaaaaacggcttccaccttctgccttttggtgctggagagtccctgagggagagaagtttgacgtggctgggccccttgaggctctggatttatcaatagaagcctcctctttggccccacccacccaaatccacccccaggttctcctagttcagagaaaagctgtgaaagtggaagaaggaagggatcgttttctttccattgcacttgttactgaccaaagagactgcttccttgcacttattttagatattgagagtttgtgccttcacttggaacaatggttctcaaccaaggggcaggcctgtgcaagaaggactctcaagaggtggtatccaatatacataagcccctaattccctcccacttgaaaatcagtgcgtgtaaggagagaaattcctgacgggagtgtgtcatatgtgtgaaccatggctgaagcagaacaaaaagtttaaaactcccaacctgggtttggcagacatcaaaatgatggagtacattttgcagatattttttttctgattaagttacaaacattctccctatagctaaactccgtgactaggctcccagcctcatggccaagaacaataagttcacccacttatctggagtaaccatactagattaaagaaatacaattctttcttctaaagacaatttccagaaagacctgcctttccctatgggtacttgacactaggtcccagcacaggctaatcgctgtatggtttcttcgaagattggcttttctcagtttctttctctttgatactgtacaaggggtccaccaacttgttatgaacaagcattaaacctacaaaaaattaaaaacaaaaagtagttaattcaggcagtggcaagagttccttgattatcaatcataacatccaggagctctcaaattttgtcttagagctgacacttctctcttttctctatgatccccaaatgataaacaccctaagagtacaaaaagagttattcacagtgagtactacattcatggaacttttataaattcaatcactatgggagttggctatttaaagg

SEQ ID NO: 291005 - DNA, 1221 bp, Homo sapiens
cattgagtataccatccagcaaaggcaccacctattatccgctacttggggctccatccacccaggaggtccccaagccagggagtttccacaacgttgaacggcgcctctctttttaatcgctcccttggccccttgacaaaaaccggtacggtaacttggccctcacggaactttaaaccgccccctttttttttttgttatttgaaaatactggatttaatagaaaatatcacattgtaaacaaatccattgatccatgagcttaaaacagaatgacggcacaatcacatagaaaagctaaagacaaaatactggtaccaaacatagcccttaggcctgggctaggctctcaaaggtctttcccagaaatggaggcagcagtagcttcaaacaggcacaaaaacagccaggaggaggcagcatccactccatgaaggcctaagacaatgaaaggaagccagagcaacagaccaccttgggatccggggagaagggtaaatgggcaaaagggttgtatttcctgatgctctcagaacatcagaccacaccatgtgaatttaagcaggactattttaagtggggaaacaatactagaagcatttggtgtattttcctggcactcacctcctaggtaagcaggagagcgggacactcaggagttgtgactaaactcacacttaagctgcctgtccagaccgtccccttggctgaacacaacactgaaattgtggcagtgtctgttgccccagtggacctcccacttactaatgagtatgtaaaacagaggagccacagtgaggcctttcacaaaaacacagggctctgggggaaaaacggcttccaccttctgccttttggtgctggagagtccctgagggagagaagtttgacgtggctgggccccttgaggctctggatttatcaatagaagcctcctctttggccccacccacccaaatccacccccaggttctcctagttcagagaaaagctgtgaaagtggaagaaggaagggatcgttttctttccattgcacttgttactgaccaaagagactgcttccttgcacttattttagatattgagagtttgtgccttcacttggaacaatggttctcaaccaaggggcaggcctgtgcaagaaggactctcaagaggtggtatccaatatacataagcccccctcggccgattcaccccggcctcgtactagtcgcg

SEQ ID NO: 291006 - DNA, 1906 bp, Homo sapiens
  misc_feature (522)..(522): n is a, c, g, or t
cattgagtataccatccagcaaaggcaccacctattatccgctacttggggctccatccacccaggaggtccccaagccagggagtttccacaacgttgaacggcgcctctctttttaatcgctcccttggccccttgacaaaaaccggtacggtaacttggccctcacggaactttaaaccgccccctttttttttttgttatttgaaaatactggatttaatagaaaatatcacattgtaaacaaatccattgatccatgagcttaaaacagaatgacggcacaatcacatagaaaagctaaagacaaaatactggtaccaaacatagcccttaggcctgggctaggctctcaaaggtctttcccagaaatggaggcagcagtagcttcaaacaggcacaaaaacagccaggaggaggcagcatccactccatgaaggcctaagacaatgaaaggaagccagagcaacagaccaccaaatgcttctagtattgtttccccacttaaaatagtcctgcttnaattcacatagggttgtatttcctgatgctctcagaacatcagaccacaccatgtgaatttaagcaggactattttaagtggggaaacaatactagaagcatttggtgtattttcctggcactcacctcctaggtaagcaggagagcgggacactcaggagttgtgactaaactcacacttaagctgcctgtccagaccgtccccttggctgaacacaacactgaaattgtggcagtgtctgttgccccagtggacctcccacttactaatgagtatgtaaaacagaggagccacagtgaggcctttcacaaaaacacagggctctgggggaaaaacggcttccaccttctgccttttggtgctggagagtccctgagggagagaagtttgacgtggctgggccccttgaggctctggatttatcaatagaagcctcctctttggccccacccacccaaatccacccccaggttctcctagttcagagaaaagctgtgaaagtggaagaaggaagggatcgttttctttccattgcacttgttactgaccaaagagactgcttccttgcacttattttagatattgagagtttgtgccttcacttggaacaatggttctcaaccaaggggcaggcctgtgcaagaaggactctcaagaggtggtatccaatatacataagcccctaattccctcccacttgaaaatcagtgcgtgtaaggagagaaattcctgacgggagtgtgtcatatgtgtgaaccatggctgaagcagaacaaaaagtttaaaactcccaacctgggtttggcagacatcaaaatgatggagtacattttgcagatattttttttctgattaagttacaaacattctccctatagctaaactccgtgactaggctcccagcctcatggccaagaacaataagttcacccacttatctggagtaaccatactagattaaagaaatacaattctttcttctaaagacaatttccagaaagacctgcctttccctatgggtacttgacactaggtcccagcacaggctaatcgctgtatggtttcttcgaagattggcttttctcagtttctttctctttgatactgtacaaggggtccaccaacttgttatgaacaagcattaaacctacaaaaaattaaaaacaaaaagtagttaattcaggcagtggcaagagttccttgattatcaatcataacatccaggagctctcaaattttgtcttagagctgacacttctctcttttctctatgatccccaaatgataaacaccctaagagtacaaaaagagttattcacagtgagtactacattcatggaacttttataaattcaatcactatgggagttggctatttaaagg

SEQ ID NO: 291007 - DNA, 1815 bp, Homo sapiens
cattgagtataccatccagcaaaggcaccacctattatccgctacttggggctccatccacccaggaggtccccaagccagggagtttccacaacgttgaacggcgcctctctttttaatcgctcccttggccccttgacaaaaaccggtacggtaacttggccctcacggaactttaaaccgccccctttttttttttgttatttgaaaatactggatttaatagaaaatatcacattgtaaacaaatccattgatccatgagcttaaaacagaatgacggcacaatcacatagaaaagctaaagacaaaatactggtaccaaacatagcccttaggcctgggctaggctctcaaaggtctttcccagaaatggaggcagcagtagcttcaaacaggcacaaaaacagccaggaggaggcagcatccactccatgaaggcctaagacaatgaaaggaagccagagcaacagaccaccttgggatccggggagaagggtaaatgggcaaatggggaaacaatactagaagcatttggtgtattttcctggcactcacctcctaggtaagcaggagagcgggacactcaggagttgtgactaaactcacacttaagctgcctgtccagaccgtccccttggctgaacacaacactgaaattgtggcagtgtctgttgccccagtggacctcccacttactaatgagtatgtaaaacagaggagccacagtgaggcctttcacaaaaacacagggctctgggggaaaaacggcttccaccttctgccttttggtgctggagagtccctgagggagagaagtttgacgtggctgggccccttgaggctctggatttatcaatagaagcctcctctttggccccacccacccaaatccacccccaggttctcctagttcagagaaaagctgtgaaagtggaagaaggaagggatcgttttctttccattgcacttgttactgaccaaagagactgcttccttgcacttattttagatattgagagtttgtgccttcacttggaacaatggttctcaaccaaggggcaggcctgtgcaagaaggactctcaagaggtggtatccaatatacataagcccctaattccctcccacttgaaaatcagtgcgtgtaaggagagaaattcctgacgggagtgtgtcatatgtgtgaaccatggctgaagcagaacaaaaagtttaaaactcccaacctgggtttggcagacatcaaaatgatggagtacattttgcagatattttttttctgattaagttacaaacattctccctatagctaaactccgtgactaggctcccagcctcatggccaagaacaataagttcacccacttatctggagtaaccatactagattaaagaaatacaattctttcttctaaagacaatttccagaaagacctgcctttccctatgggtacttgacactaggtcccagcacaggctaatcgctgtatggtttcttcgaagattggcttttctcagtttctttctctttgatactgtacaaggggtccaccaacttgttatgaacaagcattaaacctacaaaaaattaaaaacaaaaagtagttaattcaggcagtggcaagagttccttgattatcaatcataacatccaggagctctcaaattttgtcttagagctgacacttctctcttttctctatgatccccaaatgataaacaccctaagagtacaaaaagagttattcacagtgagtactacattcatggaacttttataaattcaatcactatgggagttggctatttaaagg

SEQ ID NO: 291008 - DNA, 1466 bp, Homo sapiens
agtcgactctacagtatcccccgcaaactggattcactgtctggctaacgaatttattgttaatcacacatactttactgcaaaactgcaaaatctttacccataagctgcccaggcagctagctatcttttatttcgctgctatcaccaaaatcaattattctgtactcccagtgcaatcccacgtgtgggatttcctggcactcacctcctaggtaagcaggagagcgggacactcaggagttgtgactaaactcacacttaagctgcctgtccagaccgtccccttggctgaacacaacactgaaattgtggcagtgtctgttgccccagtggacctcccacttactaatgagtatgtaaaacagaggagccacagtgaggcctttcacaaaaacacagggctctgggggaaaaacggcttccaccttctgccttttggtgctggagagtccctgagggagagaagtttgacgtggctgggccccttgaggctctggatttatcaatagaagcctcctctttggccccacccacccaaatccacccccaggttctcctagttcagagaaaagctgtgaaagtggaagaaggaagggatcgttttctttccattgcacttgttactgaccaaagagactgcttccttgcacttattttagatattgagagtttgtgccttcacttggaacaatggttctcaaccaaggggcaggcctgtgcaagaaggactctcaagaggtggtatccaatatacataagcccctaattccctcccacttgaaaatcagtgcgtgtaaggagagaaattcctgacgggagtgtgtcatatgtgtgaaccatggctgaagcagaacaaaaagtttaaaactcccaacctgggtttggcagacatcaaaatgatggagtacattttgcagatattttttttctgattaagttacaaacattctccctatagctaaactccgtgactaggctcccagcctcatggccaagaacaataagttcacccacttatctggagtaaccatactagattaaagaaatacaattctttcttctaaagacaatttccagaaagacctgcctttccctatgggtacttgacactaggtcccagcacaggctaatcgctgtatggtttcttcgaagattggcttttctcagtttctttctctttgatactgtacaaggggtccaccaacttgttatgaacaagcattaaacctacaaaaaattaaaaacaaaaagtagttaattcaggcagtggcaagagttccttgattatcaatcataacatccaggagctctcaaattttgtcttagagctgacacttctctcttttctctatgatccccaaatgataaacaccctaagagtacaaaaagagttattcacagtgagtactacattcatggaacttttataaattcaatcactatgggagttggctatttaaagg

SEQ ID NO: 291009 - DNA, 594 bp, Homo sapiens
cattgagtataccatccagcaaaggcaccacctattatccgctacttggggctccatccacccaggaggtccccaagccagggagtttccacaacgttgaacggcgcctctctttttaatcgctcccttggccccttgacaaaaaccggtacggtaacttggccctcacggaactttaaaccgccccctttttttttttgttatttgaaaatactggatttaatagaaaatatcacattgtaaacaaatccattgatccatgagcttaaaacagaatgacggcacaatcacatagaaaagctaaagacaaaatactggtaccaaacatagcccttaggcctgggctaggctctcaaaggtctttcccagaaatggaggcagcagtagcttcaaacaggcacaaaaacagccaggaggaggcagcatccactccatgaaggcctaagacaatgaaaggaagccagagcaacagaccaccttgggatccggggagaagggtaaatgggcaaagtaaatgcttctagtattgtttccccacttaaaatagtcctgcttaaattcacatggtgtggtctgatgttctgagagcatcag

SEQ ID NO: 291010 - DNA, 1213 bp, Homo sapiens
cattgagtataccatccagcaaaggcaccacctattatccgctacttggggctccatccacccaggaggtccccaagccagggagtttccacaacgttgaacggcgcctctctttttaatcgctcccttggccccttgacaaaaaccggtacggtaacttggccctcacggaactttaaaccgccccctttttttttttgttatttgaaaatactggatttaatagaaaatatcacattgtaaacaaatccattgatccatgagcttaaaacagaatgacggcacaatcacatagaaaagctaaagacaaaatactggtaccaaacatagcccttaggcctgggctaggctctcaaaggtctttcccagaaatggaggcagcagtagcttcaaacaggcacaaaaacagccaggaggaggcagcatccactccatgaagaatggttctcaaccaaggggcaggcctgtgcaagaaggactctcaagaggtggtatccaatatacataagcccctaattccctcccacttgaaaatcagtgcgtgtaaggagagaaattcctgacgggagtgtgtcatatgtgtgaaccatggctgaagcagaacaaaaagtttaaaactcccaacctgggtttggcagacatcaaaatgatggagtacattttgcagatattttttttctgattaagttacaaacattctccctatagctaaactccgtgactaggctcccagcctcatggccaagaacaataagttcacccacttatctggagtaaccatactagattaaagaaatacaattctttcttctaaagacaatttccagaaagacctgcctttccctatgggtacttgacactaggtcccagcacaggctaatcgctgtatggtttcttcgaagattggcttttctcagtttctttctctttgatactgtacaaggggtccaccaacttgttatgaacaagcattaaacctacaaaaaattaaaaacaaaaagtagttaattcaggcagtggcaagagttccttgattatcaatcataacatccaggagctctcaaattttgtcttagagctgacacttctctcttttctctatgatccccaaatgataaacaccctaagagtacaaaaagagttattcacagtgagtactacattcatggaacttttataaattcaatcactatgggagttggctatttaaagg

SEQ ID NO: 291011 - DNA, 1155 bp, Homo sapiens
cattgagtataccatccagcaaaggcaccacctattatccgctacttggggctccatccacccaggaggtccccaagccagggagtttccacaacgttgaacggcgcctctctttttaatcgctcccttggccccttgacaaaaaccggtacggtaacttggccctcacggaactttaaaccgccccctttttttttttgttatttgaaaatactggatttaatagaaaatatcacattgtaaacaaatccattgatccatgagcttaaaacagaatgacggcacaatcacatagaaaagctaaagacaaaatactggtaccaaacatagcccttaggcctgggctaggctctcaaaggtctttcccagaaatggaggcagcagtagcttcaaacaggcacaaaaacagccaggaggaggcagcatccactccatgaagaatggttctcaaccaaggggcaggcctgtgcaagaaggactctcaagaggtggtatccaatatacataagcccctaattccctcccacttgaaaatcagtgcgtgtaaggagagaaattcctgacgggagtgtgtcatatgtgtgaaccatggctgaagcagaacaaaaaatattttttttctgattaagttacaaacattctccctatagctaaactccgtgactaggctcccagcctcatggccaagaacaataagttcacccacttatctggagtaaccatactagattaaagaaatacaattctttcttctaaagacaatttccagaaagacctgcctttccctatgggtacttgacactaggtcccagcacaggctaatcgctgtatggtttcttcgaagattggcttttctcagtttctttctctttgatactgtacaaggggtccaccaacttgttatgaacaagcattaaacctacaaaaaattaaaaacaaaaagtagttaattcaggcagtggcaagagttccttgattatcaatcataacatccaggagctctcaaattttgtcttagagctgacacttctctcttttctctatgatccccaaatgataaacaccctaagagtacaaaaagagttattcacagtgagtactacattcatggaacttttataaattcaatcactatgggagttggctatttaaagg

SEQ ID NO: 291012 - DNA, 2318 bp, Homo sapiens
tggcagcgacgcggtgaggagacggcccacggcgcccgcgggctggggcggtcgcttcttccttctccgtggcctacgaggagggtctggatccttctctgccggctcgtgggccgtgcctttgcccttctgcgaggccctgaatctgatcccttcccttcatatccggatccgggctcctccctccaagcccggggttccggacacctcccccaagacaacccctctggcctcctctccttcagtacttggaatctgatctcttctccctaattctgcggatccggcccctaatattctttatcagaccctcagacaagaggctgacttctgcccccttgtcaaggagcgaggccactttcctctccaccccatgctagcgaggataacttatttctcttctggaattgcatcttatgcgcctttccccacccatccccacagcccctgcaatacccagtttggcctcttttgcttgtaataacgcagatcccagcgccacggcaccttagaacagacctttttctttctcgcgtggggcctgactccttcagtgaagcctctccacgccctctatctgcaggtccccagcctgggtaaagatggccccatggcccccgaagggcctagtcccagctgtgctctggggcctcagcctcttcctcaacctcccaggacctatctggctccagccctctccacctccccagtcttctcccccgcctcagccccatccgtgtcatacctgccggggactggttgacagctttaacaagggcctggagagaaccatccgggacaactttggaggtggaaacactgcctgggaggaagagaatttgtccaaatacaaagacagtgagacccgcctggtagaggtgctggagggtgtgtgcagcaagtcagacttcgagtgccaccgcctgctggagctgagtgaggagctggtggagagctggtggtttcacaagcagcaggaggccccggacctcttccagtggctgtgctcagattccctgaagctctgctgccccgcaggcaccttcgggccctcctgccttccctgtcctgggggaacagagaggccctgcggtggctacgggcagtgtgaaggagaagggacacgagggggcagcgggcactgtgactgccaagccggctacgggggtgaggcctgtggccagtgtggccttggctactttgaggcagaacgcaacgccagccatctggtatgttcggcttgttttggcccctgtgcccgatgctcaggacctgaggaatcaaactgtttgcaatgcaagaagggctgggccctgcatcacctcaagtgtgtagacattgatgagtgtggcacagagggagccaactgtggagctgaccaattctgcgtgaacactgagggctcctatgagtgccgagactgtgccaaggcctgcctaggctgcatgggggcagggccaggtcgctgtaagaagtgtagccctggctatcagcaggtgggctccaagtgtctcgatgtggatgagtgtgagacagaggtgtgtccgggagagaacaagcagtgtgaaaacaccgagggcggttatcgctgcatctgtgccgagggctacaagcagatggaaggcatctgtgtgaaggagcagatcccagagtcagcaggcttcttctcagagatgacagaagacgagttggtggtgctgcagcagatgttctttggcatcatcatctgtgcactggccacgctggctgctaagggcgacttggtgttcaccgccatcttcattggggctgtggcggccatgactggctactggttgtcagagcgcagtgaccgtgtgctggagggcttcatcaagggcagataatcgcggccaccacctgtaggacctcctcccacccacgctgcccccagagcttgggctgccctcctgctggacactcaggacagcttggtttatttttgagagtggggtaagcacccctacctgccttacagagcagcccaggtacccaggcccgggcagacaaggcccctggggtaaaaagtagccctgaaggtggataccatgagctcttcacctggcggggactggcaggcttcacaatgtgtgaatttcaaaagtttttccttaatggtggctgctagagctttggcccctgcttaggattaggtggtcctcacaggggtggggccatcacagctccctcctgccagctgcatgctgccagttcctgttctgtgttcaccacatccccacaccccattgccacttatttattcatctcaggaaataaagaaaggtcttggaaagttaaaa

SEQ ID NO: 291013 - DNA, 945 bp, Homo sapiens
gctgctccggtccggaaggtctaggctgtggcagcgacgcggtccccagcctgggtaaagatggccccatggcccccgaagggcctagtcccagctgtgctctggggcctcagcctcttcctcaacctcccaggacctatctggctccagccctctccacctccccagtcttctcccccgcctcagccccatccgtgtcatacctgccggggactggttgacagctttaacaagggcctggagagaaccatccgggacaactttggaggtggaaacactgcctgggaggaagagaatttgtccaaatacaaagacagtgagacccgcctggtagaggtgctggagggtgtgtgcagcaagtcagacttcgagtgccaccgcctgctggagctgagtgaggagctggtggagagctggtggtttcacaagcagcaggaggccccggacctcttccagtggctgtgctcagattccctgaagctctgctgccccgcaggcaccttcgggccctcctgccttccctgtcctgggggaacagagaggccctgcggtggctacgggcagtgtgaaggagaagggacacgagggggcagcgggcactgtgactgccaagccggctacgggggtgaggcctgtggccagtgtggccttggctactttgaggcagaacgcaacgccagccatctggtatgttcggttgttcggcctgtgcccgatgtcaggactgacgatcaactgttgcatgcagagggtggctgatcacctcagtgtgtgacgggccagctgctaggcgatgggggcaggccgtcgcggaaaatgagcctggatacaggggccatgtcacggatctggaacacgggcggcaccacctgcacccggggcccgctgccgggcaccagcctgggcccaacctccacacggggcacctagagccgcgaggccccc

SEQ ID NO: 291014 - DNA, 336 bp, Homo sapiens
taatcattccagtacccagattattcctgtaacttactgcacaatcatcccctggggtaaaaagtagccctgaaggtggataccatgagctcttcacctggcggggactggcaggcttcacaatgtgtgaatttcaaaagtttttccttaatggtggctgctagagctttggcccctgcttaggattaggtggtcctcacaggggtggggccatcacagctccctcctgccagctgcatgctgccagttcctgttctgtgttcaccacatccccacaccccattgccacttatttattcatctcaggaaataaagaaaggtcttggaaagttaaaa

SEQ ID NO: 291015 - DNA, 785 bp, Homo sapiens
  misc_feature (102)..(102): n is a, c, g, or t
ggctcctcttaggccccccgggtttccctttaagctcccgctcgtatgtgtgggaaattggaggcggatacaatttccccaggaacaggtatgccatgattncgcaggctcgaattacccctcactaaggggaccaagttggagctccccccggtgcgggcgcttctagacctagtgatcccccgggctcagggaatcggctcagctggaaaaggggctagactgagtcatatgcagtatagttatcatcatgtactaaagaaatgatagacttcccagccccttcatttcccatgccagatcggactatggtaccttcctggggaggggcgggtgctgacctggagcctccatgatcgccatccatcctcacacacagtcctggcacaagagctgaacttactaccagcctcttttagagcagtctttcctgaagctacagataaagagctagctacaaagatggcaaattcagtctttgtaaaagaaaatattggctgggcgcggtggctcacacctgtaatcccaacactttgggaggctgcggtgggtggatcatgaggtcaggagatcgagaccatcgtggctatcatggtgaaacaccgtctctactaaaaaatacaaaaaattagccgggcatggtggcgggcgcctctagtcccagctactctggaggctgaggcagaagaatggcatgaacccggcaggcggagcttgcagtgagccgagatcatgccactgcactccagcctgggcgacagagcgagactctgtctcaaaaaaaa

SEQ ID NO: 291016 - DNA, 2090 bp, Homo sapiens
tggcagcgacgcggtgaggagacggcccacggcgcccgcgggctggggcggtcgcttcttccttctccgtggcctacgaggcctcagacaagaggctgacttctgcccccttgtcaaggagcgaggccactttcctctccaccccatgctagcgaggataacttatttctcttctggaattgcatcttatgcgcctttccccacccatccccacagcccctgcaatacccagtttggcctcttttgcttgtaataacgcagatcccagcgccacggcaccttagaacagacctttttctttctcgcgtggggcctgactccttcagtgaagcctctccacgccctctatctgcaggtccccagcctgggtaaagatggccccatggcccccgaagggcctagtcccagctgtgctctggggcctcagcctcttcctcaacctcccaggacctatctggctccagccctctccacctccccagtcttctcccccgcctcagccccatccgtgtcatacctgccggggactggttgacagctttaacaagggcctggagagaaccatccgggacaactttggaggtggaaacactgcctgggaggaagagaatttgtccaaatacaaagacagtgagacccgcctggtagaggtgctggagggtgtgtgcagcaagtcagacttcgagtgccaccgcctgctggagctgagtgaggagctggtggagagctggtggtttcacaagcagcaggaggccccggacctcttccagtggctgtgctcagattccctgaagctctgctgccccgcaggcaccttcgggccctcctgccttccctgtcctgggggaacagagaggccctgcggtggctacgggcagtgtgaaggagaagggacacgagggggcagcgggcactgtgactgccaagccggctacgggggtgaggcctgtggccagtgtggccttggctactttgaggcagaacgcaacgccagccatctggtatgttcggcttgttttggcccctgtgcccgatgctcaggacctgaggaatcaaactgtttgcaatgcaagaagggctgggccctgcatcacctcaagtgtgtagacattgatgagtgtggcacagagggagccaactgtggagctgaccaattctgcgtgaacactgagggctcctatgagtgccgagactgtgccaaggcctgcctaggctgcatgggggcagggccaggtcgctgtaagaagtgtagccctggctatcagcaggtgggctccaagtgtctcgatgtggatgagtgtgagacagaggtgtgtccgggagagaacaagcagtgtgaaaacaccgagggcggttatcgctgcatctgtgccgagggctacaagcagatggaaggcatctgtgtgaaggagcagatcccagagtcagcaggcttcttctcagagatgacagaagacgagttggtggtgctgcagcagatgttctttggcatcatcatctgtgcactggccacgctggctgctaagggcgacttggtgttcaccgccatcttcattggggctgtggcggccatgactggctactggttgtcagagcgcagtgaccgtgtgctggagggcttcatcaagggcagataatcgcggccaccacctgtaggacctcctcccacccacgctgcccccagagcttgggctgccctcctgctggacactcaggacagcttggtttatttttgagagtggggtaagcacccctacctgccttacagagcagcccaggtacccaggcccgggcagacaaggcccctggggtaaaaagtagccctgaaggtggataccatgagctcttcacctggcggggactggcaggcttcacaatgtgtgaatttcaaaagtttttccttaatggtggctgctagagctttggcccctgcttaggattaggtggtcctcacaggggtggggccatcacagctccctcctgccagctgcatgctgccagttcctgttctgtgttcaccacatccccacaccccattgccacttatttattcatctcaggaaataaagaaaggtcttggaaagttaaaa

SEQ ID NO: 291017 - DNA, 2524 bp, Homo sapiens
tggcagcgacgcggtgaggagacggcccacggcgcccgcgggctggggcggtcgcttcttccttctccgtggcctacgaggagggtctggatccttctctgccggctcgtgggccgtgcctttgcccttctgcgaggccctgaatctgatcccttcccttcatatccggatccgggctcctccctccaagcccggggttccggacacctcccccaagacaacccctctggcctcctctccttcagtacttggaatctgatctcttctccctaattctgcggatccggcccctaatattctttatcagaccctcagacaagaggctgacttctgcccccttgtcaaggagcgaggccactttcctctccaccccatgctagcgaggataacttatttctcttctggaattgcatcttatgcgcctttccccacccatccccacagcccctgcaatacccagtttggcctcttttgcttgtaataacgcagatcccagcgccacggcaccttagaacagacctttttctttctcgcgtggggcctgactccttcagtgaagcctctccacgccctctatctgcaggtccccagcctgggtaaagatggccccatggcccccgaagggcctagtcccagctgtgctctggggcctcagcctcttcctcaacctcccaggacctatctggctccagccctctccacctccccagtcttctcccccgcctcagccccatccgtgtcatacctgccggggactggttgacagctttaacaagggcctggagagaaccatccgggacaactttggaggtggaaacactgcctgggaggaagagaatttgtccaaatacaaagacagtgagacccgcctggtagaggtgctggagggtgtgtgcagcaagtcagacttcgagtgccaccgcctgctggagctgagtgaggagctggtggagagctggtggtttcacaagcagcaggaggccccggacctcttccagtggctgtgctcagattccctgaagctctgctgccccgcaggcaccttcgggccctcctgccttccctgtcctgggggaacagagaggccctgcggtggctacgggcagtgtgaaggagaagggacacgagggggcagcgggcactgtgactgccaagccggctacgggggtgaggcctgtggccagtgtggccttggctactttgaggcagaacgcaacgccagccatctggtatgttcggcttgttttggcccctgtgcccgatgctcaggacctgaggaatcaaactgtttgcaatgcaagaagggctgggccctgcatcacctcaagtgtgtagacattgatgagtgtggcacagagggagccaactgtggagctgaccaattctgcgtgaacactgagggctcctatgagtgccgagactgtgccaaggcctgcctaggctgcatgggggcagggccaggtcgctgtaagaagtgtagccctggctatcagcaggtgggctccaagtgtctcggtgagtctcctgctgatgggacacaggcacctgggagtgcctcacccagcatgaatggtgaagaggctggaatatgggcaggtgggggaaggaagggtggaatgttgcctgggcaagggcagaggggagtgttgagatggacaagatggagtcagggtgctgggtggggggccctagcaggactctgacccctccctcccctcaagatgtggatgagtgtgagacagaggtgtgtccgggagagaacaagcagtgtgaaaacaccgagggcggttatcgctgcatctgtgccgagggctacaagcagatggaaggcatctgtgtgaaggagcagatcccagagtcagcaggcttcttctcagagatgacagaagacgagttggtggtgctgcagcagatgttctttggcatcatcatctgtgcactggccacgctggctgctaagggcgacttggtgttcaccgccatcttcattggggctgtggcggccatgactggctactggttgtcagagcgcagtgaccgtgtgctggagggcttcatcaagggcagataatcgcggccaccacctgtaggacctcctcccacccacgctgcccccagagcttgggctgccctcctgctggacactcaggacagcttggtttatttttgagagtggggtaagcacccctacctgccttacagagcagcccaggtacccaggcccgggcagacaaggcccctggggtaaaaagtagccctgaaggtggataccatgagctcttcacctggcggggactggcaggcttcacaatgtgtgaatttcaaaagtttttccttaatggtggctgctagagctttggcccctgcttaggattaggtggtcctcacaggggtggggccatcacagctccctcctgccagctgcatgctgccagttcctgttctgtgttcaccacatccccacaccccattgccacttatttattcatctcaggaaataaagaaaggtcttggaaagttaaaa

SEQ ID NO: 291018 - DNA, 2781 bp, Homo sapiens
tggcagcgacgcggtgaggagacggcccacggcgcccgcgggctggggcggtcgcttcttccttctccgtggcctacgaggagggtctggatccttctctgccggctcgtgggccgtgcctttgcccttctgcgaggccctgaatctgatcccttcccttcatatccggatccgggctcctccctccaagcccggggttccggacacctcccccaagacaacccctctggcctcctctccttcagtacttggaatctgatctcttctccctaattctgcggatccggcccctaatattctttatcagaccctcagacaagaggctgacttctgcccccttgtcaaggagcgaggccactttcctctccaccccatgctagcgaggataacttatttctcttctggaattgcatcttatgcgcctttccccacccatccccacagcccctgcaatacccagtttggcctcttttgcttgtaataacgcagatcccagcgccacggcaccttagaacagacctttttctttctcgcgtggggcctgactccttcagtgaagcctctccacgccctctatctgcaggtccccagcctgggtaaagatggccccatggcccccgaagggcctagtcccagctgtgctctggggcctcagcctcttcctcaacctcccaggacctatctggctccagccctctccacctccccagtcttctcccccgcctcagccccatccgtgtcatacctgccggggactggttgacagctttaacaagggcctggagagaaccatccgggacaactttggaggtggaaacactgcctgggaggaagagaatttgtccaaatacaaagacagtgagacccgcctggtagaggtgctggagggtgtgtgcagcaagtcagacttcgagtgccaccgcctgctggagctgagtgaggagctggtggagagctggtggtttcacaagcagcaggaggccccggacctcttccagtggctgtgctcagattccctgaagctctgctgccccgcaggcaccttcgggccctcctgccttccctgtcctgggggaacagagaggccctgcggtggctacgggcagtgtgaaggagaagggacacgagggggcagcgggcactgtgactgccaagccggctacgggggtgaggcctgtggccagtgtggccttggctactttgaggcagaacgcaacgccagccatctggtatgttcggcttgttttggcccctgtgcccgatgctcaggacctgaggaatcaaactgtttgcaatgcaagaagggctgggccctgcatcacctcaagtgtgtagacattgatgagtgtggcacagagggagccaactgtggagctgaccaattctgcgtgaacactgagggctcctatgagtgccgagactgtgccaaggcctgcctaggctgcatgggggcagggccaggtcgctgtaagaagtgtagccctggctatcagcaggtgggctccaagtgtctcgatgtggatgagtgtgagacagaggtgtgtccgggagagaacaagcagtgtgaaaacaccgagggcggttatcgctgcatctgtgccgagggctacaagcagatggaaggcatctgtgtgaaggagcagatcccaggtgcattccccatcttaactgatttaacccctgaaacaacccgacgctggaagttgggttctcatccccactctacatatgtaaaaatgaagatgcagagagatgaagctactttcccagggctatatggcaagcaagtcgcaaagctgggatcccaatccagacagtctgaccgtggaacgagactcatacacgtaataaatgctctgcccccaacttgtccaccacatggccttggcaagtccaacccctttacctctctgagcctcactttcccatttagtgagacagggatggtaactgccccttgcagggtggttttgagcagtaaatgtagtgtgcctggcttgctgggcaggcctggtggccatgatgatcaggtgtgtgggagttctggggagactccaagaactaccaggaacagggatacgagtgccaggctgcatctcttgctcctctgcagagtcagcaggcttcttctcagagatgacagaagacgagttggtggtgctgcagcagatgttctttggcatcatcatctgtgcactggccacgctggctgctaagggcgacttggtgttcaccgccatcttcattggggctgtggcggccatgactggctactggttgtcagagcgcagtgaccgtgtgctggagggcttcatcaagggcagataatcgcggccaccacctgtaggacctcctcccacccacgctgcccccagagcttgggctgccctcctgctggacactcaggacagcttggtttatttttgagagtggggtaagcacccctacctgccttacagagcagcccaggtacccaggcccgggcagacaaggcccctggggtaaaaagtagccctgaaggtggataccatgagctcttcacctggcggggactggcaggcttcacaatgtgtgaatttcaaaagtttttccttaatggtggctgctagagctttggcccctgcttaggattaggtggtcctcacaggggtggggccatcacagctccctcctgccagctgcatgctgccagttcctgttctgtgttcaccacatccccacaccccattgccacttatttattcatctcaggaaataaagaaaggtcttggaaagttaaaa

SEQ ID NO: 291019 - DNA, 1175 bp, Homo sapiens
agttcatggtttcctccagaggagacattggctttctgcgtgaacactgagggctcctatgagtgccgagactgtgccaaggcctgcctaggctgcatgggggcagggccaggtcgctgtaagaagtgtagccctggctatcagcaggtgggctccaagtgtctcggtgagtctcctgctgatgggacacaggcacctgggagtgcctcacccagcatgaatggtgaagaggctggaatatgggcaggtgggggaaggaagggtggaatgttgcctgggcaagggcagaggggagtgttgagatggacaagatggagtcagggtgctgggtggggggccctagcaggactctgacccctccctcccctcaagatgtggatgagtgtgagacagaggtgtgtccgggagagaacaagcagtgtgaaaacaccgagggcggttatcgctgcatctgtgccgagggctacaagcagatggaaggcatctgtgtgaaggagcagatcccagagtcagcaggcttcttctcagagatgacagaagacgagttggtggtgctgcagcagatgttctttggcatcatcatctgtgcactggccacgctggctgctaagggcgacttggtgttcaccgccatcttcattggggctgtggcggccatgactggctactggttgtcagagcgcagtgaccgtgtgctggagggcttcatcaagggcagataatcgcggccaccacctgtaggacctcctcccacccacgctgcccccagagcttgggctgccctcctgctggacactcaggacagcttggtttatttttgagagtggggtaagcacccctacctgccttacagagcagcccaggtacccaggcccgggcagacaaggcccctggggtaaaaagtagccctgaaggtggataccatgagctcttcacctggcggggactggcaggcttcacaatgtgtgaatttcaaaagtttttccttaatggtggctgctagagctttggcccctgcttaggattaggtggtcctcacaggggtggggccatcacagctccctcctgccagctgcatgctgccagttcctgttctgtgttcaccacatccccacaccccattgccacttatttattcatctcaggaaataaagaaaggtcttggaaagttaaaa

SEQ ID NO: 291020 - DNA, 1489 bp, Homo sapiens
cctcattcaaagagaaggcaggcaagccccttccccaggtagcagtggcagctccaggccctgccccatccctactgccacccagccccctggaggctgcactgagaccgggctctacatctgatctccaggttggctctcagcagccttataccttccagggtacaaagggaatcagacctggcatcaaatcagtctgcctccttaacctgtttcctcatctatccaatgggaccagtgtttgccctggcctgctgagagctgtcctaggccgggggtgtggtgagatgcagggtaatcacaacgatgatggcagggaccatttccccagcaattactgtgtcagatgctgttctaggtgcattccccatcttaactgatttaacccctgaaacaacccgacgctggaagttgggttctcatccccactctacatatgtaaaaatgaagatgcagagagatgaagctactttcccagggctatatggcaagcaagtcgcaaagctgggatcccaatccagacagtctgaccgtggaacgagactcatacacgtaataaatgctctgcccccaacttgtccaccacatggccttggcaagtccaacccctttacctctctgagcctcactttcccatttagtgagacagggatggtaactgccccttgcagggtggttttgagcagtaaatgtagtgtgcctggcttgctgggcaggcctggtggccatgatgatcaggtgtgtgggagttctggggagactccaagaactaccaggaacagggatacgagtgccaggctgcatctcttgctcctctgcagagtcagcaggcttcttctcagagatgacagaagacgagttggtggtgctgcagcagatgttctttggcatcatcatctgtgcactggccacgctggctgctaagggcgacttggtgttcaccgccatcttcattggggctgtggcggccatgactggctactggttgtcagagcgcagtgaccgtgtgctggagggcttcatcaagggcagataatcgcggccaccacctgtaggacctcctcccacccacgctgcccccagagcttgggctgccctcctgctggacactcaggacagcttggtttatttttgagagtggggtaagcacccctacctgccttacagagcagcccaggtacccaggcccgggcagacaaggcccctggggtaaaaagtagccctgaaggtggataccatgagctcttcacctggcggggactggcaggcttcacaatgtgtgaatttcaaaagtttttccttaatggtggctgctagagctttggcccctgcttaggattaggtggtcctcacaggggtggggccatcacagctccctcctgccagctgcatgctgccagttcctgttctgtgttcaccacatccccacaccccattgccacttatttattcatctcaggaaataaagaaaggtcttggaaagttaaaa

SEQ ID NO: 291021 - DNA, 1431 bp, Homo sapiens
  misc_feature (102)..(102): n is a, c, g, or t
ggctcctcttaggccccccgggtttccctttaagctcccgctcgtatgtgtgggaaattggaggcggatacaatttccccaggaacaggtatgccatgattncgcaggctcgaattacccctcactaaggggaccaagttggagctccccccggtgcgggcgcttctagacctagtgatcccccgggctcagggaatcggctcagctggaaagccgggggtgtggtgagatgcagggtaatcacaacgatgatggcagggaccatttccccagcaattactgtgtcagatgctgttctaggtgcattccccatcttaactgatttaacccctgaaacaacccgacgctggaagttgggttctcatccccactctacatatgtaaaaatgaagatgcagagagatgaagctactttcccagggctatatggcaagcaagtcgcaaagctgggatcccaatccagacagtctgaccgtggaacgagactcatacacgtaataaatgctctgcccccaacttgtccaccacatggccttggcaagtccaacccctttacctctctgagcctcactttcccatttagtgagacagggatggtaactgccccttgcagggtggttttgagcagtaaatgtagtgtgcctggcttgctgggcaggcctggtggccatgatgatcaggtgtgtgggagttctggggagactccaagaactaccaggaacagggatacgagtgccaggctgcatctcttgctcctctgcagagtcagcaggcttcttctcagagatgacagaagacgagttggtggtgctgcagcagatgttctttggcatcatcatctgtgcactggccacgctggctgctaagggcgacttggtgttcaccgccatcttcattggggctgtggcggccatgactggctactggttgtcagagcgcagtgaccgtgtgctggagggcttcatcaagggcagataatcgcggccaccacctgtaggacctcctcccacccacgctgcccccagagcttgggctgccctcctgctggacactcaggacagcttggtttatttttgagagtggggtaagcacccctacctgccttacagagcagcccaggtacccaggcccgggcagacaaggcccctggggtaaaaagtagccctgaaggtggataccatgagctcttcacctggcggggactggcaggcttcacaatgtgtgaatttcaaaagtttttccttaatggtggctgctagagctttggcccctgcttaggattaggtggtcctcacaggggtggggccatcacagctccctcctgccagctgcatgctgccagttcctgttctgtgttcaccacatccccacaccccattgccacttatttattcatctcaggaaataaagaaaggtcttggaaagttaaaa

SEQ ID NO: 291022 - DNA, 667 bp, Homo sapiens
tgtggtgttctagaggatcccaacgaccgaagacgagttggtggtgctgcagcagatgttctttggcatcatcatctgtgcactggccacgctggctgctaagggcgacttggtgttcaccgccatcttcattggggctgtggcggccatgactggctactggttgtcagagcgcagtgaccgtgtgctggagggcttcatcaagggcagataatcgcggccaccacctgtaggacctcctcccacccacgctgcccccagagcttgggctgccctcctgctggacactcaggacagcttggtttatttttgagagtggggtaagcacccctacctgccttacagagcagcccaggtacccaggcccgggcagacaaggcccctggggtaaaaagtagccctgaaggtggataccatgagctcttcacctggcggggactggcaggcttcacaatgtgtgaatttcaaaagtttttccttaatggtggctgctagagctttggcccctgcttaggattaggtggtcctcacaggggtggggccatcacagctccctcctgccagctgcatgctgccagttcctgttctgtgttcaccacatccccacaccccattgccacttatttattcatctcaggaaataaagaaaggtcttggaaagttaaaa

SEQ ID NO: 291023 - DNA, 2075 bp, Homo sapiens
tggcagcgacgcggtgaggagacggcccacggcgcccgcgggctggggcggtcgcttcttccttctccgtggcctacgaggagggtctggatccttctctgccggctcgtgggccgtgcctttgcccttctgcgaggccctgaatctgatcccttcccttcatatccggatccgggctcctccctccaagcccggggttccggacacctcccccaagacaacccctctggcctcctctccttcagtacttggaatctgatctcttctccctaattctgcggatccggcccctaatattctttatcagaccctcagacaagaggctgacttctgcccccttgtcaaggagcgaggccactttcctctccaccccatgctagcgaggataacttatttctcttctggaattgcatcttatgcgcctttccccacccatccccacagcccctgcaatacccagtttggcctcttttgcttgtaataacgcagatcccagcgccacggcaccttagaacagacctttttctttctcgcgtggggcctgactccttcagtgaagcctctccacgccctctatctgcaggtccccagcctgggtaaagatggccccatggcccccgaagggcctagtcccagctgtgctctggggcctcagcctcttcctcaacctcccaggacctatctggctccagccctctccacctccccagtcttctcccccgcctcagccccatccgtgtcatacctgccggggactggttgacagctttaacaagggcctggagagaaccatccgggacaactttggaggtggaaacactgcctgggaggaagagaatttgtccaaatacaaagacagtgagacccgcctggtagaggtgctggagggtgtgtgcagcaagtcagacttcgagtgccaccgcctgctggagctgagtgaggagctggtggagagctggtggtttcacaagcagcaggaggccccggacctcttccagtggctgtgctcagattccctgaagctctgctgccccgcaggcaccttcgggccctcctgccttccctgtcctgggggaacagagaggccctgcggtggctacgggcagtgtgaaggagaagggacacgagggggcagcgggcactgtgactgccaagccggctacgggggtgaggcctgtggccagtgtggccttggctactttgaggcagaacgcaacgccagccatctggtatgttcggcttgttttggcccctgtgcccgatgctcaggacctgaggaatcaaactgtttgcaatgcaagaagggctgggccctgcatcacctcaagtgtgtagacattgatgagtgtggcacagagggagccaactgtggagctgaccaattctgcgtgaacactgagggctcctatgagtgccgagactgtgccaaggcctgcctaggctgcatgggggcagggccaggtcgctgtaagaagtgtagccctggctatcagcaggtgggctccaagtgtctcgatgtggatgagtgtgagacagaggtgtgtccgggagagaacaagcagtgtgaaaacaccgagggcggttatcgctgcatctgtgccgagggctacaagcagatggaaggcatctgtgtgaaggagcagatcccagagtcagcaggcttcttctcagagatgacagaagacgagttggtggtgctgcagcagatgttctttggcatcatcatctgtgcactggccacgctggctgctaagggcgacttggtgttcaccgccatcttcattggggctgtggcggccatgactggctactggttgtcagagcgcagtgaccgtgtgctggagggcttccaggcttcacaatgtgtgaatttcaaaagtttttccttaatggtggctgctagagctttggcccctgcttaggattaggtggtcctcacaggggtggggccatcacagctccctcctgccagctgcatgctgccagttcctgttctgtgttcaccacatccccacaccccattgccacttatttattcatctcaggaaataaagaaaggtcttggaaagttaaaa

SEQ ID NO: 291024 - DNA, 2022 bp, Homo sapiens
tggcagcgacgcggtgaggagacggcccacggcgcccgcgggctggggcggtcgcttcttccttctccgtggcctacgaggagggtctggatccttctctgccggctcgtgggccgtgcctttgcccttctgcgaggccctgaatctgatcccttcccttcatatccggatccgggctcctccctccaagcccggggttccggacacctcccccaagacaacccctctggcctcctctccttcagtacttggaatctgatctcttctccctaattctgcggatccggcccctaatattctttatcagaccctcagacaagaggctgacttctgcccccttgtcaaggagcgaggccactttcctctccaccccatgctagcgaggataacttatttctcttctggaattgcatcttatgcgcctttccccacccatccccacagcccctgcaatacccagtttggcctcttttgcttgtaataacgcagatcccagcgccacggcaccttagaacagacctttttctttctcgcgtggggcctgactccttcagtgaagcctctccacgccctctatctgcaggtccccagcctgggtaaagatggccccatggcccccgaagggcctagtcccagctgtgctctggggcctcagcctcttcctcaacctcccaggacctatctggctccagccctctccacctccccagtcttctcccccgcctcagccccatccgtgtcatacctgccggggactggttgacagctttaacaagggcctggagagaaccatccgggacaactttggaggtggaaacactgcctgggaggaagagaatttgtccaaatacaaagacagtgagacccgcctggtagaggtgctggagggtgtgtgcagcaagtcagacttcgagtgccaccgcctgctggagctgagtgaggagctggtggagagctggtggtttcacaagcagcaggaggccccggacctcttccagtggctgtgctcagattccctgaagctctgctgccccgcaggcaccttcgggccctcctgccttccctgtcctgggggaacagagaggccctgcggtggctacgggcagtgtgaaggagaagggacacgagggggcagcgggcactgtgactgccaagccggctacgggggtgaggcctgtggccagtgtggccttggctactttgaggcagaacgcaacgccagccatctggtatgttcggcttgttttggcccctgtgcccgatgctcaggacctgaggaatcaaactgtttgcaatgcaagaagggctgggccctgcatcacctcaagtgtgtagacattgatgagtgtggcacagagggagccaactgtggagctgaccaattctgcgtgaacactgagggctcctatgagtgccgagactgtgccaaggcctgcctaggctgcatgggggcagggccaggtcgctgtaagaagtgtagccctggctatcagcaggtgggctccaagtgtctcgatgtggatgagtgtgagacagaggtgtgtccgggagagaacaagcagtgtgaaaacaccgagggcggttatcgctgcatctgtgccgagggctacaagcagatggaaggcatctgtgtgaaggagcagatcccagagtcagcaggcttcttctcagagatgacagaagacgagttggtggtgctgcagcagatgttctttggcatcatcatctgtgcactggccacgctggctgctaagggcgacttggtgttcaccgccatcttcattggggctgtggcggccatgactggctactggttgtcagagcgcagtgaccgtgtgctggagggcttcagctttggcccctgcttaggattaggtggtcctcacaggggtggggccatcacagctccctcctgccagctgcatgctgccagttcctgttctgtgttcaccacatccccacaccccattgccacttatttattcatctcaggaaataaagaaaggtcttggaaagttaaaa

SEQ ID NO: 291025 - DNA, 1949 bp, Homo sapiens
tggcagcgacgcggtgaggagacggcccacggcgcccgcgggctggggcggtcgcttcttccttctccgtggcctacgaggagggtctggatccttctctgccggctcgtgggccgtgcctttgcccttctgcgaggccctgaatctgatcccttcccttcatatccggatccgggctcctccctccaagcccggggttccggacacctcccccaagacaacccctctggcctcctctccttcagtacttggaatctgatctcttctccctaattctgcggatccggcccctaatattctttatcagaccctcagacaagaggctgacttctgcccccttgtcaaggagcgaggccactttcctctccaccccatgctagcgaggataacttatttctcttctggaattgcatcttatgcgcctttccccacccatccccacagcccctgcaatacccagtttggcctcttttgcttgtaataacgcagatcccagcgccacggcaccttagaacagacctttttctttctcgcgtggggcctgactccttcagtgaagcctctccacgccctctatctgcaggtccccagcctgggtaaagatggccccatggcccccgaagggcctagtcccagctgtgctctggggcctcagcctcttcctcaacctcccaggacctatctggctccagccctctccacctccccagtcttctcccccgcctcagccccatccgtgtcatacctgccggggactggttgacagctttaacaagggcctggagagaaccatccgggacaactttggaggtggaaacactgcctgggaggaagagaatttgtccaaatacaaagacagtgagacccgcctggtagaggtgctggagggtgtgtgcagcaagtcagacttcgagtgccaccgcctgctggagctgagtgaggagctggtggagagctggtggtttcacaagcagcaggaggccccggacctcttccagtggctgtgctcagattccctgaagctctgctgccccgcaggcaccttcgggccctcctgccttccctgtcctgggggaacagagaggccctgcggtggctacgggcagtgtgaaggagaagggacacgagggggcagcgggcactgtgactgccaagccggctacgggggtgaggcctgtggccagtgtggccttggctactttgaggcagaacgcaacgccagccatctggtatgttcggcttgttttggcccctgtgcccgatgctcaggacctgaggaatcaaactgtttgcaatgcaagaagggctgggccctgcatcacctcaagtgtgtagacattgatgagtgtggcacagagggagccaactgtggagctgaccaattctgcgtgaacactgagggctcctatgagtgccgagactgtgccaaggcctgcctaggctgcatgggggcagggccaggtcgctgtaagaagtgtagccctggctatcagcaggtgggctccaagtgtctcgatgtggatgagtgtgagacagaggtgtgtccgggagagaacaagcagtgtgaaaacaccgagggcggttatcgctgcatctgtgccgagggctacaagcagatggaaggcatctgtgtgaaggagcagatcccagagtcagcaggcttcttctcagagatgacagaagacgagttggtggtgctgcagcagatgttctttggcatcatcatctgtgcactggccacgctggctgctaagggcgacttggtgttcaccgccatcttcattggggctgtggcggcggagaggcagtcagagcagagtggctggggcaggaatcacagcaaggctgggtatgaactgagaggcactctcgaaggttcttccacggtgtgaatgaccgacactgaataggcaaggtgtgacctgccacccgacctgcaagagcgcaca

SEQ ID NO: 291026 - DNA, 493 bp, Homo sapiens
atattacagtcccaaagtgagtagtccaggctggcaggggagctctgctagtcataatcattccagtacccagattattcctgtaacttactgcacaatcatccccttgggcgttgtctgcatggttgaagctgagtcctgggcatctctgtgtcccacatgccagcactcaggaagggagaagggaaagaaagtgcattgaggagtccaagcattgttttaagaccaagctaacggtggagctcatcactcctgtttacatcctgttggccagaactcaatcacagggacacacttagcttcaagacaggttggcaaatgtggtctctggctgggcagcctgaagtccagctagtctgcttctgtgttggtagacagcttgcagtctctgccataccatttaatcccaggcaagaccattccccaacggctctggcttcagcttccctactaaatagggattgaaattctcaccctgctcacctctctgcag

SEQ ID NO: 291027 - DNA, 2010 bp, Homo sapiens
tggcagcgacgcggtgaggagacggcccacggcgcccgcgggctggggcggtcgcttcttccttctccgtggcctacgagggtccccagcctgggtaaagatggccccatggcccccgaagggcctagtcccagctgtgctctggggcctcagcctcttcctcaacctcccaggacctatctggctccagccctctccacctccccagtcttctcccccgcctcagccccatccgtgtcatacctgccggggactggttgacagctttaacaagggcctggagagaaccatccgggacaactttggaggtggaaacactgcctgggaggaagagaatttgtccaaatacaaagacagtgagacccgcctggtagaggtgctggagggtgtgtgcagcaagtcagacttcgagtgccaccgcctgctggagctgagtgaggagctggtggagagctggtggtttcacaagcagcaggaggccccggacctcttccagtggctgtgctcagattccctgaagctctgctgccccgcaggcaccttcgggccctcctgccttccctgtcctgggggaacagagaggccctgcggtggctacgggcagtgtgaaggagaagggacacgagggggcagcgggcactgtgactgccaagccggctacgggggtgaggcctgtggccagtgtggccttggctactttgaggcagaacgcaacgccagccatctggtatgttcggcttgttttggcccctgtgcccgatgctcaggacctgaggaatcaaactgtttgcaatgcaagaagggctgggccctgcatcacctcaagtgtgtagacattgatgagtgtggcacagagggagccaactgtggagctgaccaattctgcgtgaacactgagggctcctatgagtgccgagactgtgccaaggcctgcctaggctgcatgggggcagggccaggtcgctgtaagaagtgtagccctggctatcagcaggtgggctccaagtgtctcgatgtggatgagtgtgagacagaggtgtgtccgggagagaacaagcagtgtgaaaacaccgagggcggttatcgctgcatctgtgccgagggctacaagcagatggaaggcatctgtgtgaaggagcagatcccaggtgcattccccatcttaactgatttaacccctgaaacaacccgacgctggaagttgggttctcatccccactctacatatgtaaaaatgaagatgcagagagatgaagctactttcccagggctatatggcaagcaagtcgcaaagctgggatcccaatccagacagtctgaccgtggaacgagactcatacacagtcagcaggcttcttctcagagatgacagaagacgagttggtggtgctgcagcagatgttctttggcatcatcatctgtgcactggccacgctggctgctaagggcgacttggtgttcaccgccatcttcattggggctgtggcggccatgactggctactggttgtcagagcgcagtgaccgtgtgctggagggcttcatcaagggcagataatcgcggccaccacctgtaggacctcctcccacccacgctgcccccagagcttgggctgccctcctgctggacactcaggacagcttggtttatttttgagagtggggtaagcacccctacctgccttacagagcagcccaggtacccaggcccgggcagacaaggcccctggggtaaaaagtagccctgaaggtggataccatgagctcttcacctggcggggactggcaggcttcacaatgtgtgaatttcaaaagtttttccttaatggtggctgctagagctttggcccctgcttaggattaggtggtcctcacaggggtggggccatcacagctccctcctgccagctgcatgctgccagttcctgttctgtgttcaccacatccccacaccccattgccacttatttattcatctcaggaaataaagaaaggtcttggaaagttaaaa

SEQ ID NO: 291028 - DNA, 1359 bp, Homo sapiens
tggcagcgacgcggtgaggagacggcccacggcgcccgcgggctggggcggtcgcttcttccttctccgtggcctacgagggtccccagcctgggtaaagatggccccatggcccccgaagggcctagtcccagctgtgctctggggcctcagcctcttcctcaacctcccaggacctatctggctccagccctctccacctccccagtcttctcccccgcctcagccccatccgtgtcatacctgccggggactggttgacagctttaacaagggcctggagagaaccatccgggacaactttggaggtggaaacactgcctgggaggaagagaatttgtccaaatacaaagacagtgagacccgcctggtagaggtgctggagggtgtgtgcagcaagtcagacttcgagtgccaccgcctgctggagctgagtgaggagctggtggagagctggtggtttcacaagtgagtggcaaagggccttccctggaagtgggtcacaggcagcaggaggccccggacctcttccagtggctgtgctcagattccctgaagctctgctgccccgcaggcaccttcgggccctcctgccttcgtgagtttttaagttgctcttggggatgggaggggaccaccgagtccagggatccagtcctggctctgtccctagttcgctgtgtgaactcaggctactcagataaacttctctggacctcagttcttgcctgcctgacagggctggggagatgggcaaatcagtggggaaaggcttggagaaagcacaggggctagactgagtcatatgcagtatagttatcatcatgtactaaagaaatgatagacttcccagccccttcatttcccatgccagatcggactatggtaccttcctggggaggggcgggtgctgacctggagcctccatgatcgccatccatcctcacacacagtcctggcacaagagctgaacttactaccagcctcttttagagcagtctttcctgaagctacagataaagagctagctacaaagatggcaaattcagtctttgtaaaagaaaatattggctgggcgcggtggctcacacctgtaatcccaacactttgggaggctgcggtgggtggatcatgaggtcaggagatcgagaccatcgtggctatcatggtgaaacaccgtctctactaaaaaatacaaaaaattagccgggcatggtggcgggcgcctctagtcccagctactctggaggctgaggcagaagaatggcatgaacccggcaggcggagcttgcagtgagccgagatcatgccactgcactccagcctgggcgacagagcgagactctgtctcaaaaaaaa

SEQ ID NO: 291029 - DNA, 1776 bp, Homo sapiens
gctgctccggtccggaaggtctaggctgtggcagcgacgcggtccccagcctgggtaaagatggccccatggcccccgaagggcctagtcccagctgtgctctggggcctcagcctcttcctcaacctcccaggacctatctggctccagccctctccacctccccagtcttctcccccgcctcagccccatccgtgtcatacctgccggggactggttgacagctttaacaagggcctggagagaaccatccgggacaactttggaggtggaaacactgcctgggaggaagagaatttgtccaaatacaaagacagtgagacccgcctggtagaggtgctggagggtgtgtgcagcaagtcagacttcgagtgccaccgcctgctggagctgagtgaggagctggtggagagctggtggtttcacaagcagcaggaggccccggacctcttccagtggctgtgctcagattccctgaagctctgctgccccgcaggcaccttcgggccctcctgccttccctgtcctgggggaacagagaggccctgcggtggctacgggcagtgtgaaggagaagggacacgagggggcagcgggcactgtgactgccaagccggctacgggggtgaggcctgtggccagtgtggccttggctactttgaggcagaacgcaacgccagccatctggtatgttcggcttgttttggcccctgtgcccgatgctcaggacctgaggaatcaaactgtttgcaatgcaagaagggctgggccctgcatcacctcaagtgtgtagacattgatgagtgtggcacagagggagccaactgtggagctgaccaattctgcgtgaacactgagggctcctatgagtgccgagactgtgccaaggcctgcctaggctgcatgggggcagggccaggtcgctgtaagaagtgtagccctggctatcagcaggtgggctccaagtgtctcgatgtggatgagtgtgagacagaggtgtgtccgggagagaacaagcagtgtgaaaacaccgagggcggttatcgctgcatctgtgccgagggctacaagcagatggaaggcatctgtgtgaaggagcagatcccagagtcagcaggcttcttctcagagatgacagaagacgagttggtggtgctgcagcagatgttctttggcatcatcatctgtgcactggccacgctggctgctaagggcgacttggtgttcaccgccatcttcattggggctgtggcggccatgactggctactggttgtcagagcgcagtgaccgtgtgctggagggcttcatcaagggcagataatcgcggccaccacctgtaggacctcctcccacccacgctgcccccagagcttgggctgccctcctgctggacactcaggacagcttggtttatttttgagagtggggtaagcacccctacctgccttacagagcagcccaggtacccaggcccgggcagacaaggcccctggggtaaaaagtagccctgaaggtggataccatgagctcttcacctggcggggactggcaggcttcacaatgtgtgaatttcaaaagtttttccttaatggtggctgctagagctttggcccctgcttaggattaggtggtcctcacaggggtggggccatcacagctccctcctgccagctgcatgctgccagttcctgttctgtgttcaccacatccccacaccccattgccacttatttattcatctcaggaaataaagaaaggtcttggaaagttaaaa

SEQ ID NO: 291030 - DNA, 1843 bp, Homo sapiens
aggtgagagagacagggcacaggggcgctgggggcgtggggcggggctcgttctctcttctttcggtgggctaagaatggttcccaagctgggtaaagaattgcccatgggccccgaaggggctaattccaagttggtgtcctgggggctcaagctcctttcttaaacttccaatgaactaattttgggttcaaggccttccttcaaccttcccaaggttctttccttcccctggctcaaggccccatcccggtggttcataacctgggcggggaactggtttgacaaggtttaaacaaagggcctggagagaaccatccgggacaactttggaggtggaaacactgcctgggaggaagagaatttgtccaaatacaaagacagtgagacccgcctggtagaggtgctggagggtgtgtgcagcaagtcagacttcgagtgccaccgcctgctggagctgagtgaggagctggtggagagctggtggtttcacaagcagcaggaggccccggacctcttccagtggctgtgctcagattccctgaagctctgctgccccgcaggcaccttcgggccctcctgccttccctgtcctgggggaacagagaggccctgcggtggctacgggcagtgtgaaggagaagggacacgagggggcagcgggcactgtgactgccaagccggctacgggggtgaggcctgtggccagtgtggccttggctactttgaggcagaacgcaacgccagccatctggtatgttcggcttgttttggcccctgtgcccgatgctcaggacctgaggaatcaaactgtttgcaatgcaagaagggctgggccctgcatcacctcaagtgtgtagacattgatgagtgtggcacagagggagccaactgtggagctgaccaattctgcgtgaacactgagggctcctatgagtgccgagactgtgccaaggcctgcctaggctgcatgggggcagggccaggtcgctgtaagaagtgtagccctggctatcagcaggtgggctccaagtgtctcgatgtggatgagtgtgagacagaggtgtgtccgggagagaacaagcagtgtgaaaacaccgagggcggttatcgctgcatctgtgccgagggctacaagcagatggaaggcatctgtgtgaaggagcagatcccagagtcagcaggcttcttctcagagatgacagaagacgagttggtggtgctgcagcagatgttctttggcatcatcatctgtgcactggccacgctggctgctaagggcgacttggtgttcaccgccatcttcattggggctgtggcggccatgactggctactggttgtcagagcgcagtgaccgtgtgctggagggcttcatcaagggcagataatcgcggccaccacctgtaggacctcctcccacccacgctgcccccagagcttgggctgccctcctgctggacactcaggacagcttggtttatttttgagagtggggtaagcacccctacctgccttacagagcagcccaggtacccaggcccgggcagacaaggcccctggggtaaaaagtagccctgaaggtggataccatgagctcttcacctggcggggactggcaggcttcacaatgtgtgaatttcaaaagtttttccttaatggtggctgctagagctttggcccctgcttaggattaggtggtcctcacaggggtggggccatcacagctccctcctgccagctgcatgctgccagttcctgttctgtgttcaccacatccccacaccccattgccacttatttattcatctcaggaaataaagaaaggtcttggaaagttaaaa

SEQ ID NO: 291031 - DNA, 2492 bp, Homo sapiens
tggcagcgacgcggtgaggagacggcccacggcgcccgcgggctggggcggtcgcttcttccttctccgtggcctacgaggagggtctggatccttctctgccggctcgtgggccgtgcctttgcccttctgcgaggccctgaatctgatcccttcccttcatatccggatccgggctcctccctccaagcccggggttccggacacctcccccaagacaacccctctggcctcctctccttcagtacttggaatctgatctcttctccctaattctgcggatccggcccctaatattctttatcagaccctcagacaagaggctgacttctgcccccttgtcaaggagcgaggccactttcctctccaccccatgctagcgaggataacttatttctcttctggaattgcatcttatgcgcctttccccacccatccccacagcccctgcaatacccagtttggcctcttttgcttgtaataacgcagatcccagcgccacggcaccttagaacagacctttttctttctcgcgtggggcctgactccttcagtgaagcctctccacgccctctatctgcaggtccccagcctgggtaaagatggccccatggcccccgaagggcctagtcccagctgtgctctggggcctcagcctcttcctcaacctcccaggacctatctggctccagccctctccacctccccagtcttctcccccgcctcagccccatccgtgtcatacctgccggggactggttgacagctttaacaagggcctggagagaaccatccgggacaactttggaggtggaaacactgcctgggaggaagagaatttgtccaaatacaaagacagtgagacccgcctggtagaggtgctggagggtgtgtgcagcaagtcagacttcgagtgccaccgcctgctggagctgagtgaggagctggtggagagctggtggtttcacaagcagcaggaggccccggacctcttccagtggctgtgctcagattccctgaagctctgctgccccgcaggcaccttcgggccctcctgccttccctgtcctgggggaacagagaggccctgcggtggctacgggcagtgtgaaggagaagggacacgagggggcagcgggcactgtgactgccaagccggctacgggggtgaggcctgtggccagtgtggccttggctactttgaggcagaacgcaacgccagccatctggtatgttcggcttgttttggcccctgtgcccgatgctcaggacctgaggaatcaaactgtttgcaatgcaagaagggctgggccctgcatcacctcaagtgtgtagacattgatgagtgtggcacagagggagccaactgtggagctgaccaattctgcgtgaacactgagggctcctatgagtgccgagactgtgccaaggcctgcctaggctgcatgggggcagggccaggtcgctgtaagaagtgtagccctggctatcagcaggtgggctccaagtgtctcggtgagtctcctgctgatgggacacaggcacctgggagtgcctcacccagcatgaatggtgaagaggctggaatatgggcagatggaaggcatctgtgtgaaggagcagatcccaggtgcattccccatcttaactgatttaacccctgaaacaacccgacgctggaagttgggttctcatccccactctacatatgtaaaaatgaagatgcagagagatgaagctactttcccagggctatatggcaagcaagtcgcaaagctgggatcccaatccagacagtctgaccgtggaacgagactcatacacagtcagcaggcttcttctcagagatgacagaagacgagttggtggtgctgcagcagatgttctttggcatcatcatctgtgcactggccacgctggctgctaagggcgacttggtgttcaccgccatcttcattggggctgtggcggccatgactggctactggttgtcagagcgcagtgaccgtgtgctggagggcttcatcaagggcagataatcgcggccaccacctgtaggacctcctcccacccacgctgcccccagagcttgggctgccctcctgctggacactcaggacagcttggtttatttttgagagtggggtaagcacccctacctgccttacagagcagcccaggtacccaggcccgggcagacaaggcccctggggtaaaaagtagccctgaaggtggataccatgagctcttcacctggcggggactggcaggcttcacaatgtgtgaatttcaaaagtttttccttaatggtggctgctagagctttggcccctgcttaggattaggtggtcctcacaggggtggggccatcacagctccctcctgccagctgcatgctgccagttcctgttctgtgttcaccacatccccacaccccattgccacttatttattcatctcaggaaataaagaaaggtcttggaaagttaaaa

SEQ ID NO: 291032 - DNA, 2691 bp, Homo sapiens
tggcagcgacgcggtgaggagacggcccacggcgcccgcgggctggggcggtcgcttcttccttctccgtggcctacgaggagggtctggatccttctctgccggctcgtgggccgtgcctttgcccttctgcgaggccctgaatctgatcccttcccttcatatccggatccgggctcctccctccaagcccggggttccggacacctcccccaagacaacccctctggcctcctctccttcagtacttggaatctgatctcttctccctaattctgcggatccggcccctaatattctttatcagaccctcagacaagaggctgacttctgcccccttgtcaaggagcgaggccactttcctctccaccccatgctagcgaggataacttatttctcttctggaattgcatcttatgcgcctttccccacccatccccacagcccctgcaatacccagtttggcctcttttgcttgtaataacgcagatcccagcgccacggcaccttagaacagacctttttctttctcgcgtggggcctgactccttcagtgaagcctctccacgccctctatctgcaggtccccagcctgggtaaagatggccccatggcccccgaagggcctagtcccagctgtgctctggggcctcagcctcttcctcaacctcccaggacctatctggctccagccctctccacctccccagtcttctcccccgcctcagccccatccgtgtcatacctgccggggactggttgacagctttaacaagggcctggagagaaccatccgggacaactttggaggtggaaacactgcctgggaggaagagaatttgtccaaatacaaagacagtgagacccgcctggtagaggtgctggagggtgtgtgcagcaagtcagacttcgagtgccaccgcctgctggagctgagtgaggagctggtggagagctggtggtttcacaagcagcaggaggccccggacctcttccagtggctgtgctcagattccctgaagctctgctgccccgcaggcaccttcgggccctcctgccttccctgtcctgggggaacagagaggccctgcggtggctacgggcagtgtgaaggagaagggacacgagggggcagcgggcactgtgactgccaagccggctacgggggtgaggcctgtggccagtgtggccttggctactttgaggcagaacgcaacgccagccatctggtatgttcggcttgttttggcccctgtgcccgatgctcaggacctgaggaatcaaactgtttgcaatgcaagaagggctgggccctgcatcacctcaagtgtgtagacattgatgagtgtggcacagagggagccaactgtggagctgaccaattctgcgtgaacactgagggctcctatgagtgccgagactgtgccaaggcctgcctaggctgcatgggggcagggccaggtcgctgtaagaagtgtagccctggctatcagcaggtgggctccaagtgtctcgatgtggatgagtgtgagacagaggtgtgtccgggagagaacaagcagtgtgaaaacaccgagggcggttatcgctgcatctgtgccgagggctacaagcagatggaaggcatctgtgtgaaggagcagatcccagagtcagcaggcttcttctcagagatgacagaagacgagttggtggtgctgcagcagatgttctttggcatcatcatctgtgcactggccacgctggctgctaagggcgacttggtgttcaccgccatcttcattggggctgtggcggccatgactggctactggttgtcagagcgcagtgaccgtgtgctggagggcttcatcaagggcagataatcgcggccaccacctgtaggacctcctcccacccacgctgcccccagagcttgggctgccctcctgctggacactcaggacagcttggtttatttttgagagtggggtaagcacccctacctgccttacagagcagcccaggtacccaggcccgggcagacaaggcccctggggtaaaaagtagccctgaaggtggataccatgagctcttcacctggcggggactggcaggcttcacaatgtgtgaatttcaaaagtttttccttaatggtggctgctagagctttggcccctgcttaggattaggtggtcctcacaggggtggggccatcacagctccctcctgccagctgcatgctgccagttcctgttctgtgttcaccacatccccacaccccattgccacttatttattcatctcaggaaataaagaaaggtcttggaaagttaaaaggcatcagtcttactacctgtcccaccacccccaccttagggaaatgtcctagaatcctgggaaattgagggcttctttgatggtgagtggagaaaagatagaggagaaggttgcccctgaagtgctgttaggagaaggaggatagaggaatcagccttaggagggttccatgccagctgtcatttggcaaaggaccctggacagatgacttttgcctctgaacttcactcttctctttcctcaaatgggcttcataatgctttccactcaggcttaacatgagaattaaatgaggtgacaaatgtgaagacctggacagtacacaacagatattcaataaaagtgtggtcgccattatgaccagagcctcca

SEQ ID NO: 291033 - DNA, 2957 bp, Homo sapiens
tggcagcgacgcggtgaggagacggcccacggcgcccgcgggctggggcggtcgcttcttccttctccgtggcctacgaggagggtctggatccttctctgccggctcgtgggccgtgcctttgcccttctgcgaggccctgaatctgatcccttcccttcatatccggatccgggctcctccctccaagcccggggttccggacacctcccccaagacaacccctctggcctcctctccttcagtacttggaatctgatctcttctccctaattctgcggatccggcccctaatattctttatcagaccctcagacaagaggctgacttctgcccccttgtcaaggagcgaggccactttcctctccaccccatgctagcgaggataacttatttctcttctggaattgcatcttatgcgcctttccccacccatccccacagcccctgcaatacccagtttggcctcttttgcttgtaataacgcagatcccagcgccacggcaccttagaacagacctttttctttctcgcgtggggcctgactccttcagtgaagcctctccacgccctctatctgcaggtccccagcctgggtaaagatggccccatggcccccgaagggcctagtcccagctgtgctctggggcctcagcctcttcctcaacctcccaggacctatctggctccagccctctccacctccccagtcttctcccccgcctcagccccatccgtgtcatacctgccggggactggttgacagctttaacaagggcctggagagaaccatccgggacaactttggaggtggaaacactgcctgggaggaagagaatttgtccaaatacaaagacagtgagacccgcctggtagaggtgctggagggtgtgtgcagcaagtcagacttcgagtgccaccgcctgctggagctgagtgaggagctggtggagagctggtggtttcacaagcagcaggaggccccggacctcttccagtggctgtgctcagattccctgaagctctgctgccccgcaggcaccttcgggccctcctgccttccctgtcctgggggaacagagaggccctgcggtggctacgggcagtgtgaaggagaagggacacgagggggcagcgggcactgtgactgccaagccggctacgggggtgaggcctgtggccagtgtggccttggctactttgaggcagaacgcaacgccagccatctggtatgttcggcttgttttggcccctgtgcccgatgctcaggacctgaggaatcaaactgtttgcaatgcaagaagggctgggccctgcatcacctcaagtgtgtagacattgatgagtgtggcacagagggagccaactgtggagctgaccaattctgcgtgaacactgagggctcctatgagtgccgagactgtgccaaggcctgcctaggctgcatgggggcagggccaggtcgctgtaagaagtgtagccctggctatcagcaggtgggctccaagtgtctcgatgtggatgagtgtgagacagaggtgtgtccgggagagaacaagcagtgtgaaaacaccgagggcggttatcgctgcatctgtgccgagggctacaagcagatggaaggcatctgtgtgaaggagcagatcccagagtcagcaggcttcttctcagagatgacagaagacgagttggtggtgctgcagcagatgttctttggcatcatcatctgtgcactggccacgctggctgctaagggcgacttggtgttcaccgccatcttcattggggctgtggcggccatgactggctactggttgtcagagcgcagtgaccgtgtgctggagggcttcatcaagggcagataatcgcggccaccacctgtaggacctcctcccacccacgctgcccccagagcttgggctgccctcctgctggacactcaggacagcttggtttatttttgagagtggggtaagcacccctacctgccttacagagcagcccaggtacccaggcccgggcagacaaggcccctggggtaaaaagtagccctgaaggtggataccatgagctcttcacctggcggggactggcaggcttcacaatgtgtgaatttcaaaagtttttccttaatggtggctgctagagctttggcccctgcttaggattaggtggtcctcacaggggtggggccatcacagctccctcctgccagctgcatgctgccagttcctgttctgtgttcaccacatccccacaccccattgccacttatttattcatctcaggaaataaagaaaggtcttggaaagttaaaaaaaaaaaaaaaaaaaacacgaacgaacgcaccaacaagacaaccatagaaacaacacagcacacaaagagaaaaactcgacaccacacacaaagcagtgtcgggtcgcccacgccggtccaccaagaagagagtttctaaaacccacgaagtggggggcgggggccccccaggggtgtgtactgacaaccacctgggcgagaatgccacaaaagaaacaagaggcggaacccaaacaagtagtgtgtcatcccacacaatagaagacgcgcccgggaacgagcggtgtactaaccaacaacacagaacggggcacaggacgagggcacagagtggaggctaccaaaaaggagggcacgacgggcgaggaagaacaatccgccccggcggggggggcaaaagacagcaagaaaagagaagcacagcaacagagaacagaagaaagcaagaacaagacgaacaagaaagaaacacacaccaaagccaagcgcaggacaagcgaagcagagcagaagaagaaaacaggcaaactaaaataaccaacgcaggaacacgcacaacaaataagcgaacagacaacaagaaaagaacagatgatacaggacgacgaacaaaacaagacaggatacgaactcagtcc

SEQ ID NO: 291034 - DNA, 2448 bp, Homo sapiens
tggcagcgacgcggtgaggagacggcccacggcgcccgcgggctggggcggtcgcttcttccttctccgtggcctacgaggagggtctggatccttctctgccggctcgtgggccgtgcctttgcccttctgcgaggccctgaatctgatcccttcccttcatatccggatccgggctcctccctccaagcccggggttccggacacctcccccaagacaacccctctggcctcctctccttcagtacttggaatctgatctcttctccctaattctgcggatccggcccctaatattctttatcagaccctcagacaagaggctgacttctgcccccttgtcaaggagcgaggccactttcctctccaccccatgctagcgaggataacttatttctcttctggaattgcatcttatgcgcctttccccacccatccccacagcccctgcaatacccagtttggcctcttttgcttgtaataacgcagatcccagcgccacggcaccttagaacagacctttttctttctcgcgtggggcctgactccttcagtgaagcctctccacgccctctatctgcaggtccccagcctgggtaaagatggccccatggcccccgaagggcctagtcccagctgtgctctggggcctcagcctcttcctcaacctcccaggacctatctggctccagccctctccacctccccagtcttctcccccgcctcagccccatccgtgtcatacctgccggggactggttgacagctttaacaagggcctggagagaaccatccgggacaactttggaggtggaaacactgcctgggaggaagagaatttgtccaaatacaaagacagtgagacccgcctggtagaggtgctggagggtgtgtgcagcaagtcagacttcgagtgccaccgcctgctggagctgagtgaggagctggtggagagctggtggtttcacaagcagcaggaggccccggacctcttccagtggctgtgctcagattccctgaagctctgctgccccgcaggcaccttcgggccctcctgccttccctgtcctgggggaacagagaggccctgcggtggctacgggcagtgtgaaggagaagggacacgagggggcagcgggcactgtgactgccaagccggctacgggggtgaggcctgtggccagtgtggccttggctactttgaggcagaacgcaacgccagccatctggtatgttcggcttgttttggcccctgtgcccgatgctcaggacctgaggaatcaaactgtttgcaatgcaagaagggctgggccctgcatcacctcaagtgtgtagacattgatgagtgtggcacagagggagccaactgtggagctgaccaattctgcgtgaacactgagggctcctatgagtgccgagactgtgccaaggcctgcctaggctgcatgggggcagggccaggtcgctgtaagaagtgtagccctggctatcagcaggtgggctccaagtgtctcgatgtggatgagtgtgagacagaggtgtgtccgggagagaacaagcagtgtgaaaacaccgagggcggttatcgctgcatctgtgccgagggctacaagcagatggaaggcatctgtgtgaaggagcagatcccagagtcagcaggcttcttctcagagatgacagaagacgagttggtggtgctgcagcagatgttctttggcatcatcatctgtgcactggccacgctggctgctaagggcgacttggtgttcaccgccatcttcattggggctgtggcggccatgactggctactggttgtcagagcgcagtgaccgtgtgctggagggcttccaggcttcacaatgtgtgaatttcaaaagtttttccttaatggtggctgctagagctttggcccctgcttaggattaggtggtcctcacaggggtggggccatcacagctccctcctgccagctgcatgctgccagttcctgttctgtgttcaccacatccccacaccccattgccacttatttattcatctcaggaaataaagaaaggtcttggaaagttaaaaggcatcagtcttactacctgtcccaccacccccaccttagggaaatgtcctagaatcctgggaaattgagggcttctttgatggtgagtggagaaaagatagaggagaaggttgcccctgaagtgctgttaggagaaggaggatagaggaatcagccttaggagggttccatgccagctgtcatttggcaaaggaccctggacagatgacttttgcctctgaacttcactcttctctttcctcaaatgggcttcataatgctttccactcaggcttaacatgagaattaaatgaggtgacaaatgtgaagacctggacagtacacaacagatattcaataaaagtgtggtcgccattatgaccagagcctcca

SEQ ID NO: 291035 - DNA, 2023 bp, Homo sapiens
tggcagcgacgcggtgaggagacggcccacggcgcccgcgggctggggcggtcgcttcttccttctccgtggcctacgaggagggtctggatccttctctgccggctcgtgggccgtgcctttgcccttctgcgaggccctgaatctgatcccttcccttcatatccggatccgggctcctccctccaagcccggggttccggacacctcccccaagacaacccctctggcctcctctccttcagtacttggaatctgatctcttctccctaattctgcggatccggcccctaatattctttatcagaccctcagacaagaggctgacttctgcccccttgtcaaggagcgaggccactttcctctccaccccatgctagcgaggataacttatttctcttctggaattgcatcttatgcgcctttccccacccatccccacagcccctgcaatacccagtttggcctcttttgcttgtaataacgcagatcccagcgccacggcaccttagaacagacctttttctttctcgcgtggggcctgactccttcagtgaagcctctccacgccctctatctgcaggtccccagcctgggtaaagatggccccatggcccccgaagggcctagtcccagctgtgctctggggcctcagcctcttcctcaacctcccaggacctatctggctccagccctctccacctccccagtcttctcccccgcctcagccccatccgtgtcatacctgccggggactggttgacagctttaacaagggcctggagagaaccatccgggacaactttggaggtggaaacactgcctgggaggaagagaatttgtccaaatacaaagacagtgagacccgcctggtagaggtgctggagggtgtgtgcagcaagtcagacttcgagtgccaccgcctgctggagctgagtgaggagctggtggagagctggtggtttcacaagcagcaggaggccccggacctcttccagtggctgtgctcagattccctgaagctctgctgccccgcaggcaccttcgggccctcctgccttccctgtcctgggggaacagagaggccctgcggtggctacgggcagtgtgaaggagaagggacacgagggggcagcgggcactgtgactgccaagccggctacgggggtgaggcctgtggccagtgtggccttggctactttgaggcagaacgcaacgccagccatctggtatgttcggcttgttttggcccctgtgcccgatgctcaggacctgaggaatcaaactgtttgcaatgcaagaagggctgggccctgcatcacctcaagtgtgtagacattgatgagtgtggcacagagggagccaactgtggagctgaccaattctgcgtgaacactgagggctcctatgagtgccgagactgtgccaaggcctgcctaggctgcatgggggcagggccaggtcgctgtaagaagtgtagccctggctatcagcaggtgggctccaagtgtctcgatgtggatgagtgtgagacagaggtgtgtccgggagagaacaagcagtgtgaaaacaccgagggcggttatcgctgcatctgtgccgagggctacaagcagatggaaggcatctgtgtgaaggagcagatcccagagtcagcaggcttcttctcagagatgacagaagacgagttggtggtgctgcagcagatgttctttggcatcatcatctgtgcactggccacgctggctgctaagggcgacttggtgttcaccgccatcttcattggggctgtggcggccaggcttcacaatgtgtgaatttcaaaagtttttccttaatggtggctgctagagctttggcccctgcttaggattaggtggtcctcacaggggtggggccatcacagctccctcctgccagctgcatgctgccagttcctgttctgtgttcaccacatccccacaccccattgccacttatttattcatctcaggaaataaagaaaggtcttggaaagttaaaa

SEQ ID NO: 291036 - DNA, 1823 bp, Homo sapiens
tggcagcgacgcggtgaggagacggcccacggcgcccgcgggctggggcggtcgcttcttccttctccgtggcctacgaggagggtctggatccttctctgccggctcgtgggccgtgcctttgcccttctgcgaggccctgaatctgatcccttcccttcatatccggatccgggctcctccctccaagcccggggttccggacacctcccccaagacaacccctctggcctcctctccttcagtacttggaatctgatctcttctccctaattctgcggatccggcccctaatattctttatcagaccctcagacaagaggctgacttctgcccccttgtcaaggagcgaggccactttcctctccaccccatgctagcgaggataacttatttctcttctggaattgcatcttatgcgcctttccccacccatccccacagcccctgcaatacccagtttggcctcttttgcttgtaataacgcagatcccagcgccacggcaccttagaacagacctttttctttctcgcgtggggcctgactccttcagtgaagcctctccacgccctctatctgcaggtccccagcctgggtaaagatggccccatggcccccgaagggcctagtcccagctgtgctctggggcctcagcctcttcctcaacctcccaggacctatctggctccagccctctccacctccccagtcttctcccccgcctcagccccatccgtgtcatacctgccggggactggttgacagctttaacaagggcctggagagaaccatccgggacaactttggaggtggaaacactgcctgggaggaagagaatttgtccaaatacaaagacagtgagacccgcctggtagaggtgctggagggtgtgtgcagcaagtcagacttcgagtgccaccgcctgctggagctgagtgaggagctggtggagagctggtggtttcacaagcagcaggaggccccggacctcttccagtggctgtgctcagattccctgaagctctgctgccccgcaggcaccttcgggccctcctgccttcgtgagtttttaagttgctcttggggatgggaggggaccaccgagtccagggatccagtcctggctctgtccctagttcgctgtgtgaactcaggctactcagataaacttctctggacctcagttcttgcctgcctgacagggctggggagatgggcaaatcagtggggaaaggcttggagaaagcacaggggctagactgagtcatatgcagtatagttatcatcatgtactaaagaaatgatagacttcccagccccttcatttcccatgccagatcggactatggtaccttcctggggaggggcgggtgctgacctggagcctccatgatcgccatccatcctcacacacagtcctggcacaagagctgaacttactaccagcctcttttagagcagtctttcctgaagctacagataaagagctagctacaaagatggcaaattcagtctttgtaaaagaaaatattggctgggcgcggtggctcacacctgtaatcccaacactttgggaggctgcggtgggtggatcatgaggtcaggagatcgagaccatcgtggctatcatggtgaaacaccgtctctactaaaaaatacaaaaaattagccgggcatggtggcgggcgcctctagtcccagctactctggaggctgaggcagaagaatggcatgaacccggcaggcggagcttgcagtgagccgagatcatgccactgcactccagcctgggcgacagagcgagactctgtctcaaaaaaaa

SEQ ID NO: 291037 - DNA, 2626 bp, Homo sapiens
tgtgaaattgagaatcatgataaaatcctcatacctcctcctcttttgaccaaatctttctaaaatgcacaattataatttcttatctttaggaaaaagtaattatgttatatgtgttatatacactatgtaaatatagttcattaaatcattctttggtgtttgaagactttctaattcattacttcattccagacatcaatgacaacagcacataccgagcaggtacacatatgagctacctactaatatgccctgattttgattgtattttgtgaaaaccttggtatgggttatttttaaatgaatgttttcccaaattttaagctgaaactaggatgcatcaaaattatcttggtcataatcttgtcaatgatgtcatctaaaggccaccaggaacacacctgtagcccagcaaagttgaggccatcgactggctcatcacaacaaggaaggctgtgcaccactgggacccagcagcagctcagcagcagcagtgagagggccttgggaaagacttggagggtttggcttatacaaggtgatcttggggagggtcaaggaaacaggctgtgatggttaatattgagtgtcaacttgattggattgaaggatgcaaaggattgttcctgggtgtatatgtgagagtgtggccaaaggagattaacattttagtcagtggactgggagaggcacacccaccctcaatctgggtgggcatcatctaatcagctgccacagcagctaaaataaagcaggcagaagttggaatgagcagacttgctgagtgttccagccttcatctttctcccatgctggatgcttcctgccctcgaacatcagactccaagttcttcagcttttttttttttttttggactcttggacttacagcattggtttgccaggggctcccaggcctctagccgcagactgaaggctgcactgtgagcctccctacctttgaagtttgggactcagactggcttcttggctcctcagcttgcagtcggcctattgtgagacttccccttgtgatcatgtgagccaattctcctgataaactcaccttcatatatacatctatcctattagttctatccgtttagagaaccctgactaatacacaggccatgctcagatggagtgctgtctggaaatgggagtaattctgtggttgaatgtcttaattgtcctggaaggtgggagaaatggaatgaggctggtgctacaattgatgtaaaagcagcagctgctcacataagccggggtggaggatgcctaggcgtatttgtggtattgaccatgttcttgtttttgtttgtgaccagaccagattacagaggggtattgatttgccttgcccccgcccccaccatcacagtgtgtccctgtccagtgttggtgctgtgtggcattgcttgtgtccataggagtccatcaaggcagagcggcagagcggcaagcagagcggcaaggcaggtcagcttccggctcttccaggctgcatgtccccctcaatatcctttcaacccaatggaaatggattgaaagagtgaaagtcactggtctcaaagaatctacggaatttagcattttgaaaatcacagagcaattttgggtaggtattcacatgcactaaaaaaccaggcaaacatctgactcccaggataaagtgactgagagcagtagaagacttgttgagccttaaggaataagaggaaaattatgttatgaagtgcaggaacagcacagacccagacgaggggatgcagcccggagccagtaacccggcgcctcctcctccccagggcgcagcgctggctgctccccggataccgtgatcacacgtcccaggtcctgagagcgcctcataggtagacagttctttgggacttttgggacgcagcacttgaagagaggtttacctaaactttcctcctgggagcctgtcatcatttgaaagtaacagaagaaagctgtcaggctgaggaaagtttcaacaggcacttggtgagaatgggaagcatccattcattgggaaatcacggggacagaggaggaattcacgggatcagagcactgagaaactccagaggcttctggttcaccgccctgattccacagatgtgggtcagaggcagagatggaagttggaatggacaagcctgccctctcctcagctctccatggctctgtcctcaggctgtttctgcaatttgacatgaggcctggccccagggaaaccagtggggcctcatctcctccctgtgctgctctgaggtggagccttctcagggtcagtccagctctggagcccctctccagctcggtcaccaaagctgtctggtcccagggcagtgtggagtgacaggcacgccagccaatccaatcggccatttcatacccaatgcatgtgactgataaagagataacaccctgtctccaagacacaggctttacataaacagctttaatgacttcttcacttagggacaagactccttagtggtggaacctcaggcatccatgcaggatgtaagaaagctcccgtatatacatgaactgagaagtgtgtagaagagtaaatactgtaataggtaataaaatgtatgtatttttattt

SEQ ID NO: 291038 - DNA, 1637 bp, Homo sapiens
ctgcagttgtttgggctgtcgctgtggctggttctgcggtgtgcggccagccatggagcgctctgggcccagcgaagtgacaggctcagacgcatcgggaccggacccgcagcttgtggtcaccatgggcttcacggggttcggggttcggtaaaaaagctcacacatttgacttggaagcaatgtttgaacaaactcaaagaacagctgtggaaagaagtcacaaaacactgggccaccaggaacacacctgtagcccagcaaagttgaggccatcgactggctcatcacaacaaggaaggctgtgcaccactgggacccagcagcagctcagcagcagcagtgagagggccttgggaaagacttggagggtttggcttatacaagaccagattacagaggggtattgatttgccttgcccccgcccccaccatcacagtgtgtccctgtccagtgttggtgctgtgtggcattgcttgtgtccataggagtccatcaaggcagagcggcagagcggcaagcagagcggcaaggcagttcaacccaatggaaatggattgaaagagtgaaagtcactggtctcaaagaatctacggaatttagcattttgaaaatcacagagcaattttgggtaggtattcacatgcactaaaaaaccaggcaaacatctgactcccaggataaagtgactgagagcagtagaagacttgttgagccttaaggaataagaggaaaattatgttatgaagtgcaggaacagcacagacccagacgaggggatgcagcccggagccagtaacccggcgcctcctcctccccagggcgcagcgctggctgctccccggataccgtgatcacacgtcccaggtcctgagagcgcctcataggtagacagttctttgggacttttgggacgcagcacttgaagagaggtttacctaaactttcctcctgggagcctgtcatcatttgaaagtaacagaagaaagctgtcaggctgaggaaagtttcaacaggcacttggtgagaatgggaagcatccattcattgggaaatcacggggacagaggaggaattcacgggatcagagcactgagaaactccagaggcttctggttcaccgccctgattccacagatgtgggtcagaggcagagatggaagttggaatggacaagcctgccctctcctcagctctccatggctctgtcctcaggctgtttctgcaatttgacatgaggcctggccccagggaaaccagtggggcctcatctcctccctgtgctgctctgaggtggagccttctcagggtcagtccagctctggagcccctctccagctcggtcaccaaagctgtctggtcccagggcagtgtggagtgacaggcacgccagccaatccaatcggccatttcatacccaatgcatgtgactgataaagagataacaccctgtctccaagacacaggctttacataaacagctttaatgacttcttcacttagggacaagactccttagtggtggaacctcaggcatccatgcaggatgtaagaaagctcccgtatatacatgaactgagaagtgtgtagaagagtaaatactgtaataggtaataaaatgtatgtatttttattt

SEQ ID NO: 291039 - DNA, 341 bp, Homo sapiens
tccaagacgggaggtgaagaccagcctcatagcgagactgcatctctacaaaatattttaaaactaggctgcacatggtggtgcacgcctgtagtcccagctactactcttggtatcgcaactacgggcacctggagttgattcagctgcagctggccacccagtttgagaattggtgtaagacatcacaatcccattattcagagcgcgtatggagtggaaacgcttgtagggtttcaccaggtaagcggtgttgaactttctgcttgtgtattctctctgggcagagatgccacttgcctcccccaccctgccgtgcgcccactgcagtgctcccctcg

SEQ ID NO: 291040 - DNA, 1934 bp, Homo sapiens
ctgcagttgtttgggctgtcgctgtggctggttctgcggtgtgcggccagccatggagcgctctgggcccagcgaagtgacaggctcagacgcatcgggaccggacccgcagcttgtggtcaccatgggcttcacggggttcggggttcggtaaaaaagctcacacatttgacttggaagcaatgtttgaacaaactcaaagaacagctgtggaaagaagtcacaaaacactgggccaccaggaacacacctgtagcccagcaaagttgaggccatcgactggctcatcacaacaaggaaggctgtgcaccactgggacccagcagcagctcagcagcagcagtgagagggccttgggaaagacttggagggtttggcttatacaagaccagattacagaggggtattgatttgccttgcccccgcccccaccatcacagtgtgtccctgtccagtgttggtgctgtgtggcattgcttgtgtccataggagtccatcaaggcagagcggcagagcggcaagcagagcggcaaggcaggtcagcttccggctcttccaggctgcatgtccccctcaatatcctttcaacccaatggaaatggattgaaagagtgaaagtcactggtctcaaagaatctacggaatttagcattttgaaaatcacagagcaattttgggtaggtattcacatgcactaaaaaaccaggcaaacatctgactcccaggataaagtgactgagagcagtagaagacttgttgagccttaaggaataagaggaaaattatgttatgaagtgcaggaacagcacagacccagacgaggggatgcagcccggagccagtaacccggcgcctcctcctccccagggcgcagcgctggctgctccccggataccgtgatcacacgtcccaggtcctgagagcgcctcataggtagacagttctttgggacttttgggacgcagcacttgaagagaggtttacctaaactttcctcctgggagcctgtcatcatttgaaagtaacagaagaaagctgtcaggctgaggaaagtttcaacaggcacttggtgagaatgggaagcatccattcattgggaaatcacggggacagaggaggaattcacgggatcagagcactgagaaactccagaggcttctggttcaccgccctgattccacagatgtgggtcagaggcagagatggaagttggaatggacaagcctgccctctcctcagctctccatggctctgtcctcaggctgtttctgcaatttgacatgaggcctggccccagggaaaccagtggggcctcatctcctccctgtgctgctctgaggtggagccttctcagggtcagtccagctctggagcccctctccagctcggtcaccaaagctgtctggtcccagggcagtgtggagtgacaggcacgccagccaatccaatcggccatttcatacccaatgcatgtgactgataaagagataacaccctgtctccaagacacaggctttacataaacagctttaatgacttcttcacttagggacaagactccttagtggtggaacctcaggcatccatgcaggatgtaagaaagctcccgtatatacatgaactgagaagtgtgtagaagagtaaatactgtaataggtaataaaatgtatgtatttttatttatgtgctactttgtctttctccctctctgtgtatatacacatacatacaaaaatgtattcattctatggaaaacatgaaagatgtaatattctttacatatttaattaatgtattttttctgatcatatgaacaccacaaatataattttataatttttttacctaacaataagtcttaaacataaatatacatggacaatatcatagttttttttttaatcataattaaaatggttgtgaaacattccact

SEQ ID NO: 291041 - DNA, 2589 bp, Homo sapiens
tgtgaaattgagaatcatgataaaatcctcatacctcctcctcttttgaccaaatctttctaaaatgcacaattataatttcttatctttaggaaaaagtaattatgttatatgtgttatatacactatgtaaatatagttcattaaatcattctttggtgtttgaagactttctaattcattacttcattccagacatcaatgacaacagcacataccgagcaggtacacatatgagctacctactaatatgccctgattttgattgtattttgtgaaaaccttggtatgggttatttttaaatgaatgttttcccaaattttaagctgaaactaggatgcatcaaaattatcttggtcataatcttgtcaatgatgtcatctaaaggccaccaggaacacacctgtagcccagcaaagttgaggccatcgactggctcatcacaacaaggaaggctgtgcaccactgggacccagcagcagctcagcagcagcagtgagagggccttgggaaagacttggagggtttggcttatacaaggtgatcttggggagggtcaaggaaacaggctgtgatggttaatattgagtgtcaacttgattggattgaaggatgcaaaggattgttcctgggtgtatatgtgagagtgtggccaaaggagattaacattttagtcagtggactgggagaggcacacccaccctcaatctgggtgggcatcatctaatcagctgccacagcagctaaaataaagcaggcagaagttggaatgagcagacttgctgagtgttccagccttcatctttctcccatgctggatgcttcctgccctcgaacatcagactccaagttcttcagcttttttttttttttttggactcttggacttacagcattggtttgccaggggctcccaggcctctagccgcagactgaaggctgcactgtgagcctccctacctttgaagtttgggactcagactggcttcttggctcctcagcttgcagtcggcctattgtgagacttccccttgtgatcataccagattacagaggggtattgatttgccttgcccccgcccccaccatcacagtgtgtccctgtccagtgttggtgctgtgtggcattgcttgtgtccataggagtccatcaaggcagagcggcagagcggcaagcagagcggcaaggcaggtcagcttccggctcttccaggctgcatgtccccctcaatatcctttcaacccaatggaaatggattgaaagagtgaaagtcactggtctcaaagaatctacggaatttagcattttgaaaatcacagagcaattttgggtaggtattcacatgcactaaaaaaccaggcaaacatctgactcccaggataaagtgactgagagcagtagaagacttgttgagccttaaggaataagaggaaaattatgttatgaagtgcaggaacagcacagacccagacgaggggatgcagcccggagccagtaacccggcgcctcctcctccccagggcgcagcgctggctgctccccggataccgtgatcacacgtcccaggtcctgagagcgcctcataggtagacagttctttgggacttttgggacgcagcacttgaagagaggtttacctaaactttcctcctgggagcctgtcatcatttgaaagtaacagaagaaagctgtcaggctgaggaaagtttcaacaggcacttggtgagaatgggaagcatccattcattgggaaatcacggggacagaggaggaattcacgggatcagagcactgagaaactccagaggcttctggttcaccgccctgattccacagatgtgggtcagaggcagagatggaagttggaatggacaagcctgccctctcctcagctctccatggctctgtcctcaggctgtttctgcaatttgacatgaggcctggccccagggaaaccagtggggcctcatctcctccctgtgctgctctgaggtggagccttctcagggtcagtccagctctggagcccctctccagctcggtcaccaaagctgtctggtcccagggcagtgtggagtgacaggcacgccagccaatccaatcggccatttcatacccaatgcatgtgactgataaagagataacaccctgtctccaagacacaggctttacataaacagctttaatgacttcttcacttagggacaagactccttagtggtggaacctcaggcatccatgcaggatgtaagaaagctcccgtatatacatgaactgagaagtgtgtagaagagtaaatactgtaataggtaataaaatgtatgtatttttatttatgtgctactttgtctttctccctctctgtgtatatacacatacatacaaaaatgtattcattctatggaaaacatgaaagatgtaatattctttacatatttaattaatgtattttttctgatcatatgaacaccacaaatataattttataatttttttacctaacaataagtcttaaacataaatatacatggacaatatcatagttttttttttaatcataattaaaatggttgtgaaacattccact

SEQ ID NO: 291042 - DNA, 1781 bp, Homo sapiens
ctgcagttgtttgggctgtcgctgtggctggttctgcggtgtgcggccagccatggagcgctctgggcccagcgaagtgacaggctcagacgcatcgggaccggacccgcagcttgtggtcaccatgggcttcacggggttcggggttcggtaaaaaagctcacacatttgacttggaagcaatgtttgaacaaactcaaagaacagctgtggaaagaagtcacaaaacactggaccagattacagaggggtattgatttgccttgcccccgcccccaccatcacagtgtgtccctgtccagtgttggtgctgtgtggcattgcttgtgtccataggagtccatcaaggcagagcggcagagcggcaagcagagcggcaaggcaggtcagcttccggctcttccaggctgcatgtccccctcaatatcctttcaacccaatggaaatggattgaaagagtgaaagtcactggtctcaaagaatctacggaatttagcattttgaaaatcacagagcaattttgggtaggtattcacatgcactaaaaaaccaggcaaacatctgactcccaggataaagtgactgagagcagtagaagacttgttgagccttaaggaataagaggaaaattatgttatgaagtgcaggaacagcacagacccagacgaggggatgcagcccggagccagtaacccggcgcctcctcctccccagggcgcagcgctggctgctccccggataccgtgatcacacgtcccaggtcctgagagcgcctcataggtagacagttctttgggacttttgggacgcagcacttgaagagaggtttacctaaactttcctcctgggagcctgtcatcatttgaaagtaacagaagaaagctgtcaggctgaggaaagtttcaacaggcacttggtgagaatgggaagcatccattcattgggaaatcacggggacagaggaggaattcacgggatcagagcactgagaaactccagaggcttctggttcaccgccctgattccacagatgtgggtcagaggcagagatggaagttggaatggacaagcctgccctctcctcagctctccatggctctgtcctcaggctgtttctgcaatttgacatgaggcctggccccagggaaaccagtggggcctcatctcctccctgtgctgctctgaggtggagccttctcagggtcagtccagctctggagcccctctccagctcggtcaccaaagctgtctggtcccagggcagtgtggagtgacaggcacgccagccaatccaatcggccatttcatacccaatgcatgtgactgataaagagataacaccctgtctccaagacacaggctttacataaacagctttaatgacttcttcacttagggacaagactccttagtggtggaacctcaggcatccatgcaggatgtaagaaagctcccgtatatacatgaactgagaagtgtgtagaagagtaaatactgtaataggtaataaaatgtatgtatttttatttatgtgctactttgtctttctccctctctgtgtatatacacatacatacaaaaatgtattcattctatggaaaacatgaaagatgtaatattctttacatatttaattaatgtattttttctgatcatatgaacaccacaaatataattttataatttttttacctaacaataagtcttaaacataaatatacatggacaatatcatagttttttttttaatcataattaaaatggttgtgaaacattccact

SEQ ID NO: 291043 - DNA, 1914 bp, Homo sapiens
cccacgcgtacgcccacgcgtccgggccagccatggagcgctctgggcccagcgaagtgacaggctcagacgcatcgggaccggacccgcagcttgtggtcaccatgggcttcacggggttcggggttcggtaaaaaagctcacacatttgacttggaagcaatgtttgaacaaactcaaagaacagctgtggaaagaagtcacaaaacactgggccaccaggaacacacctgtagcccagcaaagttgaggccatcgactggctcatcacaacaaggaaggctgtgcaccactgggacccagcagcagctcagcagcagcagtgagagggccttgggaaagacttggagggtttggcttatacaagaccagattacagaggggtattgatttgccttgcccccgcccccaccatcacagtgtgtccctgtccagtgttggtgctgtgtggcattgcttgtgtccataggagtccatcaaggcagagcggcagagcggcaagcagagcggcaaggcaggtcagcttccggctcttccaggctgcatgtccccctcaatatcctttcaacccaatggaaatggattgaaagagtgaaagtcactggtctcaaagaatctacggaatttagcattttgaaaatcacagagcaattttgggtaggtattcacatgcactaaaaaaccaggcaaacatctgactcccaggataaagtgactgagagcagtagaagacttgttgagccttaaggaataagaggaaaattatgttatgaagtgcaggaacagcacagacccagacgaggggatgcagcccggagccagtaacccggcgcctcctcctccccagggcgcagcgctggctgctccccggataccgtgatcacacgtcccaggtcctgagagcgcctcataggtagacagttctttgggacttttgggacgcagcacttgaagagaggtttacctaaactttcctcctgggagcctgtcatcatttgaaagtaacagaagaaagctgtcaggctgaggaaagtttcaacaggcacttggtgagaatgggaagcatccattcattgggaaatcacggggacagaggaggaattcacgggatcagagcactgagaaactccagaggcttctggttcaccgccctgattccacagatgtgggtcagaggcagagatggaagttggaatggacaagcctgccctctcctcagctctccatggctctgtcctcaggctgtttctgcaatttgacatgaggcctggccccagggaaaccagtggggcctcatctcctccctgtgctgctctgaggtggagccttctcagggtcagtccagctctggagcccctctccagctcggtcaccaaagctgtctggtcccagggcagtgtggagtgacaggcacgccagccaatccaatcggccatttcatacccaatgcatgtgactgataaagagataacaccctgtctccaagacacaggctttacataaacagctttaatgacttcttcacttagggacaagactccttagtggtggaacctcaggcatccatgcaggatgtaagaaagctcccgtatatacatgaactgagaagtgtgtagaagagtaaatactgtaataggtaataaaatgtatgtatttttatttatgtgctactttgtctttctccctctctgtgtatatacacatacatacaaaaatgtattcattctatggaaaacatgaaagatgtaatattctttacatatttaattaatgtattttttctgatcatatgaacaccacaaatataattttataatttttttacctaacaataagtcttaaacataaatatacatggacaatatcatagttttttttttaatcataattaaaatggttgtgaaacattccact

SEQ ID NO: 291044 - DNA, 1708 bp, Homo sapiens
ctgcagttgtttgggctgtcgctgtggctggttctgcggtgtgcggccagccatggagcgctctgggcccagcgaaggtaaaaaagctcacacatttgacttggaagcaatgtttgaacaaactcaaagaacagctgtggaaagaagtcacaaaacactggaccagattacagaggggtattgatttgccttgcccccgcccccaccatcacagtgtgtccctgtccagtgttggtgctgtgtggcattgcttgtgtccataggagtccatcaaggcagagcggcagagcggcaagcagagcggcaaggcaggtcagcttccggctcttccaggctgcatgtccccctcaatatcctttcaacccaatggaaatggattgaaagagtgaaagtcactggtctcaaagaatctacggaatttagcattttgaaaatcacagagcaattttgggtaggtattcacatgcactaaaaaaccaggcaaacatctgactcccaggataaagtgactgagagcagtagaagacttgttgagccttaaggaataagaggaaaattatgttatgaagtgcaggaacagcacagacccagacgaggggatgcagcccggagccagtaacccggcgcctcctcctccccagggcgcagcgctggctgctccccggataccgtgatcacacgtcccaggtcctgagagcgcctcataggtagacagttctttgggacttttgggacgcagcacttgaagagaggtttacctaaactttcctcctgggagcctgtcatcatttgaaagtaacagaagaaagctgtcaggctgaggaaagtttcaacaggcacttggtgagaatgggaagcatccattcattgggaaatcacggggacagaggaggaattcacgggatcagagcactgagaaactccagaggcttctggttcaccgccctgattccacagatgtgggtcagaggcagagatggaagttggaatggacaagcctgccctctcctcagctctccatggctctgtcctcaggctgtttctgcaatttgacatgaggcctggccccagggaaaccagtggggcctcatctcctccctgtgctgctctgaggtggagccttctcagggtcagtccagctctggagcccctctccagctcggtcaccaaagctgtctggtcccagggcagtgtggagtgacaggcacgccagccaatccaatcggccatttcatacccaatgcatgtgactgataaagagataacaccctgtctccaagacacaggctttacataaacagctttaatgacttcttcacttagggacaagactccttagtggtggaacctcaggcatccatgcaggatgtaagaaagctcccgtatatacatgaactgagaagtgtgtagaagagtaaatactgtaataggtaataaaatgtatgtatttttatttatgtgctactttgtctttctccctctctgtgtatatacacatacatacaaaaatgtattcattctatggaaaacatgaaagatgtaatattctttacatatttaattaatgtattttttctgatcatatgaacaccacaaatataattttataatttttttacctaacaataagtcttaaacataaatatacatggacaatatcatagttttttttttaatcataattaaaatggttgtgaaacattccact

SEQ ID NO: 291045 - DNA, 1736 bp, Homo sapiens
ctgcagttgtttgggctgtcgctgtggctggttctgcggtgtgcggccagccatggagcgctctgggcccagcgaagtgacaggctcagacgcatcgggaccggacccgcagcttgtggtcaccatgggcttcacggggttcggggttcggtaaaaaagctcacacatttgacttggaagcaatgtttgaacaaactcaaagaacagctgtggaaagaagtcacaaaacactggaccagattacagaggggtattgatttgccttgcccccgcccccaccatcacagtgtgtccctgtccagtgttggtgctgtgtggcattgcttgtgtccataggagtccatcaaggcagagcggcagagcggcaagcagagcggcaaggcagttcaacccaatggaaatggattgaaagagtgaaagtcactggtctcaaagaatctacggaatttagcattttgaaaatcacagagcaattttgggtaggtattcacatgcactaaaaaaccaggcaaacatctgactcccaggataaagtgactgagagcagtagaagacttgttgagccttaaggaataagaggaaaattatgttatgaagtgcaggaacagcacagacccagacgaggggatgcagcccggagccagtaacccggcgcctcctcctccccagggcgcagcgctggctgctccccggataccgtgatcacacgtcccaggtcctgagagcgcctcataggtagacagttctttgggacttttgggacgcagcacttgaagagaggtttacctaaactttcctcctgggagcctgtcatcatttgaaagtaacagaagaaagctgtcaggctgaggaaagtttcaacaggcacttggtgagaatgggaagcatccattcattgggaaatcacggggacagaggaggaattcacgggatcagagcactgagaaactccagaggcttctggttcaccgccctgattccacagatgtgggtcagaggcagagatggaagttggaatggacaagcctgccctctcctcagctctccatggctctgtcctcaggctgtttctgcaatttgacatgaggcctggccccagggaaaccagtggggcctcatctcctccctgtgctgctctgaggtggagccttctcagggtcagtccagctctggagcccctctccagctcggtcaccaaagctgtctggtcccagggcagtgtggagtgacaggcacgccagccaatccaatcggccatttcatacccaatgcatgtgactgataaagagataacaccctgtctccaagacacaggctttacataaacagctttaatgacttcttcacttagggacaagactccttagtggtggaacctcaggcatccatgcaggatgtaagaaagctcccgtatatacatgaactgagaagtgtgtagaagagtaaatactgtaataggtaataaaatgtatgtatttttatttatgtgctactttgtctttctccctctctgtgtatatacacatacatacaaaaatgtattcattctatggaaaacatgaaagatgtaatattctttacatatttaattaatgtattttttctgatcatatgaacaccacaaatataattttataatttttttacctaacaataagtcttaaacataaatatacatggacaatatcatagttttttttttaatcataattaaaatggttgtgaaacattccact

SEQ ID NO: 291046 - DNA, 945 bp, Homo sapiens
cccacgcgtacgcccacgcgtccgggccagccatggagcgctctgggcccagcgaagtgacaggctcagacgcatcgggaccggacccgcagcttgtggtcaccatgggcttcacggggttcggggttcggtaaaaaagctcacacatttgacttggaagcaatgtttgaacaaactcaaagaacagctgtggaaagaagtcacaaaacactggaccagattacagaggggtattgatttgccttgcccccgcccccaccatcacagtgtgtccctgtccagtgttggtgctgtgtggcattgcttgtgtccataggagtccatcaaggcagagcggcagagcggcaagcagagcggcaaggcaggtcagcttccggctcttccaggctgcatgtccccctcaatatcctttcaacccaatggaaatggattgaaagagtgaaagtcactggtctcaaagaatctacggaatttagcattttgaaaatcacagagcaattttgggtaggtattcacatgcactaaaaaaccaggcaatttgacatgaggcctggccccagggaaaccagtggggcctcatctcctccctgtgctgctctgaggtggagccttctcagggtcagtccagctctggagcccctctccagctcggtcaccaaagctgtctggtcccagggcagtgtggagtgacaggcacgccagccaatccaatcggccatttcatacccaatgcatgtgactgataaagagataacaccctgtctccaagacacaggctttacataaacagctttaatgacttcttcacttagggacaagactccttagtggtggaacctcaggcatccatgcaggatgtaagaaagctcccgtatatacatgaactgagaagtgtgtagaagagtaaatactgtaataggtaataaaatgtatgtatttttattt

SEQ ID NO: 291047 - DNA, 969 bp, Homo sapiens
ctgcagttgtttgggctgtcgctgtggctggttctgcggtgtgcggccagccatggagcgctctgggcccagcgaagtgacaggctcagacgcatcgggaccggacccgcagcttgtggtcaccatgggcttcacggggttcggggttcggtaaaaaagctcacacatttgacttggaagcaatgtttgaacaaactcaaagaacagctgtggaaagaagtcacaaaacactggggctggtgaattaccagatctccatcaagtgcagtaaccagttcaagttggaagtgtgtcttttgaatgcagaaaacaaagtcgtggacaaccaggctgggacccagggccagctgaaggtgctgggtgccaacctctggtggccgtacctgatgcacgaacaccccgcctacctgtactcgtgggaggatggtgattgctcacaccaaagccttggacccctcccagcctgtgacctttgtgaccaacgtcacctatgcagcagacaagggggctctgtatgtggatgtgatccgtgtgaacagctactactcttggtatcgcaactacgggcacctggagttgattcagctgcagctggccacccagtttgagaattggtgtaagacatcacaatcccattattcagagcgcgtatggagtggaaacgcttgtagggtttcaccagttctgcaggctggaaatccaagatgaagtcacctgtagttcagtgtctgcgtctaagagagcactttgttgctgcacccgccagagggaagaaatactgtatcttctcatgaaggaaggaaccgaaggtgggaatagggaccaacctccctttttcaagcctttttgtagtgacattaattcatttatgaggattccaccatcatgacataatcatttcccaaaggatttcacctcctcccactgttgcattggggattaattttccaacacatgaattttgaggga

SEQ ID NO: 291048 - DNA, 374 bp, Homo sapiens
tagggtagggatctagaggaggatgggaaagttgcctggttaatagtacttagtgaagggattgtcatcagaagttttctgtgactcaaactccttctgtgatattttatggttatattggagccatgctataaactagacaaagtaagtgtttattgatcagtattgatcacctaaagtttggccaacttactgcaagacaatcacagtctcccatttgttcatgttttaggtaaaaaagctcacacatttgacttggaagcaatgtttgaacaaactcaaagaacagctgtggaaagaagtcacaaaacactgggtaagaagttcagatatttgtcgttttattggtttaagtactatttatacctcatgca

SEQ ID NO: 291049 - DNA, 111 bp, Homo sapiens
cacaaaggtctagacttagataaaaccttctgtattgggaagtaattgtcatttcttggattaagacagctatgctcttgctcacagggcagaaagttatttctcaagaag

SEQ ID NO: 291050 - DNA, 944 bp, Homo sapiens
caggtgcggccgcgaccgtgggcggtggggcaggtgggtcaggcggcgcgtgccctgtcccctccccgggctccggccacacgagcgggccggcgctgcgctgctggcaacgtgtcgcgggaacgctcctaccccatctgcatgccttacatggctcgaaagtaaaaataaaaagaattacgctgcgggcgaggcttgtgggggtgagaagaggagattccacgtctccccagtgctgcgtcctgataggacccccagggccttccgagccctctcccagcgaccacctcgtgtcccggagttgcagcaagagatgtgagaaggtgtcaccctgaagaggaagtggtggaccagccctgcctgatgtggacagcaggggacacatgtctgcctgtcggtctatctgaaatgggggaaaaaatgctgaaagccaaaggagggcttaatgtggccttttccaccttctaattccatagaacctcagctctgggacttgcttcctgacctagggtgcaggggccaaatttgtttgggaacaaccccattcacaattccccatgaactttcagaaaggacccttgcgtcttaggtcctgagaagtcacaaataagcaagctgcattgtctaatgtcttgtctacactgttttacaaacacatttaacagccgaattgtatatgtgccctagaaatcactttgagaaacacttatttcctgatagaggacttgatgggaccattctgcagccccatctgagcatgggctggagagtacataagtatctgggagctggaagtcctcaattccaggcttatctgcccccatcagcgtgggacctcagttcctcctccaaggagaagagcgcccctcccttgatgttttgtgcattcttttgctaaatgtttctctggtcaagaactttaatccccctacaaaaaaaatgta

SEQ ID NO: 291051 - DNA, 1065 bp, Homo sapiens
cgagcggcgagaaattgtttccactgcaaacaaaaaaaggcgacacatgaccaggcaggaggaggggaagcgcggggagggaggagggcggagggagggacagagcggagggcggagggagccggagaaagggaaaacgtgggcggtggggcaggtgggtcaggcggcgcgtgccctgtcccctccccgggctccggccacacgagcgggccggcgctgcgctgctggcaacgtgtcgcgggaacgctcctaccccatctgcatgccttacatggctcgaaagtaaaaataaaaagaattacgctgcgggcgaggcttgtgggggtgagaagaggagattccacgtctccccagtgctgcgtcctgataggacccccagggccttccgagccctctcccagcgaccacctcgtgtcccggagttgcagcaagagatgtgagaaggtgtcaccctgaagaggaagtggtggaccagccctgcctgatgtggacagcaggggacacatgtctgcctgtcggtctatctgaaatgggggaaaaaatgctgaaagccaaaggagggcttaatgtggccttttccaccttctaattccatagaacctcagctctgggacttgcttcctgacctagggtgcaggggccaaatttgtttgggaacaaccccattcacaattccccatgaactttcagaaaggacccttgcgtcttaggtcctgagaagtcacaaataagcaagctgcattgtctaatgtcttgtctacactgttttacaaacacatttaacagccgaattgtatatgtgccctagaaatcactttgagaaacacttatttcctgatagaggacttgatgggaccattctgcagccccatctgagcatgggctggagagtacataagtatctgggagctggaagtcctcaattccaggcttatctgcccccatcagcgtgggacctcagttcctcctccaaggagaagagcgcccctcccttgatgttttgtgcattcttttgctaaatgtttctctggtcaagaactttaatccccctacaaaaaaaatgta

SEQ ID NO: 291052 - DNA, 671 bp, Homo sapiens
cgagcggcgagaaattgtttccactgcaaacaaaaaaaggcgacacatgaccaggcaggaggaggggaagcgcggggagggaggagggcggagggagggacagagcggagggcggagggagccggagaaagggaaaacgtgggcggtggggcaggtgggtcaggcggcgcgtgccctgtcccctccccgggctccggccacacgagcgggccggcgctgcgctgctggcaacgtgtcgcgggaacgctcctaccccatctgcatgccttacatggctcgaaagtaaaaataaaaagaattacgctgcgggcgaggcttgtgggggtgagaagaggagattccacgtctccccagtgctgcgtcctgataggacccccagggccttccgagccctctcccagcgaccacctcgtgtcccggaggtaagcaccgcagcgtcccacccaggtggccgcgtgtctcccgagggagggccggtggccattacaagacaagaggcaccgtcctaaaggccacgccggtggggcctctcaagtgggttgtgcggaacgccccggccggcctagagagaaaacaggtctcatttccatctcagtttgagctctcaggaaccagactgacaattcgcaagccacccagcgaaatggtgcagccaccactctaagtctcta

SEQ ID NO: 291053 - DNA, 523 bp, Homo sapiens
cgcaggtgaggcactgccctggcgctaggccggcaactggggtcggtgcgcgcgtgagcgcgttcgcgttcgaggtcccggctctaaggtgggggctgcacctccccctgcacgagcaggtgtgtaggattcaagagccagcgcaccacactgttctttctttctcacttctccccaagccagcattgaacttctttgcagttttattgagtcagaacttcaagtaggggttccccatattttaaactcttttctctgtggtatttgtcctgtaccagagtttttctctgaggtatatcctgtttatacctgtttacgtccaagagctcttcttttctctcaaaagacccttaaccctggataggaatcgattggccaacttaaaaaatttgctatggtttaggttggaagttttggcagacaaagcacagtaaaactggccactaaattgtgtctgaaacttactcatcaaaatagtgtgaataaaaacttatatgaatggtggtaatcttggaggtacatg

SEQ ID NO: 291054 - DNA, 1875 bp, Homo sapiens
cggaacttgtagtctcctcgtggctagttcaggcggaaggagcagtcctctgaagcttgaggagcctctagaactatgagcccgaggccttcccctctcccagagcgcagaggctttgaaggctacctctgggaagccgctcaccgtcggaagctgcgggagctgaaactgcgccatcgtcactgtcggcggccatgacaccgctcgtctcccgcctgagtcgtctgtgggccatcatgaggaagccacgagcagccgtgggaagtggtcacaggaagcaggcagccagccaggaagggaggcagaagcatgctaagaacaacagtcaggccaagccttctgcctgtgatggcctggccaggcagccggaagaggtggtattgcaggcctctgtctcctcataccatctattcagagacgtagctgaagtcacagccttccgagggagcctgctaagctggtacgaccaagagaaacgggacctaccatggagaagacgggcagaagatgagatggacctggacaggcgggcatatgctgtgtgggtctcagaggtcatgctgcagcagacccaggttgccactgtgatcaactactataccggatggatgcagaagtggcctacactgcaggacctggccagtgcttccctggaggaggtgaatcaactctgggctggcctgggctactattctcgtggccggcggctgcaggagggagctcggaaggtggtagaggagctagggggccacatgccacgtacagcagagaccctgcagcagctcctgcctggcgtggggcgctacacagctggggccattgcctctatcgcctttggccaggcaaccggtgtggtggatggcaacgtagcacgggtgctgtgccgtgtccgagccattggtgctgatcccagcagcacccttgtttcccagcagctctggggtctagcccagcagctggtggacccagcccggccaggagatttcaaccaagcagccatggagctaggggccacagtgtgtaccccacagcgcccactgtgcagccagtgccctgtggagagcctgtgccgggcacgccagagagtggagcaggaacagctcttagcctcagggagcctgtcgggcagtcctgacgtggaggagtgtgctcccaacactggacagtgccacctgtgcctgcctccctcggagccctgggaccagaccctgggagtggtcaacttccccagaaaggccagccgcaagccccccagggaggagagctctgccacctgtgttctggaacagcctggggcccttggggcccaaattctgctggtgcagaggcccaactcaggtctgctggcaggactgtgggagttcccgtccgtgacctgggagccctcagagcagcttcagcgcaaggccctgctgcaggaactacagcgttgggctgggcccctcccagccacgcacctccggcaccttggggaggttgtccacaccttctctcacatcaagctgacatatcaagtatatgggctggccttggaagggcagaccccagtgaccaccgtaccaccaggtgctcgctggctgacgcaggaggaatttcacaccgcagctgtttccaccgccatgaaaaaggttttccgtgtgtatcagggccaacagccagggacctgtatgggttccaaaaggtcccaggtgtcctctccgtgcagtcggaaaaagccccgcatgggccagcaagtcctggataatttctttcggtctcacatctccactgatgcacacagcctcaacagtgcagcccagtgacacctctgaaagcccccattccctgagaatcctgttgttagtaaagtgcttatttttgtagttaaaaaaagtt

SEQ ID NO: 291055 - DNA, 1907 bp, Homo sapiens
cggaacttgtagtctcctcgtggctagttcaggcggaaggagcagtcctctgaagcttgaggagcctctagaactatgagcccgaggccttcccctctcccagagcgcagaggctttgaaggctacctctgggaagccgctcaccgtcggaagctgcgggagctgaaactgcgccatcgtcactgtcggcggccatgacaccgctcgtctcccgcctgagtcgtctgtgggccatcatgaggaagccacgagcagccgtgggaagtggtcacaggaagcaggcagccagccaggaagggaggcagaagcatgctaagaacaacagtcaggccaagccttctgcctgtgatgggatgattgctgagtgtcctggggccccagcagcctggccaggcagccggaagaggtggtattgcaggcctctgtctcctcataccatctattcagagacgtagctgaagtcacagccttccgagggagcctgctaagctggtacgaccaagagaaacgggacctaccatggagaagacgggcagaagatgagatggacctggacaggcgggcatatgctgtgtgggtctcagaggtcatgctgcagcagacccaggttgccactgtgatcaactactataccggatggatgcagaagtggcctacactgcaggacctggccagtgcttccctggaggaggtgaatcaactctgggctggcctgggctactattctcgtggccggcggctgcaggagggagctcggaaggtggtagaggagctagggggccacatgccacgtacagcagagaccctgcagcagctcctgcctggcgtggggcgctacacagctggggccattgcctctatcgcctttggccaggcaaccggtgtggtggatggcaacgtagcacgggtgctgtgccgtgtccgagccattggtgctgatcccagcagcacccttgtttcccagcagctctggggtctagcccagcagctggtggacccagcccggccaggagatttcaaccaagcagccatggagctaggggccacagtgtgtaccccacagcgcccactgtgcagccagtgccctgtggagagcctgtgccgggcacgccagagagtggagcaggaacagctcttagcctcagggagcctgtcgggcagtcctgacgtggaggagtgtgctcccaacactggacagtgccacctgtgcctgcctccctcggagccctgggaccagaccctgggagtggtcaacttccccagaaaggccagccgcaagccccccagggaggagagctctgccacctgtgttctggaacagcctggggcccttggggcccaaattctgctggtgcagaggcccaactcaggtctgctggcaggactgtgggagttcccgtccgtgacctgggagccctcagagcagcttcagcgcaaggccctgctgcaggaactacagcgttgggctgggcccctcccagccacgcacctccggcaccttggggaggttgtccacaccttctctcacatcaagctgacatatcaagtatatgggctggccttggaagggcagaccccagtgaccaccgtaccaccaggtgctcgctggctgacgcaggaggaatttcacaccgcagctgtttccaccgccatgaaaaaggttttccgtgtgtatcagggccaacagccagggacctgtatgggttccaaaaggtcccaggtgtcctctccgtgcagtcggaaaaagccccgcatgggccagcaagtcctggataatttctttcggtctcacatctccactgatgcacacagcctcaacagtgcagcccagtgacacctctgaaagcccccattccctgagaatcctgttgttagtaaagtgcttatttttgtagttaaaaaaagtt

SEQ ID NO: 291056 - DNA, 1697 bp, Homo sapiens
agcctggcgcgcgctaattgcctattggcctgtgctgccggctcgcagcccgggtggacccgagccacgccccctggagtgcgccggaaagccgggcgcgctagagctcgcgggaggccatcatgaggaagccacgagcagccgtgggaagtggtcacaggaagcaggcagccagccaggaagggaggcagaagcatgctaagaacaacagtcaggccaagccttctgcctgtgatgagacgtagctgaagtcacagccttccgagggagcctgctaagctggtacgaccaagagaaacgggacctaccatggagaagacgggcagaagatgagatggacctggacaggcgggcatatgctgtgtgggtctcagaggtcatgctgcagcagacccaggttgccactgtgatcaactactataccggatggatgcagaagtggcctacactgcaggacctggccagtgcttccctggaggaggtgaatcaactctgggctggcctgggctactattctcgtggccggcggctgcaggagggagctcggaaggtggtagaggagctagggggccacatgccacgtacagcagagaccctgcagcagctcctgcctggcgtggggcgctacacagctggggccattgcctctatcgcctttggccaggcaaccggtgtggtggatggcaacgtagcacgggtgctgtgccgtgtccgagccattggtgctgatcccagcagcacccttgtttcccagcagctctggggtctagcccagcagctggtggacccagcccggccaggagatttcaaccaagcagccatggagctaggggccacagtgtgtaccccacagcgcccactgtgcagccagtgccctgtggagagcctgtgccgggcacgccagagagtggagcaggaacagctcttagcctcagggagcctgtcgggcagtcctgacgtggaggagtgtgctcccaacactggacagtgccacctgtgcctgcctccctcggagccctgggaccagaccctgggagtggtcaacttccccagaaaggccagccgcaagccccccagggaggagagctctgccacctgtgttctggaacagcctggggcccttggggcccaaattctgctggtgcagaggcccaactcaggtctgctggcaggactgtgggagttcccgtccgtgacctgggagccctcagagcagcttcagcgcaaggccctgctgcaggaactacagcgttgggctgggcccctcccagccacgcacctccggcaccttggggaggttgtccacaccttctctcacatcaagctgacatatcaagtatatgggctggccttggaagggcagaccccagtgaccaccgtaccaccaggtgctcgctggctgacgcaggaggaatttcacaccgcagctgtttccaccgccatgaaaaaggttttccgtgtgtatcagggccaacagccagggacctgtatgggttccaaaaggtcccaggtgtcctctccgtgcagtcggaaaaagccccgcatgggccagcaagtcctggataatttctttcggtctcacatctccactgatgcacacagcctcaacagtgcagcccagtgacacctctgaaagcccccattccctgagaatcctgttgttagtaaagtgcttatttttgtagttaaaaaaagtt

SEQ ID NO: 291057 - DNA, 1811 bp, Homo sapiens
cggaacttgtagtctcctcgtggctagttcaggcggaaggagcagtcctctgaagcttgaggagcctctagaactatgagcccgaggccttcccctctcccagagcgcagaggctttgaaggctacctctgggaagccgctcaccgtcggaagctgcgggagctgaaactgcgccatcgtcactgtcggcggccatgacaccgctcgtctcccgcctgagtcgtctgtgggccatcatgaggaagccacgagcagccgtgggaagtggtcacaggaagcaggcagccagccaggaagggaggcagaagcatgctaagaacaacagtcaggccaagccttctgcctgtgatgagacgtagctgaagtcacagccttccgagggagcctgctaagctggtacgaccaagagaaacgggacctaccatggagaagacgggcagaagatgagatggacctggacaggcgggcatatgctgtgtgggtctcagaggtcatgctgcagcagacccaggttgccactgtgatcaactactataccggatggatgcagaagtggcctacactgcaggacctggccagtgcttccctggaggaggtgaatcaactctgggctggcctgggctactattctcgtggccggcggctgcaggagggagctcggaaggtggtagaggagctagggggccacatgccacgtacagcagagaccctgcagcagctcctgcctggcgtggggcgctacacagctggggccattgcctctatcgcctttggccaggcaaccggtgtggtggatggcaacgtagcacgggtgctgtgccgtgtccgagccattggtgctgatcccagcagcacccttgtttcccagcagctctggggtctagcccagcagctggtggacccagcccggccaggagatttcaaccaagcagccatggagctaggggccacagtgtgtaccccacagcgcccactgtgcagccagtgccctgtggagagcctgtgccgggcacgccagagagtggagcaggaacagctcttagcctcagggagcctgtcgggcagtcctgacgtggaggagtgtgctcccaacactggacagtgccacctgtgcctgcctccctcggagccctgggaccagaccctgggagtggtcaacttccccagaaaggccagccgcaagccccccagggaggagagctctgccacctgtgttctggaacagcctggggcccttggggcccaaattctgctggtgcagaggcccaactcaggtctgctggcaggactgtgggagttcccgtccgtgacctgggagccctcagagcagcttcagcgcaaggccctgctgcaggaactacagcgttgggctgggcccctcccagccacgcacctccggcaccttggggaggttgtccacaccttctctcacatcaagctgacatatcaagtatatgggctggccttggaagggcagaccccagtgaccaccgtaccaccaggtgctcgctggctgacgcaggaggaatttcacaccgcagctgtttccaccgccatgaaaaaggttttccgtgtgtatcagggccaacagccagggacctgtatgggttccaaaaggtcccaggtgtcctctccgtgcagtcggaaaaagccccgcatgggccagcaagtcctggataatttctttcggtctcacatctccactgatgcacacagcctcaacagtgcagcccagtgacacctctgaaagcccccattccctgagaatcctgttgttagtaaagtgcttatttttgtagttaaaaaaagtt

SEQ ID NO: 291058 - DNA, 383 bp, Homo sapiens
agccttttggagggttgattgatggggcagatacttgaggcaggatgaaagctctacagcattccaggctaagcctagctagatcagtagagtcggggaaagggagagaggacaaggagaggattctctgctccccctcccccaactacaaggcctccctccttccattttttcacagggttccaaaaggtcccaggtgtcctctccgtgcagtcggaaaaagccccgcatgggccagcaagtcctggataatttctttcggtctcacatctccactgatgcacacagcctcaacagtgcagcccagtgacacctctgaaagcccccattccctgagaatcctgttgttagtaaagtgcttatttttgtagttaaaaaaagtt

SEQ ID NO: 291059 - DNA, 501 bp, Homo sapiens
  misc_feature (14)..(14): n is a, c, g, or t
  misc_feature (18)..(18): n is a, c, g, or t
  misc_feature (20)..(20): n is a, c, g, or t
  misc_feature (25)..(26): n is a, c, g, or t
gcgggccccgcccncccncncctcnncttccaacctttctttttttccctctcccaccattccgccggagttgacaccaccacgcgtgtcacggctcacagccagggacctgtatgtagagacagggtttcaccatgttgactaggctggtctcgaactcctgacctcaagtgatctgcccatcttggcctcccaaagtgctgggattacaggcgtgagccaccacacccatccatgggagctatcagttctaattgggagacggatcaggaaaggctgtttggaggaagcagctgggttccaaaaggtcccaggtgtcctctccgtgcagtcggaaaaagccccgcatgggccagcaagtcctggataatttctttcggtctcacatctccactgatgcacacagcctcaacagtgcagcccagtgacacctctgaaagcccccattccctgagaatcctgttgttagtaaagtgcttatttttgtagttaaaaaaagtt

SEQ ID NO: 291060 - DNA, 2048 bp, Homo sapiens
cggaacttgtagtctcctcgtggctagttcaggcggaaggagcagtcctctgaagcttgaggagcctctagaactatgagcccgaggccttcccctctcccagagcgcagaggctttgaaggctacctctgggaagccgctcaccgtcggaagctgcgggagctgaaactgcgccatcgtcactgtcggcggccatgacaccgctcgtctcccgcctgagtcgtctgtgggccatcatgaggaagccacgagcagccgtgggaagtggtcacaggaagcaggcagccagccaggaagggaggcagaagcatgctaagaacaacagtcaggccaagccttctgcctgtgatggcctggccaggcagccggaagaggtggtattgcaggcctctgtctcctcataccatctattcagagacgtagctgaagtcacagccttccgagggagcctgctaagctggtacgaccaagagaaacgggacctaccatggagaagacgggcagaagatgagatggacctggacaggcgggcatatgctgtgtgggtctcagaggtcatgctgcagcagacccaggttgccactgtgatcaactactataccggatggatgcagaagtggcctacactgcaggacctggccagtgcttccctggaggaggtgaatcaactctgggctggcctgggctactattctcgtggccggcggctgcaggagggagctcggaaggtggtagaggagctagggggccacatgccacgtacagcagagaccctgcagcagctcctgcctggcgtggggcgctacacagctggggccattgcctctatcgcctttggccaggcaaccggtgtggtggatggcaacgtagcacgggtgctgtgccgtgtccgagccattggtgctgatcccagcagcacccttgtttcccagcagctctggggtctagcccagcagctggtggacccagcccggccaggagatttcaaccaagcagccatggagctaggggccacagtgtgtaccccacagcgcccactgtgcagccagtgccctgtggagagcctgtgccgggcacgccagagagtggagcaggaacagctcttagcctcagggagcctgtcgggcagtcctgacgtggaggagtgtggtgagcaccaaacctagcccccaccccaacccttcctggcccagtcagaagccccattccagttcttcctctaacctgagtaagattctgcagaacccggccaaagcccactctctaggttggcccctaaagccctcttggcttgagtagggttcggggatctccgttcccagctcccaacactggacagtgccacctgtgcctgcctccctcggagccctgggaccagaccctgggagtggtcaacttccccagaaaggccagccgcaagccccccagggaggagagctctgccacctgtgttctggaacagcctggggcccttggggcccaaattctgctggtgcagaggcccaactcaggtctgctggcaggactgtgggagttcccgtccgtgacctgggagccctcagagcagcttcagcgcaaggccctgctgcaggaactacagcgttgggctgggcccctcccagccacgcacctccggcaccttggggaggttgtccacaccttctctcacatcaagctgacatatcaagtatatgggctggccttggaagggcagaccccagtgaccaccgtaccaccaggtgctcgctggctgacgcaggaggaatttcacaccgcagctgtttccaccgccatgaaaaaggttttccgtgtgtatcagggccaacagccagggacctgtatgggttccaaaaggtcccaggtgtcctctccgtgcagtcggaaaaagccccgcatgggccagcaagtcctggataatttctttcggtctcacatctccactgatgcacacagcctcaacagtgcagcccagtgacacctctgaaagcccccattccctgagaatcctgttgttagtaaagtgcttatttttgtagttaaaaaaagtt

SEQ ID NO: 291061 - DNA, 1898 bp, Homo sapiens
cggaacttgtagtctcctcgtggctagttcaggcggaaggagcagtcctctgaagcttgaggagcctctagaactatgagcccgaggccttcccctctcccagagcgcagaggctttgaaggctacctctgggaagccgctcaccgtcggaagctgcgggagctgaaactgcgccatcgtcactgtcggcggccatgacaccgctcgtctcccgcctgagtcgtctgtgggccatcatgaggaagccacgagcagccgtgggaagtggtcacaggaagcaggcagccagccaggaagggaggcagaagcatgctaagaacaacagtcaggccaagccttctgcctgtgatggcctggccaggcagccggaagaggtggtattgcaggcctctgtctcctcataccatctattcagagacgtagctgaagtcacagccttccgagggagcctgctaagctggtacgaccaagagaaacgggacctaccatggagaagacgggcagaagatgagatggacctggacaggcgggcatatgctgtgtgggtctcagaggtcatgctgcagcagacccaggttgccactgtgatcaactactataccggatggatgcagaagtggcctacactgcaggacctggccagtgcttccctggaggaggtgaatcaactctgggctggcctgggctactattctcgtggccggcggctgcaggagggagctcggaaggtggtagaggagctagggggccacatgccacgtacagcagagaccctgcagcagctcctgcctggcgtggggcgctacacagctggggccattgcctctatcgcctttggccaggcaaccggtgtggtggatggcaacgtagcacgggtgctgtgccgtgtccgagccattggtgctgatcccagcagcacccttgtttcccagcagctctggggtctagcccagcagctggtggacccagcccggccaggagatttcaaccaagcagccatggagctaggggccacagtgtgtaccccacagcgcccactgtgcagccagtgccctgtggagagcctgtgccgggcacgccagagagtggagcaggaacagctcttagcctcagggagcctgtcgggcagtcctgacgtggaggagtgtgggttcggggatctccgttcccagctcccaacactggacagtgccacctgtgcctgcctccctcggagccctgggaccagaccctgggagtggtcaacttccccagaaaggccagccgcaagccccccagggaggagagctctgccacctgtgttctggaacagcctggggcccttggggcccaaattctgctggtgcagaggcccaactcaggtctgctggcaggactgtgggagttcccgtccgtgacctgggagccctcagagcagcttcagcgcaaggccctgctgcaggaactacagcgttgggctgggcccctcccagccacgcacctccggcaccttggggaggttgtccacaccttctctcacatcaagctgacatatcaagtatatgggctggccttggaagggcagaccccagtgaccaccgtaccaccaggtgctcgctggctgacgcaggaggaatttcacaccgcagctgtttccaccgccatgaaaaaggttttccgtgtgtatcagggccaacagccagggacctgtatgggttccaaaaggtcccaggtgtcctctccgtgcagtcggaaaaagccccgcatgggccagcaagtcctggataatttctttcggtctcacatctccactgatgcacacagcctcaacagtgcagcccagtgacacctctgaaagcccccattccctgagaatcctgttgttagtaaagtgcttatttttgtagttaaaaaaagtt

SEQ ID NO: 291062 - DNA, 2126 bp, Homo sapiens
cggaacttgtagtctcctcgtggctagttcaggcggaaggagcagtcctctgaagcttgaggagcctctagaactatgagcccgaggccttcccctctcccagagcgcagaggctttgaaggctacctctgggaagccgctcaccgtcggaagctgcgggagctgaaactgcgccatcgtcactgtcggcggccatgacaccgctcgtctcccgcctgagtcgtctgtgggccatcatgaggaagccacgagcagccgtgggaagtggtcacaggaagcaggcagccagccaggaagggaggcagaagcatgctaagaacaacagtcaggccaagccttctgcctgtgatggcctggccaggcagccggaagaggtggtattgcaggcctctgtctcctcataccatctattcagagacgtagctgaagtcacagccttccgagggagcctgctaagctggtacgaccaagagaaacgggacctaccatggagaagacgggcagaagatgagatggacctggacaggcgggcatatgctggtcagtacatctcctgagagcagggccactttgcctcgaggcccttgggtctgggggctgtgggccaggtaggggcaggtcagcagtgtcctcatgccaacccctttcccccagtgtgggtctcagaggtcatgctgcagcagacccaggttgccactgtgatcaactactataccggatggatgcaggtgactccaggggaggaagggaagggtcatgggtcagaccccagatgagagcctctactttggggtgggtgtagagaaggcttcctctaccaccttcacccttgaccttgtctctttctgcctgcctgtggctatagaagtggcctacactgcaggacctggccagtgcttccctggaggaggtgaatcaactctgggctggcctgggctactattctcgtggccggcggctgcaggagggagctcggaaggtggtagaggagctagggggccacatgccacgtacagcagagaccctgcagcagctcctgcctggcgtggggcgctacacagctggggccattgcctctatcgcctttggccaggcaaccggtgtggtggatggcaacgtagcacgggtgctgtgccgtgtccgagccattggtgctgatcccagcagcacccttgtttcccagcagctctggggtctagcccagcagctggtggacccagcccggccaggagatttcaaccaagcagccatggagctaggggccacagtgtgtaccccacagcgcccactgtgcagccagtgccctgtggagagcctgtgccgggcacgccagagagtggagcaggaacagctcttagcctcagggagcctgtcgggcagtcctgacgtggaggagtgtgctcccaacactggacagtgccacctgtgcctgcctccctcggagccctgggaccagaccctgggagtggtcaacttccccagaaaggccagccgcaagccccccagggaggagagctctgccacctgtgttctggaacagcctggggcccttggggcccaaattctgctggtgcagaggcccaactcaggtctgctggcaggactgtgggagttcccgtccgtgacctgggagccctcagagcagcttcagcgcaaggccctgctgcaggaactacagcgttgggctgggcccctcccagccacgcacctccggcaccttggggaggttgtccacaccttctctcacatcaagctgacatatcaagtatatgggctggccttggaagggcagaccccagtgaccaccgtaccaccaggtgctcgctggctgacgcaggaggaatttcacaccgcagctgtttccaccgccatgaaaaaggttttccgtgtgtatcagggccaacagccagggacctgtatgggttccaaaaggtcccaggtgtcctctccgtgcagtcggaaaaagccccgcatgggccagcaagtcctggataatttctttcggtctcacatctccactgatgcacacagcctcaacagtgcagcccagtgacacctctgaaagcccccattccctgagaatcctgttgttagtaaagtgcttatttttgtagttaaaaaaagtt

SEQ ID NO: 291063 - DNA, 2284 bp, Homo sapiens
cggaacttgtagtctcctcgtggctagttcaggcggaaggagcagtcctctgaagcttgaggagcctctagaactatgagcccgaggccttcccctctcccagagcgcagaggctttgaaggctacctctgggaagccgctcaccgtcggaagctgcgggagctgaaactgcgccatcgtcactgtcggcggccatgacaccgctcgtctcccgcctgagtcgtctgtgggccatcatgaggaagccacgagcagccgtgggaagtggtcacaggaagcaggcagccagccaggaagggaggcagaagcatgctaagaacaacagtcaggccaagccttctgcctgtgatggcctggccaggcagccggaagaggtggtattgcaggcctctgtctcctcataccatctattcagagacgtagctgaagtcacagccttccgagggagcctgctaagctggtacgaccaagagaaacgggacctaccatggagaagacgggcagaagatgagatggacctggacaggcgggcatatgctggtcagtacatctcctgagagcagggccactttgcctcgaggcccttgggtctgggggctgtgggccaggtaggggcaggtcagcagtgtcctcatgccaacccctttcccccagtgtgggtctcagaggtcatgctgcagcagacccaggttgccactgtgatcaactactataccggatggatgcaggtgactccaggggaggaagggaagggtcatgggtcagaccccagatgagagcctctactttggggtgggtgtagagaaggcttcctctaccaccttcacccttgaccttgtctctttctgcctgcctgtggctatagaagtggcctacactgcaggacctggccagtgcttccctggaggtgagagccaccctagggtaggggaaataggaacgatagagggactgacgggtgatctctttgacctctgatcctacccacaggaggtgaatcaactctgggctggcctgggctactattctcgtggccggcggctgcaggagggagctcggaaggtaaggggatggcaggagggtaggaacccaggagtcttgggtgtcttataatcttgagtcttgcactccaatcaggtggtagaggagctagggggccacatgccacgtacagcagagaccctgcagcagctcctgcctggcgtggggcgctacacagctggggccattgcctctatcgcctttggccaggcaaccggtgtggtggatggcaacgtagcacgggtgctgtgccgtgtccgagccattggtgctgatcccagcagcacccttgtttcccagcagctctggggtctagcccagcagctggtggacccagcccggccaggagatttcaaccaagcagccatggagctaggggccacagtgtgtaccccacagcgcccactgtgcagccagtgccctgtggagagcctgtgccgggcacgccagagagtggagcaggaacagctcttagcctcagggagcctgtcgggcagtcctgacgtggaggagtgtgctcccaacactggacagtgccacctgtgcctgcctccctcggagccctgggaccagaccctgggagtggtcaacttccccagaaaggccagccgcaagccccccagggaggagagctctgccacctgtgttctggaacagcctggggcccttggggcccaaattctgctggtgcagaggcccaactcaggtctgctggcaggactgtgggagttcccgtccgtgacctgggagccctcagagcagcttcagcgcaaggccctgctgcaggaactacagcgttgggctgggcccctcccagccacgcacctccggcaccttggggaggttgtccacaccttctctcacatcaagctgacatatcaagtatatgggctggccttggaagggcagaccccagtgaccaccgtaccaccaggtgctcgctggctgacgcaggaggaatttcacaccgcagctgtttccaccgccatgaaaaaggttttccgtgtgtatcagggccaacagccagggacctgtatgggttccaaaaggtcccaggtgtcctctccgtgcagtcggaaaaagccccgcatgggccagcaagtcctggataatttctttcggtctcacatctccactgatgcacacagcctcaacagtgcagcccagtgacacctctgaaagcccccattccctgagaatcctgttgttagtaaagtgcttatttttgtagttaaaaaaagtt

SEQ ID NO: 291064 - DNA, 2268 bp, Homo sapiens
cggaacttgtagtctcctcgtggctagttcaggcggaaggagcagtcctctgaagcttgaggagcctctagaactatgagcccgaggccttcccctctcccagagcgcagaggctttgaaggctacctctgggaagccgctcaccgtcggaagctgcgggagctgaaactgcgccatcgtcactgtcggcggccatgacaccgctcgtctcccgcctgagtcgtctgtgggccatcatgaggaagccacgagcagccgtgggaagtggtcacaggaagcaggcagccagccaggaagggaggcagaagcatgctaagaacaacagtcaggccaagccttctgcctgtgatggcctggccaggcagccggaagaggtggtattgcaggcctctgtctcctcataccatctattcagagacgtagctgaagtcacagccttccgagggagcctgctaagctggtacgaccaagagaaacgggacctaccatggagaagacgggcagaagatgagatggacctggacaggcgggcatatgctgtgtgggtctcagaggtcatgctgcagcagacccaggttgccactgtgatcaactactataccggatggatgcaggtgactccaggggaggaagggaagggtcatgggtcagaccccagatgagagcctctactttggggtgggtgtagagaaggcttcctctaccaccttcacccttgaccttgtctctttctgcctgcctgtggctatagaagtggcctacactgcaggacctggccagtgcttccctggaggtgagagccaccctagggtaggggaaataggaacgatagagggactgacgggtgatctctttgacctctgatcctacccacaggaggtgaatcaactctgggctggcctgggctactattctcgtggccggcggctgcaggagggagctcggaaggtggtagaggagctagggggccacatgccacgtacagcagagaccctgcagcagctcctgcctggcgtggggcgctacacagctggggccattgcctctatcgcctttggccaggcaaccggtgtggtggatggcaacgtagcacgggtgctgtgccgtgtccgagccattggtgctgatcccagcagcacccttgtttcccagcagctctggggtctagcccagcagctggtggacccagcccggccaggagatttcaaccaagcagccatggagctaggggccacagtgtgtaccccacagcgcccactgtgcagccagtgccctgtggagagcctgtgccgggcacgccagagagtggagcaggaacagctcttagcctcagggagcctgtcgggcagtcctgacgtggaggagtgtggtgagcaccaaacctagcccccaccccaacccttcctggcccagtcagaagccccattccagttcttcctctaacctgagtaagattctgcagaacccggccaaagcccactctctaggttggcccctaaagccctcttggcttgagtagggttcggggatctccgttcccagctcccaacactggacagtgccacctgtgcctgcctccctcggagccctgggaccagaccctgggagtggtcaacttccccagaaaggccagccgcaagccccccagggaggagagctctgccacctgtgttctggaacagcctggggcccttggggcccaaattctgctggtgcagaggcccaactcaggtctgctggcaggactgtgggagttcccgtccgtgacctgggagccctcagagcagcttcagcgcaaggccctgctgcaggaactacagcgttgggctgggcccctcccagccacgcacctccggcaccttggggaggttgtccacaccttctctcacatcaagctgacatatcaagtatatgggctggccttggaagggcagaccccagtgaccaccgtaccaccaggtgctcgctggctgacgcaggaggaatttcacaccgcagctgtttccaccgccatgaaaaaggttttccgtgtgtatcagggccaacagccagggacctgtatgggttccaaaaggtcccaggtgtcctctccgtgcagtcggaaaaagccccgcatgggccagcaagtcctggataatttctttcggtctcacatctccactgatgcacacagcctcaacagtgcagcccagtgacacctctgaaagcccccattccctgagaatcctgttgttagtaaagtgcttatttttgtagttaaaaaaagtt

SEQ ID NO: 291065 - DNA, 2135 bp, Homo sapiens
cggaacttgtagtctcctcgtggctagttcaggcggaaggagcagtcctctgaagcttgaggagcctctagaactatgagcccgaggccttcccctctcccagagcgcagaggctttgaaggctacctctgggaagccgctcaccgtcggaagctgcgggagctgaaactgcgccatcgtcactgtcggcggccatgacaccgctcgtctcccgcctgagtcgtctgtgggccatcatgaggaagccacgagcagccgtgggaagtggtcacaggaagcaggcagccagccaggaagggaggcagaagcatgctaagaacaacagtcaggccaagccttctgcctgtgatggcagaagatgagatggacctggacaggcgggcatatgctggtcagtacatctcctgagagcagggccactttgcctcgaggcccttgggtctgggggctgtgggccaggtaggggcaggtcagcagtgtcctcatgccaacccctttcccccagtgtgggtctcagaggtcatgctgcagcagacccaggttgccactgtgatcaactactataccggatggatgcaggtgactccaggggaggaagggaagggtcatgggtcagaccccagatgagagcctctactttggggtgggtgtagagaaggcttcctctaccaccttcacccttgaccttgtctctttctgcctgcctgtggctatagaagtggcctacactgcaggacctggccagtgcttccctggaggtgagagccaccctagggtaggggaaataggaacgatagagggactgacgggtgatctctttgacctctgatcctacccacaggaggtgaatcaactctgggctggcctgggctactattctcgtggccggcggctgcaggagggagctcggaaggtaaggggatggcaggagggtaggaacccaggagtcttgggtgtcttataatcttgagtcttgcactccaatcaggtggtagaggagctagggggccacatgccacgtacagcagagaccctgcagcagctcctgcctggcgtggggcgctacacagctggggccattgcctctatcgcctttggccaggcaaccggtgtggtggatggcaacgtagcacgggtgctgtgccgtgtccgagccattggtgctgatcccagcagcacccttgtttcccagcagctctggggtctagcccagcagctggtggacccagcccggccaggagatttcaaccaagcagccatggagctaggggccacagtgtgtaccccacagcgcccactgtgcagccagtgccctgtggagagcctgtgccgggcacgccagagagtggagcaggaacagctcttagcctcagggagcctgtcgggcagtcctgacgtggaggagtgtgctcccaacactggacagtgccacctgtgcctgcctccctcggagccctgggaccagaccctgggagtggtcaacttccccagaaaggccagccgcaagccccccagggaggagagctctgccacctgtgttctggaacagcctggggcccttggggcccaaattctgctggtgcagaggcccaactcaggtctgctggcaggactgtgggagttcccgtccgtgacctgggagccctcagagcagcttcagcgcaaggccctgctgcaggaactacagcgttgggctgggcccctcccagccacgcacctccggcaccttggggaggttgtccacaccttctctcacatcaagctgacatatcaagtatatgggctggccttggaagggcagaccccagtgaccaccgtaccaccaggtgctcgctggctgacgcaggaggaatttcacaccgcagctgtttccaccgccatgaaaaaggttttccgtgtgtatcagggccaacagccagggacctgtatgggttccaaaaggtcccaggtgtcctctccgtgcagtcggaaaaagccccgcatgggccagcaagtcctggataatttctttcggtctcacatctccactgatgcacacagcctcaacagtgcagcccagtgacacctctgaaagcccccattccctgagaatcctgttgttagtaaagtgcttatttttgtagttaaaaaaagtt

SEQ ID NO: 291066 - DNA, 1449 bp, Homo sapiens
cggaacttgtagtctcctcgtggctagttcaggcggaaggagcagtcctctgaagcttgaggagcctctagaactatgagcccgaggccttcccctctcccagagcgcagaggctttgaaggctacctctgggaagccgctcaccgtcggaagctgcgggagctgaaactgcgccatcgtcactgtcggcggccatgacaccgctcgtctcccgcctgagtcgtctgtgggaggtgaatcaactctgggctggcctgggctactattctcgtggccggcggctgcaggagggagctcggaaggtggtagaggagctagggggccacatgccacgtacagcagagaccctgcagcagctcctgcctggcgtggggcgctacacagctggggccattgcctctatcgcctttggccaggcaaccggtgtggtggatggcaacgtagcacgggtgctgtgccgtgtccgagccattggtgctgatcccagcagcacccttgtttcccagcagctctggggtctagcccagcagctggtggacccagcccggccaggagatttcaaccaagcagccatggagctaggggccacagtgtgtaccccacagcgcccactgtgcagccagtgccctgtggagagcctgtgccgggcacgccagagagtggagcaggaacagctcttagcctcagggagcctgtcgggcagtcctgacgtggaggagtgtgctcccaacactggacagtgccacctgtgcctgcctccctcggagccctgggaccagaccctgggagtggtcaacttccccagaaaggccagccgcaagccccccagggaggagagctctgccacctgtgttctggaacagcctggggcccttggggcccaaattctgctggtgcagaggcccaactcaggtctgctggcaggactgtgggagttcccgtccgtgacctgggagccctcagagcagcttcagcgcaaggccctgctgcaggaactacagcgttgggctgggcccctcccagccacgcacctccggcaccttggggaggttgtccacaccttctctcacatcaagctgacatatcaagtatatgggctggccttggaagggcagaccccagtgaccaccgtaccaccaggtgctcgctggctgacgcaggaggaatttcacaccgcagctgtttccaccgccatgaaaaaggttttccgtgtgtatcagggccaacagccagggacctgtatgggttccaaaaggtcccaggtgtcctctccgtgcagtcggaaaaagccccgcatgggccagcaagtcctggataatttctttcggtctcacatctccactgatgcacacagcctcaacagtgcagcccagtgacacctctgaaagcccccattccctgagaatcctgttgttagtaaagtgcttatttttgtagttaaaaaaagtt

SEQ ID NO: 291067 - DNA, 1004 bp, Homo sapiens
gggtaacaagggtgcttcaggggtgtctgcaaaggagctctgcttcacagcagtgttcccttcttttaggggtctagcccagcagctggtggacccagcccggccaggagatttcaaccaagcagccatggagctaggggccacagtgtgtaccccacagcgcccactgtgcagccagtgccctgtggagagcctgtgccgggcacgccagagagtggagcaggaacagctcttagcctcagggagcctgtcgggcagtcctgacgtggaggagtgtgctcccaacactggacagtgccacctgtgcctgcctccctcggagccctgggaccagaccctgggagtggtcaacttccccagaaaggccagccgcaagccccccagggaggagagctctgccacctgtgttctggaacagcctggggcccttggggcccaaattctgctggtgcagaggcccaactcaggtctgctggcaggactgtgggagttcccgtccgtgacctgggagccctcagagcagcttcagcgcaaggccctgctgcaggaactacagcgttgggctgggcccctcccagccacgcacctccggcaccttggggaggttgtccacaccttctctcacatcaagctgacatatcaagtatatgggctggccttggaagggcagaccccagtgaccaccgtaccaccaggtgctcgctggctgacgcaggaggaatttcacaccgcagctgtttccaccgccatgaaaaaggttttccgtgtgtatcagggccaacagccagggacctgtatgggttccaaaaggtcccaggtgtcctctccgtgcagtcggaaaaagccccgcatgggccagcaagtcctggataatttctttcggtctcacatctccactgatgcacacagcctcaacagtgcagcccagtgacacctctgaaagcccccattccctgagaatcctgttgttagtaaagtgcttatttttgtagttaaaaaaagtt

SEQ ID NO: 291068 - DNA, 1821 bp, Homo sapiens
cggaacttgtagtctcctcgtggctagttcaggcggaaggagcagtcctctgaagcttgaggagcctctagaactatgagcccgaggccttcccctctcccagagcgcagaggctttgaaggctacctctgggaagccgctcaccgtcggaagctgcgggagctgaaactgcgccatcgtcactgtcggcggccatgacaccgctcgtctcccgcctgagtcgtctgtgggccatcatgaggaagccacgagcagccgtgggaagtggtcacaggaagcaggcagccagccaggaagggaggcagaagcatgctaagaacaacagtcaggccaagccttctgcctgtgatggcctggccaggcagccggaagaggtggtattgcaggcctctgtctcctcataccatctattcagagacgtagctgaagtcacagccttccgagggagcctgctaagctggtacgaccaagagaaacgggacctaccatggagaagacgggcagaagatgagatggacctggacaggcgggcatatgctgtgtgggtctcagaggtcatgctgcagcagacccaggttgccactgtgatcaactactataccggatggatgcagaagtggcctacactgcaggacctggccagtgcttccctggaggaggtgaatcaactctgggctggcctgggctactattctcgtggccggcggctgcaggagggagctcggaaggtggtagaggagctagggggccacatgccacgtacagcagagaccctgcagcagctcctgcctggcgtggggcgctacacagctggggccattgcctctatcgcctttggccaggcaaccggtgtggtggatggcaacgtagcacgggtgctgtgccgtgtccgagccattggtgctgatcccagcagcacccttgtttcccagcagctctggggtctagcccagcagctggtggacccagcccggccaggagatttcaaccaagcagccatggagctaggggccacagtgtgtaccccacagcgcccactgtgcagccagtgccctgtggagagcctgtgccgggcacgccagagagtggagcaggaacagctcttagcctcagggagcctgtcgggcagtcctgacgtggaggagtgtgctcccaacactggacagtgccacctgtgcctgcctccctcggagccctgggaccagaccctgggagtggtcaacttccccagaaaggccagccgcaagccccccagggaggagagctctgccacctgtgttctggaacagcctggggcccttggggcccaaattctgctggtgcagaggcccaactcaggtctgctggcaggactgtgggagttcccgtccgtgacctgggagccctcagagcagcttcagcgcaaggccctgctgcaggaactacagcgttgggctgggcccctcccagccacgcacctccggcaccttggggaggttgtccacaccttctctcacatcaagctgacatatcaagtatatgggctggccttggaagggcagaccccagtgaccaccgtaccaccaggtgctcgctggctgacgcaggaggaatttcacaccgcagctgtttccaccgccatgaaaaaggttttccgtgtgtatcagggccaacagccagggacctgtatgggttccaaaaggtcccaggtgtcctctccgtgcagtcggaccactgatgcacacagcctcaacagtgcagcccagtgacacctctgaaagcccccattccctgagaatcctgttgttagtaaagtgcttatttttgtagttaaaaaaagtt

SEQ ID NO: 291069 - DNA, 1713 bp, Homo sapiens
cggaacttgtagtctcctcgtggctagttcaggcggaaggagcagtcctctgaagcttgaggagcctctagaactatgagcccgaggccttcccctctcccagagcgcagaggctttgaaggctacctctgggaagccgctcaccgtcggaagctgcgggagctgaaactgcgccatcgtcactgtcggcggccatgacaccgctcgtctcccgcctgagtcgtctgtgggccatcatgaggaagccacgagcagccgtgggaagtggtcacaggaagcaggcagccagccaggaagggaggcagaagcatgctaagaacaacagtcaggccaagccttctgcctgtgatggcctggccaggcagccggaagaggtggtattgcaggcctctgtctcctcataccatctattcagagacgtagctgaagtcacagccttccgagggagcctgctaagctggtacgaccaagagaaacgggacctaccatggagaagacgggcagaagatgagatggacctggacaggcgggcatatgctgtgtgggtctcagaggtcatgctgcagcagacccaggttgccactgtgatcaactactataccggatggatgcagaagtggcctacactgcaggacctggccagtgcttccctggaggaggtgaatcaactctgggctggcctgggctactattctcgtggccggcggctgcaggagggagctcggaaggtggtagaggagctagggggccacatgccacgtacagcagagaccctgcagcagctcctgcctggcgtggggcgctacacagctggggccattgcctctatcgcctttggccaggcaaccggtgtggtggatggcaacgtagcacgggtgctgtgccgtgtccgagccattggtgctgatcccagcagcacccttgtttcccagcagctctggggtctagcccagcagctggtggacccagcccggccaggagatttcaaccaagcagccatggagctaggggccacagtgtgtaccccacagcgcccactgtgcagccagtgccctgtggagagcctgtgccgggcacgccagagagtggagcaggaacagctcttagcctcagggagcctgtcgggcagtcctgacgtggaggagtgtgctcccaacactggacagtgccacctgtgcctgcctccctcggagccctgggaccagaccctgggagtggtcaacttccccagaaaggccagccgcaagccccccagggaggagagctctgccacctgtgttctggaacagcctggggcccttggggcccaaattctgctggtgcagaggcccaactcaggtctgctggcaggactgtgggagttcccgtccgtgacctgggagccctcagagcagcttcagcgcaaggccctgctgcaggaactacagcgttgggctgggcccctcccagccacgcacctccggcaccttggggaggttgtccacaccttctctcacatcaagctgacatatcaagtatatgggctggccttggaagggcagaccccagtgaccaccgtaccaccaggtgctcgctggctgacgcaggaggaatttcacaccgcagctgtttccaccgccatgaaaaaggttttccgtatgtatcaggcacaacaagctacagactctgtactagaatacggtttcaccactgtcatctcgcatcgtctcgact

SEQ ID NO: 291070 - DNA, 1761 bp, Homo sapiens
agcctggcgcgcgctaattgcctattggcctgtgctgccggctcgcagcccgggtggacccgagccacgccccctggagtgcgccggaaagccgggcgcgctagagctcgcgggaggccatcatgaggaagccacgagcagccgtgggaagtggtcacaggaagcaggcagccagccaggaagggaggcagaagcatgctaagaacaacagtcaggccaagccttctgcctgtgatggcctggccaggcagccggaagaggtggtattgcaggcctctgtctcctcataccatctattcagagacgtagctgaagtcacagccttccgagggagcctgctaagctggtacgaccaagagaaacgggacctaccatggagaagacgggcagaagatgagatggacctggacaggcgggcatatgctgtgtgggtctcagaggtcatgctgcagcagacccaggttgccactgtgatcaactactataccggatggatgcagaagtggcctacactgcaggacctggccagtgcttccctggaggaggtgaatcaactctgggctggcctgggctactattctcgtggccggcggctgcaggagggagctcggaaggtggtagaggagctagggggccacatgccacgtacagcagagaccctgcagcagctcctgcctggcgtggggcgctacacagctggggccattgcctctatcgcctttggccaggcaaccggtgtggtggatggcaacgtagcacgggtgctgtgccgtgtccgagccattggtgctgatcccagcagcacccttgtttcccagcagctctggggtctagcccagcagctggtggacccagcccggccaggagatttcaaccaagcagccatggagctaggggccacagtgtgtaccccacagcgcccactgtgcagccagtgccctgtggagagcctgtgccgggcacgccagagagtggagcaggaacagctcttagcctcagggagcctgtcgggcagtcctgacgtggaggagtgtgctcccaacactggacagtgccacctgtgcctgcctccctcggagccctgggaccagaccctgggagtggtcaacttccccagaaaggccagccgcaagccccccagggaggagagctctgccacctgtgttctggaacagcctggggcccttggggcccaaattctgctggtgcagaggcccaactcaggtctgctggcaggactgtgggagttcccgtccgtgacctgggagccctcagagcagcttcagcgcaaggccctgctgcaggaactacagcgttgggctgggcccctcccagccacgcacctccggcaccttggggaggttgtccacaccttctctcacatcaagctgacatatcaagtatatgggctggccttggaagggcagaccccagtgaccaccgtaccaccaggtgctcgctggctgacgcaggaggaatttcacaccgcagctgtttccaccgccatgaaaaaggttttccgtgtgtatcagggccaacagccagggacctgtatgggttccaaaaggtcccaggtgtcctctccgtgcagtcggaaaaagccccgcatgggccagcaagtcctggataatttctttcggtctcacatctccactgatgcacacagcctcaacagtgcagcccagtgacacctctgaaagcccccattccctgagaatcctgttgttagtaaagtgcttatttttgtagttaaaaaaagtt

SEQ ID NO: 291071 - DNA, 1701 bp, Homo sapiens
cgcggcgggaacgcggggcctccgtgttctgctgtcttcatcagcgtgggccgcgggccatcatgaggaagccacgagcagccgtgggaagtggtcacaggaagcaggcagccagccaggaagggaggcagaagcatgctaagaacaacagtcaggccaagccttctgcctgtgatggcctggccaggcagccggaagaggtggtattgcaggcctctgtctcctcataccatctattcagagacgtagctgaagtcacagccttccgagggagcctgctaagctggtacgaccaagagaaacgggacctaccatggagaagacgggcagaagatgagatggacctggacaggcgggcatatgctgtgtgggtctcagaggtcatgctgcagcagacccaggttgccactgtgatcaactactataccggatggatgcagaagtggcctacactgcaggacctggccagtgcttccctggaggaggtgaatcaactctgggctggcctgggctactattctcgtggccggcggctgcaggagggagctcggaaggtggtagaggagctagggggccacatgccacgtacagcagagaccctgcagcagctcctgcctggcgtggggcgctacacagctggggccattgcctctatcgcctttggccaggcaaccggtgtggtggatggcaacgtagcacgggtgctgtgccgtgtccgagccattggtgctgatcccagcagcacccttgtttcccagcagctctggggtctagcccagcagctggtggacccagcccggccaggagatttcaaccaagcagccatggagctaggggccacagtgtgtaccccacagcgcccactgtgcagccagtgccctgtggagagcctgtgccgggcacgccagagagtggagcaggaacagctcttagcctcagggagcctgtcgggcagtcctgacgtggaggagtgtgctcccaacactggacagtgccacctgtgcctgcctccctcggagccctgggaccagaccctgggagtggtcaacttccccagaaaggccagccgcaagccccccagggaggagagctctgccacctgtgttctggaacagcctggggcccttggggcccaaattctgctggtgcagaggcccaactcaggtctgctggcaggactgtgggagttcccgtccgtgacctgggagccctcagagcagcttcagcgcaaggccctgctgcaggaactacagcgttgggctgggcccctcccagccacgcacctccggcaccttggggaggttgtccacaccttctctcacatcaagctgacatatcaagtatatgggctggccttggaagggcagaccccagtgaccaccgtaccaccaggtgctcgctggctgacgcaggaggaatttcacaccgcagctgtttccaccgccatgaaaaaggttttccgtgtgtatcagggccaacagccagggacctgtatgggttccaaaaggtcccaggtgtcctctccgtgcagtcggaaaaagccccgcatgggccagcaagtcctggataatttctttcggtctcacatctccactgatgcacacagcctcaacagtgcagcccagtgacacctctgaaagcccccattccctgagaatcctgttgttagtaaagtgcttatttttgtagttaaaaaaagtt

SEQ ID NO: 291072 - DNA, 1843 bp, Homo sapiens
cgcggcgggaacgcggggcctccgtgttctgctgtcttcatcagcgtgggccgcggtgtgtacagtttacctggcactgactttggacacacaccaatcaacaagagaatcagtccttgcactcaagtcgttttttacagtcaaattcaggaagtacacactgatggaaagaatcaaagtaatgtaaaattacattaggccatcatgaggaagccacgagcagccgtgggaagtggtcacaggaagcaggcagccagccaggaagggaggcagaagcatgctaagaacaacagtcaggccaagccttctgcctgtgatggcctggccaggcagccggaagaggtggtattgcaggcctctgtctcctcataccatctattcagagacgtagctgaagtcacagccttccgagggagcctgctaagctggtacgaccaagagaaacgggacctaccatggagaagacgggcagaagatgagatggacctggacaggcgggcatatgctgtgtgggtctcagaggtcatgctgcagcagacccaggttgccactgtgatcaactactataccggatggatgcagaagtggcctacactgcaggacctggccagtgcttccctggaggaggtgaatcaactctgggctggcctgggctactattctcgtggccggcggctgcaggagggagctcggaaggtggtagaggagctagggggccacatgccacgtacagcagagaccctgcagcagctcctgcctggcgtggggcgctacacagctggggccattgcctctatcgcctttggccaggcaaccggtgtggtggatggcaacgtagcacgggtgctgtgccgtgtccgagccattggtgctgatcccagcagcacccttgtttcccagcagctctggggtctagcccagcagctggtggacccagcccggccaggagatttcaaccaagcagccatggagctaggggccacagtgtgtaccccacagcgcccactgtgcagccagtgccctgtggagagcctgtgccgggcacgccagagagtggagcaggaacagctcttagcctcagggagcctgtcgggcagtcctgacgtggaggagtgtgctcccaacactggacagtgccacctgtgcctgcctccctcggagccctgggaccagaccctgggagtggtcaacttccccagaaaggccagccgcaagccccccagggaggagagctctgccacctgtgttctggaacagcctggggcccttggggcccaaattctgctggtgcagaggcccaactcaggtctgctggcaggactgtgggagttcccgtccgtgacctgggagccctcagagcagcttcagcgcaaggccctgctgcaggaactacagcgttgggctgggcccctcccagccacgcacctccggcaccttggggaggttgtccacaccttctctcacatcaagctgacatatcaagtatatgggctggccttggaagggcagaccccagtgaccaccgtaccaccaggtgctcgctggctgacgcaggaggaatttcacaccgcagctgtttccaccgccatgaaaaaggttttccgtgtgtatcagggccaacagccagggacctgtatgggttccaaaaggtcccaggtgtcctctccgtgcagtcggaaaaagccccgcatgggccagcaagtcctggataatttctttcggtctcacatctccactgatgcacacagcctcaacagtgcagcccagtgacacctctgaaagcccccattccctgagaatcctgttgttagtaaagtgcttatttttgtagttaaaaaaagtt

SEQ ID NO: 291073 - DNA, 1733 bp, Homo sapiens
cgcggcgggaacgcggggcctccgtgttctgctgtcttcatcagcgtgggccgcgggccatcatgaggaagccacgagcagccgtgggaagtggtcacaggaagcaggcagccagccaggaagggaggcagaagcatgctaagaacaacagtcaggccaagccttctgcctgtgatgggatgattgctgagtgtcctggggccccagcagcctggccaggcagccggaagaggtggtattgcaggcctctgtctcctcataccatctattcagagacgtagctgaagtcacagccttccgagggagcctgctaagctggtacgaccaagagaaacgggacctaccatggagaagacgggcagaagatgagatggacctggacaggcgggcatatgctgtgtgggtctcagaggtcatgctgcagcagacccaggttgccactgtgatcaactactataccggatggatgcagaagtggcctacactgcaggacctggccagtgcttccctggaggaggtgaatcaactctgggctggcctgggctactattctcgtggccggcggctgcaggagggagctcggaaggtggtagaggagctagggggccacatgccacgtacagcagagaccctgcagcagctcctgcctggcgtggggcgctacacagctggggccattgcctctatcgcctttggccaggcaaccggtgtggtggatggcaacgtagcacgggtgctgtgccgtgtccgagccattggtgctgatcccagcagcacccttgtttcccagcagctctggggtctagcccagcagctggtggacccagcccggccaggagatttcaaccaagcagccatggagctaggggccacagtgtgtaccccacagcgcccactgtgcagccagtgccctgtggagagcctgtgccgggcacgccagagagtggagcaggaacagctcttagcctcagggagcctgtcgggcagtcctgacgtggaggagtgtgctcccaacactggacagtgccacctgtgcctgcctccctcggagccctgggaccagaccctgggagtggtcaacttccccagaaaggccagccgcaagccccccagggaggagagctctgccacctgtgttctggaacagcctggggcccttggggcccaaattctgctggtgcagaggcccaactcaggtctgctggcaggactgtgggagttcccgtccgtgacctgggagccctcagagcagcttcagcgcaaggccctgctgcaggaactacagcgttgggctgggcccctcccagccacgcacctccggcaccttggggaggttgtccacaccttctctcacatcaagctgacatatcaagtatatgggctggccttggaagggcagaccccagtgaccaccgtaccaccaggtgctcgctggctgacgcaggaggaatttcacaccgcagctgtttccaccgccatgaaaaaggttttccgtgtgtatcagggccaacagccagggacctgtatgggttccaaaaggtcccaggtgtcctctccgtgcagtcggaaaaagccccgcatgggccagcaagtcctggataatttctttcggtctcacatctccactgatgcacacagcctcaacagtgcagcccagtgacacctctgaaagcccccattccctgagaatcctgttgttagtaaagtgcttatttttgtagttaaaaaaagtt

SEQ ID NO: 291074 - DNA, 321 bp, Homo sapiens
  misc_feature (14)..(14): n is a, c, g, or t
  misc_feature (18)..(18): n is a, c, g, or t
  misc_feature (20)..(20): n is a, c, g, or t
  misc_feature (25)..(26): n is a, c, g, or t
gcgggccccgcccncccncncctcnncttccaacctttctttttttccctctcccaccattccgccggagttgacaccaccacgcgtgtcacggctcacagccagggacctgtatgggttccaaaaggtcccaggtgtcctctccgtgcagtcggaaaaagccccgcatgggccagcaagtcctggataatttctttcggtctcacatctccactgatgcacacagcctcaacagtgcagcccagtgacacctctgaaagcccccattccctgagaatcctgttgttagtaaagtgcttatttttgtagttaaaaaaagtt

SEQ ID NO: 291075 - DNA, 1950 bp, Homo sapiens
cggaacttgtagtctcctcgtggctagttcaggcggaaggagcagtcctctgaagcttgaggagcctctagaactatgagcccgaggccttcccctctcccagagcgcagaggctttgaaggctacctctgggaagccgctcaccgtcggaagctgcgggagctgaaactgcgccatcgtcactgtcggcggccatgacaccgctcgtctcccgcctgagtcgtctgtgggccatcatgaggaagccacgagcagccgtgggaagtggtcacaggaagcaggcagccagccaggaagggaggcagaagcatgctaagaacaacagtcaggccaagccttctgcctgtgatggcctggccaggcagccggaagaggtggtattgcaggcctctgtctcctcataccatctattcagagacgtagctgaagtcacagccttccgagggagcctgctaagctggtacgaccaagagaaacgggacctaccatggagaagacgggcagaagatgagatggacctggacaggcgggcatatgctgtgtgggtctcagaggtcatgctgcagcagacccaggttgccactgtgatcaactactataccggatggatgcagaagtggcctacactgcaggacctggccagtgcttccctggaggaggtgaatcaactctgggctggcctgggctactattctcgtggccggcggctgcaggagggagctcggaaggtaaggggatggcaggagggtaggaacccaggagtcttgggtgtcttataatcttgagtcttgcactccaatcaggtggtagaggagctagggggccacatgccacgtacagcagagaccctgcagcagctcctgcctggcgtggggcgctacacagctggggccattgcctctatcgcctttggccaggcaaccggtgtggtggatggcaacgtagcacgggtgctgtgccgtgtccgagccattggtgctgatcccagcagcacccttgtttcccagcagctctggggtctagcccagcagctggtggacccagcccggccaggagatttcaaccaagcagccatggagctaggggccacagtgtgtaccccacagcgcccactgtgcagccagtgccctgtggagagcctgtgccgggcacgccagagagtggagcaggaacagctcttagcctcagggagcctgtcgggcagtcctgacgtggaggagtgtgctcccaacactggacagtgccacctgtgcctgcctccctcggagccctgggaccagaccctgggagtggtcaacttccccagaaaggccagccgcaagccccccagggaggagagctctgccacctgtgttctggaacagcctggggcccttggggcccaaattctgctggtgcagaggcccaactcaggtctgctggcaggactgtgggagttcccgtccgtgacctgggagccctcagagcagcttcagcgcaaggccctgctgcaggaactacagcgttgggctgggcccctcccagccacgcacctccggcaccttggggaggttgtccacaccttctctcacatcaagctgacatatcaagtatatgggctggccttggaagggcagaccccagtgaccaccgtaccaccaggtgctcgctggctgacgcaggaggaatttcacaccgcagctgtttccaccgccatgaaaaaggttttccgtgtgtatcagggccaacagccagggacctgtatgggttccaaaaggtcccaggtgtcctctccgtgcagtcggaaaaagccccgcatgggccagcaagtcctggataatttctttcggtctcacatctccactgatgcacacagcctcaacagtgcagcccagtgacacctctgaaagcccccattccctgagaatcctgttgttagtaaagtgcttatttttgtagttaaaaaaagtt

SEQ ID NO: 291076 - DNA, 2170 bp, Homo sapiens
cggaacttgtagtctcctcgtggctagttcaggcggaaggagcagtcctctgaagcttgaggagcctctagaactatgagcccgaggccttcccctctcccagagcgcagaggctttgaaggctacctctgggaagccgctcaccgtcggaagctgcgggagctgaaactgcgccatcgtcactgtcggcggccatgacaccgctcgtctcccgcctgagtcgtctgtgggccatcatgaggaagccacgagcagccgtgggaagtggtcacaggaagcaggcagccagccaggaagggaggcagaagcatgctaagaacaacagtcaggccaagccttctgcctgtgatggcctggccaggcagccggaagaggtggtattgcaggcctctgtctcctcataccatctattcagagacgtagctgaagtcacagccttccgagggagcctgctaagctggtacgaccaagagaaacgggacctaccatggagaagacgggcagaagatgagatggacctggacaggcgggcatatgctgtgtgggtctcagaggtcatgctgcagcagacccaggttgccactgtgatcaactactataccggatggatgcaggtgactccaggggaggaagggaagggtcatgggtcagaccccagatgagagcctctactttggggtgggtgtagagaaggcttcctctaccaccttcacccttgaccttgtctctttctgcctgcctgtggctatagaagtggcctacactgcaggacctggccagtgcttccctggaggtgagagccaccctagggtaggggaaataggaacgatagagggactgacgggtgatctctttgacctctgatcctacccacaggaggtgaatcaactctgggctggcctgggctactattctcgtggccggcggctgcaggagggagctcggaaggtaaggggatggcaggagggtaggaacccaggagtcttgggtgtcttataatcttgagtcttgcactccaatcaggtggtagaggagctagggggccacatgccacgtacagcagagaccctgcagcagctcctgcctggcgtggggcgctacacagctggggccattgcctctatcgcctttggccaggcaaccggtgtggtggatggcaacgtagcacgggtgctgtgccgtgtccgagccattggtgctgatcccagcagcacccttgtttcccagcagctctggggtctagcccagcagctggtggacccagcccggccaggagatttcaaccaagcagccatggagctaggggccacagtgtgtaccccacagcgcccactgtgcagccagtgccctgtggagagcctgtgccgggcacgccagagagtggagcaggaacagctcttagcctcagggagcctgtcgggcagtcctgacgtggaggagtgtgctcccaacactggacagtgccacctgtgcctgcctccctcggagccctgggaccagaccctgggagtggtcaacttccccagaaaggccagccgcaagccccccagggaggagagctctgccacctgtgttctggaacagcctggggcccttggggcccaaattctgctggtgcagaggcccaactcaggtctgctggcaggactgtgggagttcccgtccgtgacctgggagccctcagagcagcttcagcgcaaggccctgctgcaggaactacagcgttgggctgggcccctcccagccacgcacctccggcaccttggggaggttgtccacaccttctctcacatcaagctgacatatcaagtatatgggctggccttggaagggcagaccccagtgaccaccgtaccaccaggtgctcgctggctgacgcaggaggaatttcacaccgcagctgtttccaccgccatgaaaaaggttttccgtgtgtatcagggccaacagccagggacctgtatgggttccaaaaggtcccaggtgtcctctccgtgcagtcggaaaaagccccgcatgggccagcaagtcctggataatttctttcggtctcacatctccactgatgcacacagcctcaacagtgcagcccagtgacacctctgaaagcccccattccctgagaatcctgttgttagtaaagtgcttatttttgtagttaaaaaaagtt

SEQ ID NO: 291077 - DNA, 2027 bp, Homo sapiens
cgcggcgggaacgcggggcctccgtgttctgctgtcttcatcagcgtgggccgcgggccatcatgaggaagccacgagcagccgtgggaagtggtcacaggaagcaggcagccagccaggaagggaggcagaagcatgctaagaacaacagtcaggccaagccttctgcctgtgatggcctggccaggcagccggaagaggtggtattgcaggcctctgtctcctcataccatctattcagagacgtagctgaagtcacagccttccgagggagcctgctaagctggtacgaccaagagaaacgggacctaccatggagaagacgggcagaagatgagatggacctggacaggcgggcatatgctggtcagtacatctcctgagagcagggccactttgcctcgaggcccttgggtctgggggctgtgggccaggtaggggcaggtcagcagtgtcctcatgccaacccctttcccccagtgtgggtctcagaggtcatgctgcagcagacccaggttgccactgtgatcaactactataccggatggatgcaggtgactccaggggaggaagggaagggtcatgggtcagaccccagatgagagcctctactttggggtgggtgtagagaaggcttcctctaccaccttcacccttgaccttgtctctttctgcctgcctgtggctatagaagtggcctacactgcaggacctggccagtgcttccctggaggaggtgaatcaactctgggctggcctgggctactattctcgtggccggcggctgcaggagggagctcggaaggtaaggggatggcaggagggtaggaacccaggagtcttgggtgtcttataatcttgagtcttgcactccaatcaggtggtagaggagctagggggccacatgccacgtacagcagagaccctgcagcagctcctgcctggcgtggggcgctacacagctggggccattgcctctatcgcctttggccaggcaaccggtgtggtggatggcaacgtagcacgggtgctgtgccgtgtccgagccattggtgctgatcccagcagcacccttgtttcccagcagctctggggtctagcccagcagctggtggacccagcccggccaggagatttcaaccaagcagccatggagctaggggccacagtgtgtaccccacagcgcccactgtgcagccagtgccctgtggagagcctgtgccgggcacgccagagagtggagcaggaacagctcttagcctcagggagcctgtcgggcagtcctgacgtggaggagtgtgctcccaacactggacagtgccacctgtgcctgcctccctcggagccctgggaccagaccctgggagtggtcaacttccccagaaaggccagccgcaagccccccagggaggagagctctgccacctgtgttctggaacagcctggggcccttggggcccaaattctgctggtgcagaggcccaactcaggtctgctggcaggactgtgggagttcccgtccgtgacctgggagccctcagagcagcttcagcgcaaggccctgctgcaggaactacagcgttgggctgggcccctcccagccacgcacctccggcaccttggggaggttgtccacaccttctctcacatcaagctgacatatcaagtatatgggctggccttggaagggcagaccccagtgaccaccgtaccaccaggtgctcgctggctgacgcaggaggaatttcacaccgcagctgtttccaccgccatgaaaaaggttttccgtgtgtatcagggccaacagccagggacctgtatgggttccaaaaggtcccaggtgtcctctccgtgcagtcggaaaaagccccgcatgggccagcaagtcctggataatttctttcggtctcacatctccactgatgcacacagcctcaacagtgcagcccagtgacacctctgaaagcccccattccctgagaatcctgttgttagtaaagtgcttatttttgtagttaaaaaaagtt

SEQ ID NO: 291078 - DNA, 1930 bp, Homo sapiens
agcctggcgcgcgctaattgcctattggcctgtgctgccggctcgcagcccgggtggacccgagccacgccccctggagtgcgccggaaagccgggcgcgctagagctcgcgggaggccatcatgaggaagccacgagcagccgtgggaagtggtcacaggaagcaggcagccagccaggaagggaggcagaagcatgctaagaacaacagtcaggccaagccttctgcctgtgatgggatgattgctgagtgtcctggggccccagcagcctggccaggcagccggaagaggtggtattgcaggcctctgtctcctcataccatctattcagagacgtagctgaagtcacagccttccgagggagcctgctaagctggtacgaccaagagaaacgggacctaccatggagaagacgggcagaagatgagatggacctggacaggcgggcatatgctgtgtgggtctcagaggtcatgctgcagcagacccaggttgccactgtgatcaactactataccggatggatgcaggtgactccaggggaggaagggaagggtcatgggtcagaccccagatgagagcctctactttggggtgggtgtagagaaggcttcctctaccaccttcacccttgaccttgtctctttctgcctgcctgtggctatagaagtggcctacactgcaggacctggccagtgcttccctggaggaggtgaatcaactctgggctggcctgggctactattctcgtggccggcggctgcaggagggagctcggaaggtggtagaggagctagggggccacatgccacgtacagcagagaccctgcagcagctcctgcctggcgtggggcgctacacagctggggccattgcctctatcgcctttggccaggcaaccggtgtggtggatggcaacgtagcacgggtgctgtgccgtgtccgagccattggtgctgatcccagcagcacccttgtttcccagcagctctggggtctagcccagcagctggtggacccagcccggccaggagatttcaaccaagcagccatggagctaggggccacagtgtgtaccccacagcgcccactgtgcagccagtgccctgtggagagcctgtgccgggcacgccagagagtggagcaggaacagctcttagcctcagggagcctgtcgggcagtcctgacgtggaggagtgtgctcccaacactggacagtgccacctgtgcctgcctccctcggagccctgggaccagaccctgggagtggtcaacttccccagaaaggccagccgcaagccccccagggaggagagctctgccacctgtgttctggaacagcctggggcccttggggcccaaattctgctggtgcagaggcccaactcaggtctgctggcaggactgtgggagttcccgtccgtgacctgggagccctcagagcagcttcagcgcaaggccctgctgcaggaactacagcgttgggctgggcccctcccagccacgcacctccggcaccttggggaggttgtccacaccttctctcacatcaagctgacatatcaagtatatgggctggccttggaagggcagaccccagtgaccaccgtaccaccaggtgctcgctggctgacgcaggaggaatttcacaccgcagctgtttccaccgccatgaaaaaggttttccgtgtgtatcagggccaacagccagggacctgtatgggttccaaaaggtcccaggtgtcctctccgtgcagtcggaaaaagccccgcatgggccagcaagtcctggataatttctttcggtctcacatctccactgatgcacacagcctcaacagtgcagcccagtgacacctctgaaagcccccattccctgagaatcctgttgttagtaaagtgcttatttttgtagttaaaaaaagtt

SEQ ID NO: 291079 - DNA, 1645 bp, Homo sapiens
agcctggcgcgcgctaattgcctattggcctgtgctgccggctcgcagcccgggtggacccgagccacgccccctggagtgcgccggaaagccgggcgcgctagagctcgcgggaggccatcatgaggaagccacgagcagccgtgggaagtggtcacaggaagcaggcagccagccaggaagggaggcagaagcatgctaagaacaacagtcaggccaagccttctgcctgtgatggcctggccaggcagccggaagaggtggtattgcaggcctctgtctcctcataccatctattcagagacgtagctgaagtcacagccttccgagggagcctgctaagctggtacgaccaagagaaacgggacctaccatggagaagacgggcagaagatgagatggacctggacaggcgggcatatgctggaggtgaatcaactctgggctggcctgggctactattctcgtggccggcggctgcaggagggagctcggaaggtggtagaggagctagggggccacatgccacgtacagcagagaccctgcagcagctcctgcctggcgtggggcgctacacagctggggccattgcctctatcgcctttggccaggcaaccggtgtggtggatggcaacgtagcacgggtgctgtgccgtgtccgagccattggtgctgatcccagcagcacccttgtttcccagcagctctggggtctagcccagcagctggtggacccagcccggccaggagatttcaaccaagcagccatggagctaggggccacagtgtgtaccccacagcgcccactgtgcagccagtgccctgtggagagcctgtgccgggcacgccagagagtggagcaggaacagctcttagcctcagggagcctgtcgggcagtcctgacgtggaggagtgtgctcccaacactggacagtgccacctgtgcctgcctccctcggagccctgggaccagaccctgggagtggtcaacttccccagaaaggccagccgcaagccccccagggaggagagctctgccacctgtgttctggaacagcctggggcccttggggcccaaattctgctggtgcagaggcccaactcaggtctgctggcaggactgtgggagttcccgtccgtgacctgggagccctcagagcagcttcagcgcaaggccctgctgcaggaactacagcgttgggctgggcccctcccagccacgcacctccggcaccttggggaggttgtccacaccttctctcacatcaagctgacatatcaagtatatgggctggccttggaagggcagaccccagtgaccaccgtaccaccaggtgctcgctggctgacgcaggaggaatttcacaccgcagctgtttccaccgccatgaaaaaggttttccgtgtgtatcagggccaacagccagggacctgtatgggttccaaaaggtcccaggtgtcctctccgtgcagtcggaaaaagccccgcatgggccagcaagtcctggataatttctttcggtctcacatctccactgatgcacacagcctcaacagtgcagcccagtgacacctctgaaagcccccattccctgagaatcctgttgttagtaaagtgcttatttttgtagttaaaaaaagtt

SEQ ID NO: 291080 - DNA, 1265 bp, Homo sapiens
cggaacttgtagtctcctcgtggctagttcaggcggaaggagcagtcctctgaagcttgaggagcctctagaactatgagcccgaggccttcccctctcccagagcgcagaggctttgaaggctacctctgggaagccgctcaccgtcggaagctgcgggagctgaaactgcgccatcgtcactgtcggcggccatgacaccgctcgtctcccgcctgagtcgtctgtgggccatcatgaggaagccacgagcagccgtgggaagtggtcacaggaagcaggcagccagccaggaagggaggcagaagcatgctaagaacaacagtcaggccaagccttctgcctgtgatggcctggccaggcagccggaagaggtggtattgcaggcctctgtctcctcataccatctattcagagacgtagctgaagtcacagccttccgagggagcctgctaagctggtacgaccaagagaaacgggacctaccatggagaagacgggcagaagatgagatggacctggacaggcgggcatatgctgtgtgggtctcagaggtcatgctgcagcagacccaggttgccactgtgatcaactactataccggatggatgcagaagtggcctacactgcaggacctggccagtgcttccctggaggaggtgaatcaactctgggctggcctgggctactattctcgtggccggcggctgcaggagggagctcggaaggtctgctggcaggactgtgggagttcccgtccgtgacctgggagccctcagagcagcttcagcgcaaggccctgctgcaggaactacagcgttgggctgggcccctcccagccacgcacctccggcaccttggggaggttgtccacaccttctctcacatcaagctgacatatcaagtatatgggctggccttggaagggcagaccccagtgaccaccgtaccaccaggtgctcgctggctgacgcaggaggaatttcacaccgcagctgtttccaccgccatgaaaaaggttttccgtgtgtatcagggccaacagccagggacctgtatgggttccaaaaggtcccaggtgtcctctccgtgcagtcggaaaaagccccgcatgggccagcaagtcctggataatttctttcggtctcacatctccactgatgcacacagcctcaacagtgcagcccagtgacacctctgaaagcccccattccctgagaatcctgttgttagtaaagtgcttatttttgtagttaaaaaaagtt

SEQ ID NO: 291081 - DNA, 345 bp, Homo sapiens
gctggcaggactgtgggagttcccgtccgtgacctgggagccctcagagcagcttcagcgcaaggccctgctgcaggaactacagcgttgggctgggcccctcccagccacgcacctccggcaccttggggaggtaagtgagcagcggaatagccaaggatgttggcttttgaggctatatccacaggcctatttgaaccccttgacccttcctccaggttgtccacaccttctctcacatcaagctgacatatcaagtatatgggctggccttggaagggcagaccccagtgaccaccgtaccaccaggtgctcgctggctgacgcaggaggaatttcacaccg

SEQ ID NO: 291082 - DNA, 782 bp, Homo sapiens
aaaaaaaaaaaaaggatctctcagctgttgggcctgagatgatatgtctcaacctgggcaccatgacagaagaaacttgtggcatctgactgtgagattagtccacgcctgggctctgcgttcatgggcagggcacaccctagtgctgttgaagcaggtacatcagaggccgcatgacagctttgccttttgctctccagggtgggcagcaggtgggcccagcggggagagagttgtcttgggggttgataaggaggcctggttgtagagattctctccgtaccattttgctgaaagagtttggttaactttttgaaaacaatttaaaaattgtagacatgtgccatagaacctaaaaaaatatgctcgtggcagatagtaaaatgataagggctctaagaacatttttagaatagatagcagtatgactttatccctacttctaacattctttcccctgaaactacacagacattcattcagcatatgaagttttcaggctgggtgcaatggctcatgcctgtaatcccagtactttgggaggttgtggcgggaggattgcttaagcctgagagttcaagaccagcctgggcaacatagggagaccttgtctctacagaaaaagtttaaaattagctgagcgtggtgctgtgcatgtgtggtcccaggtactcggcaggccgaggagggaggatcgcttgggcacagcaggtcgaggctgcagtgagccatgattacaccactgcactccagctgggccacagagtgagaccctgtatcaa

SEQ ID NO: 291083 - DNA, 435 bp, Homo sapiens
cggccgcaggtggaaagtaattctgcgtttccatttctctttccagaaaaataacgtggagcaagtggtaagagccctccccaccacccccagccgtgagtctgcacacgtccacccacacgtccacctgtgtgttcaggacgcatgtccctatgcatatccgcccatgtgcccgggacacatgtcccctgcgtgtctgcccgtgtgcccgggatgtgtgtccccctgcgtgtccacctgtgtgtctgcccatgtgcctgggacatgtgtccgcctgtgcgtccatccgtgtgtccgtctgcccatgtgcctgggtcgcatgtcaccctgtgtcccagccgtatgtccgtggctttcccactgactcgtctccatgctttccccccacagtgctgctccttcgaatgccagcctgcaagaggacctccggggctc

SEQ ID NO: 291084 - DNA, 756 bp, Homo sapiens
agcggaaatggtgccagacgtggtggtatgagcctgtaattccagccactcaggaggctgaggtgggaggatcactctggcctaggagtttgagatcagcctgggtgacagagcaagaccctgtctctagaaaagagaaagaataaatggctgatggagatgactctactgcaaaaatgacaaccagcaagaaagcgggtggtgcccgtttcctccctggggaccctcagagggccaggccattctcttccttggtgtgactgcggatccagggcccagctgaagagcatcagatctgtgggcatgttgcaccagtgaatgttggagaagtacttgttggacacacatgttcctccatttagacagtcacagttcgctggagagaacaaagccaactgttgtaggggtggatactcacatggaacttgatgaagttcattgctgccctggaagagattcgggaggaggcttcatcaaaggtcccatgctccagggactccagggtgagggtaaactggccccaatcccaaaacccactcttccctctccctctcgcctcaccctgttcgtatctagttctcaaatggaagaccatgggtttccagccaggagaaatggattgacccaagcaagcttcatctaccagatgcccgcaggctggggcagtcccggcggcctcttcctcccttgccagccagtgccaacccccgtggttctcaagcctccgctgccaccctgtcccatttcctggggaga

SEQ ID NO: 291085 - DNA, 2032 bp, Homo sapiens
ggctcactgcatctccggctcctggactcaagcgattctcctgcctcaggctcccaaggtggcagcacgcaaagggtgtccctgtccctcaaggggtcatggcctccatgttgctcgcccagcgcctggcctgcagcttccagcacagctaccgcctgctggtgcctggatccagacacattagtcaagctgcagccaaagtcgacgttgaatttgattatgatgggcctctgatgaagacggaagtcccagggcctagatctcaggagttaatgaaacagctgaatataattcagaatgcagaggctgtgcattttttctgcaattacgaagagagccgaggcaattacctggttgatgtggacggcaaccgaatgctggatctttattcccagatctcctctgtccccataggttacagccaccccgccctgctgaaactcatccaacagcctcaaaatgcgagcatgtttgtcaacagacccgccctcggaatcctgcctccggagaactttgtggagaagctccggcagtccttgctctcggtggctcccaaagggatgtcccagctcatcaccatggcctgcggctcctgctccaatgaaaacgccttaaagaccatcttcatgtggtaccggagcaaggaaagagggcagaggggcttctcccaggaggagctggagacgtgcatgattaaccaggcccctggctgccccgactacagcatcctctccttcatgggcgcgttccatgggaggaccatgggttgcttagcgaccacgcactctaaagccattcacaagatcgacatcccttcctttgactggcccatcgcaccgttcccacggctgaaataccctctggaagagtttgtgaaagagaaccaacaggaggaggcccgctgtctggaagaggtggaggatctgattgtgaaatatcggaaaaagaagaagacggtggccgggatcatcgtggagcccatccagtccgagggtggagacaaccacgcatccgatgacttctttcggaagctgagagacatcgccaggaagcatggctgcgccttcttggtggacgaggtccagaccggaggaggctgcacgggcaagttctgggcccatgagcactggggcctggatgacccagcagacgtgatgaccttcagcaagaagatgatgactgggggcttcttccacaaggaggagttcaggcctaatgctccctaccggatcttcaacacctggctgggggacccgtccaagaacctgttgctggctgaggtcatcaacatcatcaagcgggaggacctgctaaataatgcagcccatgccgggaaggccctgctcacaggactgctggacctccaggcccggtacccccagttcatcagcagggtgagaggacgaggcaccttttgctccttcgatactcccgatgattccatacggaataagctcattttaattgccagaaacaaaggtgtggtgttgggtggctgtggtgacaaatccattcgtttccgtcccacgctggtcttcagggatcaccacgctcacctgttcctcaatattttcagtgacatcttagcagacttcaagtaaagaagccatttccactacagtgagaaagcccggatcccaacagttgtcaaattgattagtttgcctaattcatgttttcacttaaaagtatcagaggtgaatgcacagtgaagggtgatttgtggggagggagcatttttggtggtcttgggggaggggaggggagggaagggctggtgttgattttcctccctgcagagccaatggtgcacattggtttaagcccagagatcctgcttgagccctggactcatcttgggaagggccatgggaggtcctggctagagttctgcccaaccttgaccaaccccagcaatttttccaaaagccagtcaagggcattacatttgttcctgggactggcagctgggcctcctgggtgccagtccatctcaagtgccatattctgtgatcacggatgttggctcccc

SEQ ID NO: 291086 - DNA, 2117 bp, Homo sapiens
ggacgctcggcggagccagggagtccggcgagtcgctgggggaagtcgagcagacacccagcgctgccggaactcggggcgcgcatcccgcaagtcggaacccggcggatcggatcccgcagatcggagacggggcctggagggtggcagcacgcaaagggtgtccctgtccctcaaggggtcatggcctccatgttgctcgcccagcgcctggcctgcagcttccagcacagctaccgcctgctggtgcctggatccagacacattagtcaagctgcagccaaagtcgacgttgaatttgattatgatgggcctctgatgaagacggaagtcccagggcctagatctcaggagttaatgaaacagctgaatataattcagaatgcagaggctgtgcattttttctgcaattacgaagagagccgaggcaattacctggttgatgtggacggcaaccgaatgctggatctttattcccagatctcctctgtccccataggttacagccaccccgccctgctgaaactcatccaacagcctcaaaatgcgagcatgtttgtcaacagacccgccctcggaatcctgcctccggagaactttgtggagaagctccggcagtccttgctctcggtggctcccaaagggatgtcccagctcatcaccatggcctgcggctcctgctccaatgaaaacgccttaaagaccatcttcatgtggtaccggagcaaggaaagagggcagaggggcttctcccaggaggagctggagacgtgcatgattaaccaggcccctggctgccccgactacagcatcctctccttcatgggcgcgttccatgggaggaccatgggttgcttagcgaccacgcactctaaagccattcacaagatcgacatcccttcctttgactggcccatcgcaccgttcccacggctgaaataccctctggaagagtttgtgaaagagaaccaacaggaggaggcccgctgtctggaagaggtggaggatctgattgtgaaatatcggaaaaagaagaagacggtggccgggatcatcgtggagcccatccagtccgagggtggagacaaccacgcatccgatgacttctttcggaagctgagagacatcgccaggaagcatggctgcgccttcttggtggacgaggtccagaccggaggaggctgcacgggcaagttctgggcccatgagcactggggcctggatgacccagcagacgtgatgaccttcagcaagaagatgatgactgggggcttcttccacaaggaggagttcaggcctaatgctccctaccggatcttcaacacctggctgggggacccgtccaagaacctgttgctggctgaggtcatcaacatcatcaagcgggaggacctgctaaataatgcagcccatgccgggaaggccctgctcacaggactgctggacctccaggcccggtacccccagttcatcagcagggtgagaggacgaggcaccttttgctccttcgatactcccgatgattccatacggaataagctcattttaattgccagaaacaaaggtgtggtgttgggtggctgtggtgacaaatccattcgtttccgtcccacgctggtcttcagggatcaccacgctcacctgttcctcaatattttcagtgacatcttagcagacttcaagtaaagaagccatttccactacagtgagaaagcccggatcccaacagttgtcaaattgattagtttgcctaattcatgttttcacttaaaagtatcagaggtgaatgcacagtgaagggtgatttgtggggagggagcatttttggtggtcttgggggaggggaggggagggaagggctggtgttgattttcctccctgcagagccaatggtgcacattggtttaagcccagagatcctgcttgagccctggactcatcttgggaagggccatgggaggtcctggctagagttctgcccaaccttgaccaaccccagcaatttttccaaaagccagtcaagggcattacatttgttcctgggactggcagctgggcctcctgggtgccagtccatctcaagtgccatattctgtgatcacggatgttggctcccc

SEQ ID NO: 291087 - DNA, 2130 bp, Homo sapiens
ggacgctcggcggagccagggagtccggcgagtcgctgggggaagtcgagcagacacccagcgctgccggaactcggggcgcgcatcccgcaagtcggaacccggcggatcggatcccgcagatcggagacggggcctggagggtggcagcacgcaaagggtgtccctgtccctcaaggggtcatggcctccatgttgctcgcccagcgcctggcctgcagcttccagcacagctaccgcctgctggtgcctggatccagacacattagtcaagctgcagccaaagtcgacgttgaatttgattatgatgggcctctgatgaagacggaagtcccagggcctagatctcaggagttaatgaaacagctgaatataattcagaatgcagaggctgtgcattttttctgcaattacgaagagagccgaggcaattacctggttgatgtggacggcaaccgaatgctggatctttattcccagatctcctctgtccccataggttacagccaccccgccctgctgaaactcatccaacagcctcaaaatgcgagcatgtttgtcaacagacccgccctcggaatcctgcctccggagaactttgtggagaagctccggcagtccttgctctcggtggctcccaaagggatgtcccagctcatcaccatggcctgcggctcctgctccaatgaaaacgccttaaagaccatcttcatgtggtaccggagcaaggaaagagggcagaggggcttctcccaggaggagctggagacgtgcatgattaaccaggcccctggctgccccgactacagcatcctctccttcatgggcgcgttccatgggaggaccatgggttgcttagcgaccacgcactctaaagccattcacaagatcgacatcccttcctttgactggcccatcgcaccgttcccacggctgaaataccctctggaagagtttgtgaaagagaaccaacaggaggaggcccgctgtctggaagaggtggaggatctgattgtgaaatatcggaaaaagaagaagacggtggccgggatcatcgtggagcccatccagtccgagggtggagacaaccacgcatccgatgacttctttcggaagctgagagacatcgccaggaagcatggctgcgccttcttggtggacgaggtccagaccggaggaggctgcacgggcaagttctgggcccatgagcactggggcctggatgacccagcagacgtgatgaccttcagcaagaagatgatgactgggggcttcttccacaaggaggagttcaggcctaatgctccctaccggatcttcaacacctggctgggggacccgtccaagaacctgttgctggctgaggtcatcaacatcatcaagcgggaggacctgctaaataatgcagcccatgccgggaaggccctgctcacaggactgctggacctccaggcccggtacccccagttcatcagcagggtgagaggacgaggcaccttttgctccttcgatactcccgatgattccatacggaataagctcattttaattgccagaaacaaaggtaaggggtcaggagtggctgctgagtttcatgagcatccagtatttcctgctgtagctgccacatgttgctaggtactcagcaatattttgtgtggggggcaggtggtacacaggtctgaaaacagcgtgaatgctctttctccaaagaagagaacattacaaatgggatttctttatccatttatttactcaacaagcgttcactgaggaggtgagttgtaagtggacactggagacagttacagtgatgatgaagaccatcagagccccttccttcaggaagcatgcagtgtagcaggaaggcatggctttacacatggcatttcacaaccaatccattgcaattttaagtcctgggaaggagaaaacgcagctaagagagcagatagctgcagcagttggtgagggtaggaaatcagggcaggctcccttgaggaagtagcattttaccctaagtcttgacaaacagggattggctgggtgaagaaggtaaggaagagcattctgggcggagggaagggtgcatgcgatggcctgaggtgggatggagcttacagaggtggt

SEQ ID NO: 291088 - DNA, 781 bp, Homo sapiens
ggctcactgcatctccggctcctggactcaagcgattctcctgcctcaggctcccaaggtggcagcacgcaaagggtgtccctgtccctcaaggggtcatggcctccatgttgctcgcccagcgcctggcctgcagcttccagcacagctaccgcctgctggtgcctggatccagacacattagtcaagctgcagccaaagtcgacgttgaatttgattatgatgggcctctgatgaagacggaagtcccagggcctagatctcaggagttaatgaaacagctgaatataattcagaatgcagaggctgtgcattttttctgcaattacgaagagagccgaggcaattacctggttgatgtggacggcaaccgaatgctggatctttattcccagatctcctctgtccccataggttacagccaccccgccctgctgaaactcatccaacagcctcaaaatgcgacacgaagcttggagtagaactgctggccatgtacagctcctgcagatcctgccagacagttctccaaatcgatcgcaccaactccactcccacagccgggggagggttccagtcttgccacatcctcgccaacacggggtatcactggaagatttttctttgactcagagagtaacatacttatccacacatgacaaggaacttgatcccagaaagaaatctaagaaaggcagaaggaacaaagacccaatcctggtcagaaaaggggtccctagccctaaaacgtacttcactttaaataaacagagttggagct

SEQ ID NO: 291089 - DNA, 563 bp, Homo sapiens
  misc_feature (37)..(37): n is a, c, g, or t
cctgggtgccagtccatctcaagtgccatattctgtnatcacggatgttggctccccctcgccctatgcaagcaaacacacgctcacctgttcctcaatattttcagtgacatcttagcagacttcaagtaaagaagccatttccactacagtgagaaagcccggatcccaacagttgtcaaattgattagtttgcctaattcatgttttcacttaaaagtatcagaggtgaatgcacagtgaagggtgatttgtggggagggagcatttttggtggtcttgggggaggggaggggagggaagggctggtgttgattttcctccctgcagagccaatggtgcacattggtttaagcccagagatcctgcttgagccctggactcatcttgggaagggccatgggaggtcctggctagagttctgcccaaccttgaccaaccccagcaatttttccaaaagccagtcaagggcattacatttgttcctgggactggcagctgggcctcctgggtgccagtccatctcaagtgccatattctgtgatcacggatgttggctcccc

SEQ ID NO: 291090 - DNA, 1234 bp, Homo sapiens
ggacgctcggcggagccagggagtccggcgagtcgctgggggaagtcgagcagacacccagcgctgccggaactcggggcgcgcatcccgcaagtcggaacccggcggatcggatcccgcagatcggagacggggcctggagggtggcagcacgcaaagggtgtccctgtccctcaaggggtcatggcctccatgttgctcgcccagcgcctggcctgcagcttccagcacagctaccgcctgctggtgcctggatccagacacattagtcaagctgcagccaaagtcgacgttgaatttgattatgatgggcctctgatgaagacggaagtcccagggcctagatctcaggagttaatgaaacagctgaatataattcagaatgcagaggctgtgcattttttctgcaattacgaagagagccgaggcaattacctggttgatgtggacggcaaccgaatgctggatctttattcccagatctcctctgtccccataggttacagccaccccgccctgctgaaactcatccaacagcctcaaaatgcgagcatgtttgtcaacagacccgccctcggaatcctgcctccggagaactttgtggagaagctccggcagtccttgctctcggtggctcccaaagggatgtcccagctcatcaccatggcctgcggctcctgctccaatgaaaacgccttaaagaccatcttcatgtggtaccggagcaaggaaagagggcagaggggcttctcccaggaggagctggagacgtgcatgattaaccaggcccctggctgccccgactacagcatcctctccttcatgggcgcgttccatgggaggaccatgggttgcttagcgaccacgcactctaaagccattcacaagatcgacatcccttcctttgactggcccatcgcaccgttcccacggctgaaataccctctggaagagtttgtgaaagagaaccaacaggaggaggcccgctgtctggaagaggtggaggatctgattgtgaaatatcggaaaaagaagaagacggtggccgggatcatcgtggagcccatccagtccgagggtggagacaaccacgcatccgatgacttctttcggaagctgagagacatcgccaggaagcatggctgcgccttcttggtggacgaggtccagaccggaggagccagtttccacaggcagcatcccaaggttcaataaggccttatttaacaagcaa

SEQ ID NO: 291091 - DNA, 886 bp, Homo sapiens
ggctcactgcatctccggctcctggactcaagcgattctcctgcctcaggctcccaaggtggcagcacgcaaagggtgtccctgtccctcaaggggtcatggcctccatgttgctcgcccagcgcctggcctgcagcttccagcacagctaccgcctgctggtgcctggatccagacacattagtcaagctgcagccaaagtcgacgttgaatttgattatgatgggcctctgatgaagacggaagtcccagggcctagatctcaggtgagttgagcacacctgaaatgcagaggctgtgcattttttctgcaattacgaagagagccgaggcaattacctggttgatgtggacggcaaccgaatgctggatctttattcccagatctcctctgtccccatagagtctcactgtcacccaggctggagtgcagtggcgtgatctcaactcaatgcaacctccgcctcttgtgttcaagagattcttctgcctcagccccccgagtacctgggattacaggttacagccaccccgccctgctgaaactcatccaacagcctcaaaatgcgacacgaagcttggagtagaactgctggccatgtacagctcctgcagatcctgccagacagttctccaaatcgatcgcaccaactccactcccacagccgggggagggttccagtcttgccacatcctcgccaacacggggtatcactggaagatttttctttgactcagagagtaacatacttatccacacatgacaaggaacttgatcccagaaagaaatctaagaaaggcagaaggaacaaagacccaatcctggtcagaaaaggggtccctagccctaaaacgtacttcactttaaataaacagagttggagct

SEQ ID NO: 291092 - DNA, 2767 bp, Homo sapiens
agtttcagccgcgacagcaagaacggcagagccggcgaccgcggcggcggcgacggcggaggcaggagcagcctgggcgggtcgcagggtctccgcgggcgcaggaaggcgagcagagcacaaatgaggatgtcccaatttctgccttttgggttttaccagctgctgtaggttttccacactgagtagttgcagtagactggctgccctctgtccaacatgcaatgccacttggtatcattcatggtttgatcccgagaacaatccacctattatataattttcccctcacatgtcattccactgacctcaatcaactgatgtggtgatgaaatgaaacacgttcatggagaagctgagaaaagtgtgcaaagtacacctacaaggagagtttccccatgttttccataatgtggccatccaggatgaggaaggaacaagaatacttgaacatcacagagaccaaaccatttccatacgtcaaaaccagagagcctgggatcaaagttatacttggaaaagggctgtaagaaatgaaaaaccacctagcagcatctgtacttcccttaaaatccaacctccactggcttcctctgaatccatcagggtcttaaatatttaaagaaaggctaaattcagaaggtatttaagaaatgggcaggccctgctgggtcctgatgagtccagtgcctccgggagctgcccaatgggccagcagtctctgtggaatccaggtgacccttcccactagggattggaccaacacttcacgcagctttcttccgaggaccccaacgaaggagtgatttgaacccaagtcaaaagggtgccctacaaggctagtttgaacagaacccctaccctgatgtgactcccagagaacaactgaccagagaaattggcactccagaatttagaatacagatgtggtttcgaaaccagagaacacaacacctcagacagagtctactggggtctggattggggtcgatttcctggaattgctatcagggaagaactggctgcacaaacaggcctctcagagtccagaactcagatatggtttcataaccaaagagctcggcactgtggccagagttgtagacttgtgaattccctggcagaaggccccaagtcggagacctcacatgactgtgtgacaaggcaaggcaacttgtgcatggcccctagcagtggggtcacttccctccctccagttctttcagcaacaaccagctcttcttccacctcacacatgctttggttcttgggttccccctgggctcggagtgagccaggcaccaagggtcatgatgctccacccaccaggctgtgctgggaggagagatctctccacctcttctgacacttaggagtcacatgtcgacaggcccagctctaggaggggcgctcttacatcctctggctcctttccagcccccacaccaaggaagatgccaggatgacaaggacagagacacatggcctggcagtactgccctgtaaggactctacacagccccaacctggcaatcctaagcaccagttgcagggaactggtcagcaagacacatctcaccttatgcagtggtggcacaaggggccccaaggagtgatgtcaaatggccagctggagcaggggcacttcagcagcccacagagcctgcacacacctggacatccctgtggcagtagcgggcaccaccagctgcagagccatctcagccactcgagcaaccgcacagctctctgcaaaacccatccttttaggtcaatgcctgtcaattgtatagtttcagaaaaagacacaagcctgcctgaatccaagtccacaggaaaaggtccctccaccacttgaaccacctctcagtgaggaagaatttgatgctctgcctgatgtgatgcagacctcaccagggtgtcagctttgggaggagcaaggcctccttctcacctccaccatctaggccactttcctggacacagaatcaatgtgataccaagaaggacaaacaatgcacacactgtgtttggcagcaagaccaatgcgagaaaaagcaccaaacacttagaaacccaaagggagcattttgactcagtcttgtgggaggcgcttgacttctcctctcacttaatggcctatatgattgttgcaaagctctctactgcccctgtaaggcatcatgggcaccaagccatgaatgccttcactgcatcctgaagaaccaaagcatttttatagcaaacatcacctactccctgcaatcctcaccgcttgggcagtctggactatacaggaactggaaccaaaccaaaccagggcgaggacactaggtctaagggggacagctccacacttctttccttctggcaagttcagaagtcacacctgaaagcaggtagatgtctagaatatagagggatgctgtattttcttgttctgtgagttgataacaaggagtttttaatctcagctctgagagttgcaaatgggaattggaagtcacttcactacccacctcttgggaactgattccacaagtttatatccataatcccgagtaggcttcatgaccagttttccctctgaacattgaaatgtagagaaaatgacagaagttagaatagcaactcccttagatcattgaacaaagcatatgaatgttactcttctcacattgttagcatttctgtatgttaacctgtacttctacccatcaagctgccctttttattataaataaatgtcaagtttaaataaatctga

SEQ ID NO: 291093 - DNA, 1330 bp, Homo sapiens
tggcctgggcactgcctgggggaagtatgctgcctggatgctcagacccacctgggcaggtcatttctggctactgtaatgactttcagagacagggaagcagaggcctctaacgccagggctttctgttgggtgggcagccagcacagggacaggcagatgatggcacactccccgatgatcctgtccccacacctgcgaaagcccaccacacttcagcagtgtaagtggtcatccaccagctgtggaataccaaccttctgcaggcccaagagctgcagcacctcaagtccctcctggaagggaggcagaggccccaggcagccccaaggctgacagcatcctgacaggacagcgagcccagattcatggagaaggggacacagtgatgaacaactgacaaacacaggaataataaatttattataatcacagatggtggggtagtgcacataaaaaggggggacctcttctcaccagagggtgctggccggtgcccagagtggcaggcaacatagggaggcgctccctgcatggcccggcccgctgccaggcccgctgtctctgggtgctcagtgtgtggtgctctgaggacacgggtcctgagggccttgctcttcatccttcacagtggggacacggccctcatgccagcggcacaggggtgccggcagcaggatccctgacgcccctgctccctgggtgccccacggtgctcagcaggaatgccgtgagggctgaggcccagctggtggcggggagccagcagcacctatgggccagccctccctccaaaaggcagcctgtgccctggacttgcaggcttcctcggggggtgctccacctgcccaaagcagcatagcctgaacccaaaactgtgaccagagaatcccatgtgtgttttaagggtttcctatgtcctctgtgttctataggaacgagtaggggtgcgtctagcacacacgagacgctctaacaacaccctgagtgcaccctcacgctgctgagatggacctggaccgtggacaggccacggtgagagcagcctgaggatcgcatctggctcctgggaggaagtcacatggagggccttctctaagaagtcggccaacgccccccaagcaacccgctccactgcgcctatcccagttctgtacaggtgtgggatttcgtttggcaggtccccaaggcagaagataaaagcaggaaagctaacctaaccccaggctctctaaggaagccaacacctagaagtgtctgacaggaggcgtgtgtccttggccccgatgaggctgcaggccatccctgcagtcttggctaggcggccgca

SEQ ID NO: 291094 - DNA, 494 bp, Homo sapiens
gtatgctgcctggatgctcagacccacctgggcaggtcatttctggctactgtaatgactttcagagacagggaagcagaggcctctaacgccagggctttctgttgggtgggcagccagcacagggacaggcagatgatggcacactccccgatgatcctgtccccacacctgcgaaagcccaccacacttcagcagtgtaagtggtcatccaccagctgtggaataccaaccttctgcaggcccaagaggtgaggccctgggtggtggggatggccctgggcagcctggtgccaccgcaggccccaccacacccctgcccctgcctttcagctgcagcacctcaagtccctcctggaagggaggcagaggccccaggcagccccaaggctgacagcatcctgacaggacagcgagcccagattcatggagaaggggacacagtgatgaacaactgacaaacacaggaataataaatttattataatcacaga

SEQ ID NO: 291095 - DNA, 462 bp, Homo sapiens
cggccgagagagcggagcacgaggaggcgggggcggcagagaagtgatgctggcgccggggatcggggcagcggcagcggagcagcagcatcttcgggaccctggctgcagcgtccctgtggcccgcgcgccagcccagcggccggagaccacgcgccccgcggacccattagaaacgcttcaagagctgctcagtccaggagtggagggattttgtgaagacacagatgctccctaaaaggagtgcagaaattttcatcatagggagaatgaagacagtgtgtgacaacctgaaaaagacaagtctttggttatcagaaaaactacctttaaagctaattttgaaaacagatcatttagataaaataacatggagaagatgaaaagaaaaatcaagtttacaacagattcagagaaccttgaagttgattatgattttaagaataacagaggagccaagat

SEQ ID NO: 291096 - DNA, 992 bp, Homo sapiens
ggggtaaattccaagcacagcctgaatgagaagtacaactcatttcctgtaacctagatgcctttttaacacatctatgcagtctccatgtgaaaccaggtgctgttcccaaaggagaaaacactgccctccagtggtcttcaatgaagaaatggaaatagtttcaggtggaaaccaggcttcttggaagacttcaaactatgccaaatggtctgatttcaccatagagattctttgctgaagaatgcagctgtattaaaggaagaaagaaaaccaagctacagctccttataattcaacaagcatttaaaagatttataaagatggtgcaattatgtatttaagctgcttcaacacaagttcttgcctttcactcccaccctgtggcttacactggtattacatctattctgacatttaaaaatcaacattaaagaacatattgtaataatgtattctatggtttaaatatttaaaaaattttacatcatacctagaaagtgttgtgtactttctaaagcttataaactgaaaaggatttgaagaatcctaatacagaatcataagttataattcatccaaaattgtatagttcttaaatttcaaatccaaaccagtggatatctgtctttagtgacatttagattttattcaattaaggtcattgtagctattataaatggaagattttacttcattgtgtcttatcactgaagtacttcactcttgcttttcaaaagatttctttcaatttcttcagagtcttatttgttctctaagacaaagacttgatttcagtttgtttttcttaaaattaatatcttctccaatttatttcccagttttttctaaataaatactttaaatatatagagtattatttttatagtatctcagaattagtaaaataaaatcttgccaatacaaacaatttgtgattttatacattatattgtcagactgaagtaaaataaagattattttgttgctgc

SEQ ID NO: 291097 - DNA, 1077 bp, Homo sapiens
ggggtaaattccaagcacagcctgaatgagaagtacaactcatttcctgtaacctagatgcctttttaacacatctatgcagtctccatgtgaaaccaggtgctgttcccaaaggagaaaacactgccctccagtggtcttcaatgaagaaatggaaatagtttcaggtggaaaccaggcttcttggaagacttcaaactatgccaaatggtctgatttcaccatagagaaatctaagctgagacaacttaaaactcaaatgagatgcatgaaagcacttgtcatcctgacaccatattgagaaacatgatcagattctttgctgaagaatgcagctgtattaaaggaagaaagaaaaccaagctacagctccttataattcaacaagcatttaaaagatttataaagatggtgcaattatgtatttaagctgcttcaacacaagttcttgcctttcactcccaccctgtggcttacactggtattacatctattctgacatttaaaaatcaacattaaagaacatattgtaataatgtattctatggtttaaatatttaaaaaattttacatcatacctagaaagtgttgtgtactttctaaagcttataaactgaaaaggatttgaagaatcctaatacagaatcataagttataattcatccaaaattgtatagttcttaaatttcaaatccaaaccagtggatatctgtctttagtgacatttagattttattcaattaaggtcattgtagctattataaatggaagattttacttcattgtgtcttatcactgaagtacttcactcttgcttttcaaaagatttctttcaatttcttcagagtcttatttgttctctaagacaaagacttgatttcagtttgtttttcttaaaattaatatcttctccaatttatttcccagttttttctaaataaatactttaaatatatagagtattatttttatagtatctcagaattagtaaaataaaatcttgccaatacaaacaatttgtgattttatacattatattgtcagactgaagtaaaataaagattattttgttgctgc

SEQ ID NO: 291098 - DNA, 598 bp, Homo sapiens
ggggtaaattccaagcacagcctgaatgagaagtacaactcatttcctgtaacctagatgcctttttaacacatctatgcagtctccatgtgaaaccaggtgctgttcccaaaggagaaaacactgccctccagtggtcttcaatgaagaaatggaaatagtttcaggtggaaaccaggcttcttggaagacttcaaactatgccaaatggtctgatttcaccatagagaatgttatactattaattgccaatttgcatatgtgtgcagctgctgttttggctctgaactcaatccgataagcttgctggaggtatcgcagagcacttggcagctttcctatttgaaaagaaagcctctcccctctacagaacagctgatcgtctatcagcgatagaccctgatggcgtgaattacaattacactacttttcacactaaatctgggtgatagctacttggaaagaagtttcatcattttttaccacaaactggaaaaagaattacatggtcatgctgtgcttttaaaggcagtttggttcacttttgtctatttaacacctaattccaagaagtccataggcatctagagatctgaat

SEQ ID NO: 291099 - DNA, 3195 bp, Homo sapiens
cggcgctcctaggagcaggcgttcccgactccggcaagagggtggcgcctggactctcgccctcagagggaggcccgtcccacggtctgtggctacggatcccaggaccctcttcgcgggcgattcgcgtagcctcagattgcctcggatgatggcctgcgactgacagtctctcagctcttctcagctctcctgaggctgcagctgtcagctccctgatcctcagcacttgcctggaccagtgcgggtctgccacgccctgttcagccatccctgtcctgttgtgtcgtgcaagccacatctgtccacacccccaccacccaccagtgctggctctcctctcttctcccctgtgctcccagcatgcctcgtggccggtgccgtcagcagggccctcgcattcccatctgggcagccgccaattatgccaacgcacatccatggcagcagatggacaaggcgtctcctggggtggcatacaccccccttgtggatccctggattgagcggccctgctgtggggacaccgtgtgtgtgcgaacgaccatggagcagaagagcacagctagtggcacttgtggcggtaaacctgcagaaaggggtcccctagctgggcacatgcccagctcccgaccccacagggtggacttctgctgggtaccaggctcagacccaggcacctttgatggctccccgtggctactggaccgcttcttggcccagctgggcgattacatgtccttccactttgagcactatcaggacaacatcagccgtgtctgcgagatcctcaggcgcctaacaggccgagcccaggcctgggcagccccctaccttgatggggacctgcccctgcctgacgattacgagctcttctgccaggatctcaaggaagttgttcaagacccgaacagttttgctgagtaccatgctgtggttacctgtcccctgcccctggcctccagccagctgccagtggcccctcagctgcctgtggtgaggcaatacttagctaggttcttagagggcctggcactcgacatgggtactgcccccaggtctttaccagccgccatggccacccctgctgtgtctgggtccaactctgtatctagaagtgctctgttcgagcagcagctgaccaaggagagcacccctgggcccaaggagcccccagtcctgcccagttctacatgtagctccaagcctggtcctgtggaaccagcctcttcccagccagaggaggcagcccccacacctgtccctagactgtcggagtcagctaatcctcctgcccagagaccagacccagctcatccaggaggtccaaaaccccagaaaacagaggaggaggttttggagacagagggagaccaggaggtgtccttaggtaccccacaggaggtggtggaggccccggagaccccaggagagccaccactttctcctgggttctgaacacagcccaggtgggaacaatgctgcccctcatgatgaagtggcctgtgtggcttgagcgccccatagtccccagtcagagcagagtggtgtccccagatgacttcagaccccatagctgggcaagatgcgcttgttttggactctgcgctgagcagaaccagctcccccaactccagcagagcttgacctccgccctgtgccctttccctgctgctggctctctgctgcatccctgcccgtcttctgggagtgccgtctcacccaggcctgctcccacgagggggtcgttttgtagatcaactctcagcagatagttgcatcatctttgtcacctccacccccatcgtctgccctgttgggacctcgttcctgtatggggtttctgtgtctgtccccctagccccaccctctctgctccctgtgacttctgtcccagctggaatgtgaggaaggctgcctggaggaagtggccactttgattctgggggatgagtgggatagcatcttggcaaagaatgatgtttcctgtgggattaccagcagttctgggcagctggaaggtttggatgcaggaaggtgggatgcaagccccttgccaggctcagctgcaggcattcgccctttgtgtgttaacactgtagctctaatcgtgcctggtgttctgaagcaggctcctcttccctgctgctgtgctgccatcccctgctcactccgcactcgcatgcattgcggattcagcacttaagccctagtgtgtaaatgacttggatctccctcctggcagactgtgaccctcagcacaggggctctgtcttagtcagctctgtggcctggtacacaattggtgctcattaaacacgtgttggattactggctgaggtggtgcagtggctgcctaccagcaagtctttgtttcccattctgtcaggagcagaggcctggccatgagcattccaggtcagcattgcagctgtggtttctggcaggggctttgagggtccaagggtctgatcaaagaagctgggtggggctgagtagggggtgggtggctctgcaggtagagaactgacttccgagagctgtaggtgaagtgaggaccaggcagcagtccagagctgtgaggccccaggcccagaggaatggaatgaagaaagacctgttccacacaaggaggggttttctagtggaagctgagcttggaagctcctggagccaagtttaccacaggataggcaggtacagccgcccagtgtgtgcagtgtgtgcccactctggtgcttggacaagaagttcaagtccctttcaggtttacaattgtgaaaacaacaaaacaacaccttcctggaaagtaggaagaaaaagcagaaatgtgaattggaaatacagccaactattttaggaaaaactaattagcaagcatctgattaaacttattcagaaactggccgggagcagtgtctcacacctgtaatcccagcactctgggaggccaaggtgggtggatcacctgaggtcaggagttcaagaccagcctgaccagcatggagaaatccatctctcctaaaaatacaaaattagccaagtgtggtggtgcatgcctgtaatctcagctacttgggaggctgaggcagaagaattgcttgaacccaggaggcagagggtgtggtgagccgagatcacgccattgcactccagcctggacaacaagagtgaaactccatcccaaaaaaaaaa

SEQ ID NO: 291100 - DNA, 1380 bp, Homo sapiens
ccaggtcagcattgcagctgtggtttctggcaggggctttgagggtccaagggctctctgctccctgtgacttctgtcccagctggaatgtgaggaaggctgcctggaggaagtggccactttgattctgggggatgagtgggatagcatcttggcaaagaatgatgtttcctgtgggattaccagcagttctgggcagctggaaggtttggatgcaggaaggtgggatgcaagccccttgccaggctcagctgcaggcattcgccctttgtgtgttaacactgtagctctaatcgtgcctggtgttctgaagcaggctcctcttccctgctgctgtgctgccatcccctgctcactccgcactcgcatgcattgcggattcagcacttaagccctagtgtgtaaatgacttggatctccctcctggcagactgtgaccctcagcacaggggctctgtcttagtcagctctgtggcctggtacacaattggtgctcattaaacacgtgttggattactggctgaggtggtgcagtggctgcctaccagcaagtctttgtttcccattctgtcaggagcagaggcctggccatgagcattccaggtcagcattgcagctgtggtttctggcaggggctttgagggtccaagggtctgatcaaagaagctgggtggggctgagtagggggtgggtggctctgcaggtagagaactgacttccgagagctgtaggtgaagtgaggaccaggcagcagtccagagctgtgaggccccaggcccagaggaatggaatgaagaaagacctgttccacacaaggaggggttttctagtggaagctgagcttggaagctcctggagccaagtttaccacaggataggcaggtacagccgcccagtgtgtgcagtgtgtgcccactctggtgcttggacaagaagttcaagtccctttcaggtttacaattgtgaaaacaacaaaacaacaccttcctggaaagtaggaagaaaaagcagaaatgtgaattggaaatacagccaactattttaggaaaaactaattagcaagcatctgattaaacttattcagaaactggccgggagcagtgtctcacacctgtaatcccagcactctgggaggccaaggtgggtggatcacctgaggtcaggagttcaagaccagcctgaccagcatggagaaatccatctctcctaaaaatacaaaattagccaagtgtggtggtgcatgcctgtaatctcagctacttgggaggctgaggcagaagaattgcttgaacccaggaggcagagggtgtggtgagccgagatcacgccattgcactccagcctggacaacaagagtgaaactccatcccaaaaaaaaaa

SEQ ID NO: 291101 - DNA, 2390 bp, Homo sapiens
cggcgctcctaggagcaggcgttcccgactccggcaagagggtggcgcctggactctcgccctcagagggaggcccgtcccacggtctgtggctacggatcccaggaccctcttcgcgggcgattcgcgtagcctcagattgcctcggatgatggcctgcgactgacagtctctcagctcttctcagctctcctgaggctgcagctgtcagctccctgatcctcagcacttgcctggaccagtgcgggtctgccacgccctgttcagccatccctgtcctgttgtgtcgtgcaagccacatctgtccacacccccaccacccaccagtgctggctctcctctcttctcccctgtgctcccagcatgcctcgtggccggtgccgtcagcagggccctcgcattcccatctgggcagccgccaattatgccaacgcacatccatggcagcagatggacaaggcgtctcctggggtggcatacaccccccttgtggatccctggattgagcggccctgctgtggggacaccgtgtgtgtgcgaacgaccatggagcagaagagcacagctagtggcacttgtggcggtaaacctgcagaaaggggtcccctagctgggcacatgcccagctcccgaccccacagggtggacttctgctgggtaccaggctcagacccaggcacctttgatggctccccgtggctactggaccgcttcttggcccagctgggcgattacatgtccttccactttgagcactatcaggacaacatcagccgtgtctgcgagatcctcaggcgcctaacaggccgagcccaggcctgggcagccccctaccttgatggggacctgcccctgcctgacgattacgagctcttctgccaggatctcaaggaagttgttcaagacccgaacagttttgctgagtaccatgctgtggttacctgtcccctgcccctggcctccagccagctgccagtggcccctcagctgcctgtggtgaggcaatacttagctaggttcttagagggcctggcactcgacatgggtactgcccccaggtctttaccagccgccatggccacccctgctgtgtctgggtccaactctgtatctagaagtgctctgttcgagcagcagctgaccaaggagagcacccctgggcccaaggagcccccagtcctgcccagttctacatgtagctccaagcctggtcctgtggaaccagcctcttcccagccagaggaggcagcccccacacctgtccctagactgtcggagtcagctaatcctcctgcccagagaccagacccagctcatccaggaggtccaaaaccccagaaaacagaggaggaggttttggagacagagggagaccaggaggtgtccttaggtaccccacaggaggtggtggaggccccggagaccccaggagagccaccactttctcctgggttctgaacacagcccaggtgggaacaatgctgcccctcatgatgaagtggcctgtgtggcttgagcgccccatagtccccagtcagagcagagtggtgtccccagatgacttcagaccccatagctgggcaagatgcgcttgttttggactctgcgctgagcagaaccagctcccccaactccagcagagcttgacctccgccctgtgccctttccctgctgctggctctctgctgcatccctgcccgtcttctgggagtgccgtctcacccaggcctgctcccacgagggggtcgttttgtagatcaactctcagcagatagttgcatcatctttgtcacctccacccccatcaaacaccccccttggtgtcttccacactggctgggactgaactgggtctgccacgtctgccctgttgggacctcgttcctgtatggggtttctgtgtctgtccccctagccccaccctctctgctccctgtgacttctgtcccagctggaatgtgaggaaggctgcctggaggaagtggccactttgattctgggggatgagtgggatagcatcttggcaaagaatgatgtttcctgtgggattaccagcagttctgggcagctggaaggtttggatgcaggaaggtgggatgcaagccccttgccaggctcagctgcaggcattcgccctttgtgtgttaacactgtagctctaatcgtgcctggtgttctgaagcaggctcctcttccctgctgctgtgctgccatcccctgctcactccgcactcgcatgcattgcggattcagcacttaagccctagtgtgtaaatgacttggatctccctcctggcagactgtgaccctcagcacaggggctctgtcttagtcagctctgtggcctggtacacaattggtgctcattaaacacgtgttggattactggc

SEQ ID NO: 291102 - DNA, 418 bp, Homo sapiens
tccctctcagacatttattggttcattcattcgttcattttgctgtaactcacagtggccctccccatcctaaggtgcactgctgggattggtctatgtgctgatgatgttctccttgtcttcagaggaaaaagaatgcctgtgtttcgaagttccttcttaggacgaaaccagctgaagctggcgaaatccaagatggcgcctctgaagagcctctggctttatcatcatcctgttctcatgctaaacaacatgtcgccatgacaacgactggaagagaccaagaagggacagaaaaaaaggggtttcttgattccgggaaaaatctccgttctttcccaaggaaagcacgaatattcccccccgtgctcttaatgcccagccccttcattaaagacaccctacctctgaaacttcc

SEQ ID NO: 291103 - DNA, 2578 bp, Homo sapiens
actcactatagggctcgagcggccgcctgggcaggtgcttaggacctgtgtatgacgtttcacctgtgatctgttctttcggtagccactgactttgagttacaggaaggtctccgaagatttgtgtcaaatgacgtcaatggccagcttgttttcttttactagtccagcagtaaagcgattgttgggctggaaacaaggtgatgaggaggagaaatgggcagaaaaggcagttgatgctttggtgaagaaactaaaaaagaaaaagggtgccatggaggaactggagaaagccttgagcagtccaggacagccgagtaaatgtgtcactattcccagatctttagatggacgcctgcaggtttctcacagaaaaggcttaccccatgttatatattgtcgtgtttggcgctggccggatttgcagagtcatcatgagctaaagccgttggatatttgtgaatttccttttggatctaagcaaaaagaagtttgtatcaacccataccactataagagagtggagagtccagtcttacctccagtattagtgcctcgtcataatgaattcaatccacaacacagccttctggttcagtttaggaacctgagccacaatgaaccacacatgccacaaaatgccacgtttccagattctttccaccagcccaacaacactccttttcccttatctccaaacagcccttatcccccttctcctgctagcagcacatatcccaactccccagcaagttctggaccaggaagtccatttcagctcccagctgatacgcctcctcctgcctatatgccacctgatgatcagatgggtcaagataattcccagcctatggatacaagcaataatatgattcctcagattatgcccagtatatccagcagggatgttcagcctgttgcctatgaagagcctaaacattggtgttcaatagtctactatgaattaaacaatcgtgttggagaagcttttcatgcatcttctactagtgtgttagtagatggattcacagatccttcaaataacaaaagtagattctgcttgggtttgttgtcaaatgttaatcgtaattcgacaattgaaaacactaggcgacatattggaaaaggtgttcatctgtactatgttggtggagaggtgtatgcggaatgcctcagtgacagcagcatatttgtacagagtaggaactgcaactttcatcatggctttcatcccaccactgtctgtaagattcccagcagctgcagcctcaaaatttttaacaatcaggagtttgctcagcttctggctcaatctgtcaaccatgggtttgaggcagtatatgagctcaccaaaatgtgtaccattcggatgagttttgtcaagggttggggagcagaatatcaccggcaggatgtaaccagcaccccatgttggattgagattcatcttcatgggcctcttcagtggctggataaagtccttactcagatgggctcccctctgaaccccatatcttctgtttcataatgcagaagtattcttttcaattatattgttagtggacttgttttaattttagagaaactttgagtacagatactgtgagcttacattgaaaacagatattacagcttatttttttctacataattgtgaccaatacatttgtattttgtgatgaatctacatttgtttgtattcatgttcatgtgattaactcttagaagtgttgtaaaagatgcagagtaagtattatgccccagttcagaaatttggcattgatcttaaactggaacatgcttttactttattgccctaacaattttttattaaatttatttgaaaatgcatcacatgatgaaaaattatagtagcttataagagggcatatacagtgaagagtaagttttccctcctactctcgatcttccagaagctgtacttttaccagtttctttgtcccaccaacttaaaaaaaaaaagtacaattcattgttttgcaaaagtgtatggtaggggcttaaaagaaactataaagttttatttgaatgaacactatgcactgctgtaactggtagtgttcagtaaaagcaaaatgatagttttctagatgacataaaatttacatttaatacagataagtgttcttcagtgtaatgtgacttcatgctatatatcttttgtaagacatttccttttttaaaaaaatttttgcaaataactgatctcaagtatatgtcatttactcaaaatctgtcataagcattactttatagctagtgacagtgcatgcacagccttgttcaactatgtttgctgcttttggacaatgttgcaagaactctatttttgacatgcattaatcttttattttgcacttttatgggtgacagtttttagcataacctttgataaaatacactcaagtgacttggacttagatgcttatccttacgtccttggtaccttttttgtattaacaaacactgcaatttatagattacatttgtaggaagttatgcttttttctggtttttgttttactttcaacctaggttataagactgttattctata

SEQ ID NO: 291104 - DNA, 2808 bp, Homo sapiens
ccgggtcctgggcgagcgggcgccgtgcgcgtgtcccgcggccgagctgctaataaagttgcagcgaggagaagcgcagcgacggcgtcgggagagcgcgcctagccggctcgcgaaaaggaagctgttgaagttattgaagtacctgttgctatattctaagaaattaaaatgtccagaaatctgcctctgacttgacccaatgaaagaagcatatggcacttgtgaagataaatgttactcctccctttttaattggaacttctgcttaggacctgtgtatgacgtttcacctgtgatctgttctttcggtagccactgactttgagttacaggaaggtctccgaagatttgtgtcaaatgacgtcaatggccagcttgttttcttttactagtccagcagtaaagcgattgttgggctggaaacaaggtgatgaggaggagaaatgggcagaaaaggcagttgatgctttggtgaagaaactaaaaaagaaaaagggtgccatggaggaactggagaaagccttgagcagtccaggacagccgagtaaatgtgtcactattcccagatctttagatggacgcctgcaggtttctcacagaaaaggcttaccccatgttatatattgtcgtgtttggcgctggccggatttgcagagtcatcatgagctaaagccgttggatatttgtgaatttccttttggatctaagcaaaaagaagtttgtatcaacccataccactataagagagtggagagtccagtcttacctccagtattagtgcctcgtcataatgaattcaatccacaacacagccttctggttcagtttaggaacctgagccacaatgaaccacacatgccacaaaatgccacgtttccagattctttccaccagcccaacaacactccttttcccttatctccaaacagcccttatcccccttctcctgctagcagcacatatcccaactccccagcaagttctggaccaggaagtccatttcagctcccagctgatacgcctcctcctgcctatatgccacctgatgatcagatgggtcaagataattcccagcctatggatacaagcaataatatgattcctcagattatgcccagtatatccagcagggatgttcagcctgttgcctatgaagagcctaaacattggtgttcaatagtctactatgaattaaacaatcgtgttggagaagcttttcatgcatcttctactagtgtgttagtagatggattcacagatccttcaaataacaaaagtagattctgcttgggtttgttgtcaaatgttaatcgtaattcgacaattgaaaacactaggcgacatattggaaaaggtgttcatctgtactatgttggtggagaggtgtatgcggaatgcctcagtgacagcagcatatttgtacagagtaggaactgcaactttcatcatggctttcatcccaccactgtctgtaagattcccagcagctgcagcctcaaaatttttaacaatcaggagtttgctcagcttctggctcaatctgtcaaccatgggtttgaggcagtatatgagctcaccaaaatgtgtaccattcggatgagttttgtcaagggttggggagcagaatatcaccggcaggatgtaaccagcaccccatgttggattgagattcatcttcatgggcctcttcagtggctggataaagtccttactcagatgggctcccctctgaaccccatatcttctgtttcataatgcagaagtattcttttcaattatattgttagtggacttgttttaattttagagaaactttgagtacagatactgtgagcttacattgaaaacagatattacagcttatttttttctacataattgtgaccaatacatttgtattttgtgatgaatctacatttgtttgtattcatgttcatgtgattaactcttagaagtgttgtaaaagatgcagagtaagtattatgccccagttcagaaatttggcattgatcttaaactggaacatgcttttactttattgccctaacaattttttattaaatttatttgaaaatgcatcacatgatgaaaaattatagtagcttataagagggcatatacagtgaagagtaagttttccctcctactctcgatcttccagaagctgtacttttaccagtttctttgtcccaccaacttaaaaaaaaaaagtacaattcattgttttgcaaaagtgtatggtaggggcttaaaagaaactataaagttttatttgaatgaacactatgcactgctgtaactggtagtgttcagtaaaagcaaaatgatagttttctagatgacataaaatttacatttaatacagataagtgttcttcagtgtaatgtgacttcatgctatatatcttttgtaagacatttccttttttaaaaaaatttttgcaaataactgatctcaagtatatgtcatttactcaaaatctgtcataagcattactttatagctagtgacagtgcatgcacagccttgttcaactatgtttgctgcttttggacaatgttgcaagaactctatttttgacatgcattaatcttttattttgcacttttatgggtgacagtttttagcataacctttgataaaatacactcaagtgacttggacttagatgcttatccttacgtccttggtaccttttttgtattaacaaacactgcaatttatagattacatttgtaggaagttatgcttttttctggtttttgttttactttcaacctaggttataagactgttattctata

SEQ ID NO: 291105 - DNA, 3300 bp, Homo sapiens
tgataggactgcggtgctcggccgggcagcctgggctgctgcactgcgaagctgttccaatggcttgatgaatccgtgccgccgtcgctttgtgtttcaaagataaggatccgcgcttatcggtgggaattacactctgggcagttgtgaccggctactgcaatcagctggtagttagacctggtttctgccacttgccatgtcagttttcaccactgcaaggatttcttctacttcatgtaaacttctctgtgctgcaaagagaatgccaaagcagcgtctttttgccttcaccatattcagccgctggccgggtcctatacttcaatatcagggctcaaattaatattccagtctcttcccctccccttttcccctctcctcctttcagctgctgttactacgtggagtttggagcctaagctttgaaaactcccatgtggcgcgcccgtcttaagtctgagcatgctcagtagccaaaacagatttttggttgcagaactcgggcgaggatacttggggtatttggacgtttgccggcttcccaacagaatgttccggttctggtggtgatggcattggagaatggggcttaggcaagcctgtagaaaggaagctgttgaagttattgaagtacctgttgctatattctaagaaattaaaatgtccagaaatctgcctctgacttgacccaatgaaagaagcatatggcacttgtgaagataaatgttactcctccctttttaattggaacttctgcttaggacctgtgtatgacgtttcacctgtgatctgttctttcggtagccactgactttgagttacaggaaggtctccgaagatttgtgtcaaatgacgtcaatggccagcttgttttcttttactagtccagcagtaaagcgattgttgggctggaaacaaggtgatgaggaggagaaatgggcagaaaaggcagttgatgctttggtgaagaaactaaaaaagaaaaagggtgccatggaggaactggagaaagccttgagcagtccaggacagccgagtaaatgtgtcactattcccagatctttagatggacgcctgcaggtttctcacagaaaaggcttaccccatgttatatattgtcgtgtttggcgctggccggatttgcagagtcatcatgagctaaagccgttggatatttgtgaatttccttttggatctaagcaaaaagaagtttgtatcaacccataccactataagagagtggagagtccagtcttacctccagtattagtgcctcgtcataatgaattcaatccacaacacagccttctggttcagtttaggaacctgagccacaatgaaccacacatgccacaaaatgccacgtttccagattctttccaccagcccaacaacactccttttcccttatctccaaacagcccttatcccccttctcctgctagcagcacatatcccaactccccagcaagttctggaccaggaagtccatttcagctcccagctgatacgcctcctcctgcctatatgccacctgatgatcagatgggtcaagataattcccagcctatggatacaagcaataatatgattcctcagattatgcccagtatatccagcagggatgttcagcctgttgcctatgaagagcctaaacattggtgttcaatagtctactatgaattaaacaatcgtgttggagaagcttttcatgcatcttctactagtgtgttagtagatggattcacagatccttcaaataacaaaagtagattctgcttgggtttgttgtcaaatgttaatcgtaattcgacaattgaaaacactaggcgacatattggaaaaggtgttcatctgtactatgttggtggagaggtgtatgcggaatgcctcagtgacagcagcatatttgtacagagtaggaactgcaactttcatcatggctttcatcccaccactgtctgtaagattcccagcagctgcagcctcaaaatttttaacaatcaggagtttgctcagcttctggctcaatctgtcaaccatgggtttgaggcagtatatgagctcaccaaaatgtgtaccattcggatgagttttgtcaagggttggggagcagaatatcaccggcaggatgtaaccagcaccccatgttggattgagattcatcttcatgggcctcttcagtggctggataaagtccttactcagatgggctcccctctgaaccccatatcttctgtttcataatgcagaagtattcttttcaattatattgttagtggacttgttttaattttagagaaactttgagtacagatactgtgagcttacattgaaaacagatattacagcttatttttttctacataattgtgaccaatacatttgtattttgtgatgaatctacatttgtttgtattcatgttcatgtgattaactcttagaagtgttgtaaaagatgcagagtaagtattatgccccagttcagaaatttggcattgatcttaaactggaacatgcttttactttattgccctaacaattttttattaaatttatttgaaaatgcatcacatgatgaaaaattatagtagcttataagagggcatatacagtgaagagtaagttttccctcctactctcgatcttccagaagctgtacttttaccagtttctttgtcccaccaacttaaaaaaaaaaagtacaattcattgttttgcaaaagtgtatggtaggggcttaaaagaaactataaagttttatttgaatgaacactatgcactgctgtaactggtagtgttcagtaaaagcaaaatgatagttttctagatgacataaaatttacatttaatacagataagtgttcttcagtgtaatgtgacttcatgctatatatcttttgtaagacatttccttttttaaaaaaatttttgcaaataactgatctcaagtatatgtcatttactcaaaatctgtcataagcattactttatagctagtgacagtgcatgcacagccttgttcaactatgtttgctgcttttggacaatgttgcaagaactctatttttgacatgcattaatcttttattttgcacttttatgggtgacagtttttagcataacctttgataaaatacactcaagtgacttggacttagatgcttatccttacgtccttggtaccttttttgtattaacaaacactgcaatttatagattacatttgtaggaagttatgcttttttctggtttttgttttactttcaacctaggttataagactgttattctata

SEQ ID NO: 291106 - DNA, 2892 bp, Homo sapiens
ccgggtcctgggcgagcgggcgccgtgcgcgtgtcccgcggccgagctgctaataaagttgcagcgaggagaagcgcagcgacggcgtcgggagagcgcgcctagccggctcgcgaaaaggaagctgttgaagttattgaagtacctgttgctatattctaagaaattaaaatgtccagaaatctgcctctaaatgggatctcactatgttgctcagactggacgtgattgaactcctgggctcaagtgagtctcccgaataactgggattacaggacttgacccaatgaaagaagcatatggcacttgtgaagataaatgttactcctccctttttaattggaacttctgcttaggacctgtgtatgacgtttcacctgtgatctgttctttcggtagccactgactttgagttacaggaaggtctccgaagatttgtgtcaaatgacgtcaatggccagcttgttttcttttactagtccagcagtaaagcgattgttgggctggaaacaaggtgatgaggaggagaaatgggcagaaaaggcagttgatgctttggtgaagaaactaaaaaagaaaaagggtgccatggaggaactggagaaagccttgagcagtccaggacagccgagtaaatgtgtcactattcccagatctttagatggacgcctgcaggtttctcacagaaaaggcttaccccatgttatatattgtcgtgtttggcgctggccggatttgcagagtcatcatgagctaaagccgttggatatttgtgaatttccttttggatctaagcaaaaagaagtttgtatcaacccataccactataagagagtggagagtccagtcttacctccagtattagtgcctcgtcataatgaattcaatccacaacacagccttctggttcagtttaggaacctgagccacaatgaaccacacatgccacaaaatgccacgtttccagattctttccaccagcccaacaacactccttttcccttatctccaaacagcccttatcccccttctcctgctagcagcacatatcccaactccccagcaagttctggaccaggaagtccatttcagctcccagctgatacgcctcctcctgcctatatgccacctgatgatcagatgggtcaagataattcccagcctatggatacaagcaataatatgattcctcagattatgcccagtatatccagcagggatgttcagcctgttgcctatgaagagcctaaacattggtgttcaatagtctactatgaattaaacaatcgtgttggagaagcttttcatgcatcttctactagtgtgttagtagatggattcacagatccttcaaataacaaaagtagattctgcttgggtttgttgtcaaatgttaatcgtaattcgacaattgaaaacactaggcgacatattggaaaaggtgttcatctgtactatgttggtggagaggtgtatgcggaatgcctcagtgacagcagcatatttgtacagagtaggaactgcaactttcatcatggctttcatcccaccactgtctgtaagattcccagcagctgcagcctcaaaatttttaacaatcaggagtttgctcagcttctggctcaatctgtcaaccatgggtttgaggcagtatatgagctcaccaaaatgtgtaccattcggatgagttttgtcaagggttggggagcagaatatcaccggcaggatgtaaccagcaccccatgttggattgagattcatcttcatgggcctcttcagtggctggataaagtccttactcagatgggctcccctctgaaccccatatcttctgtttcataatgcagaagtattcttttcaattatattgttagtggacttgttttaattttagagaaactttgagtacagatactgtgagcttacattgaaaacagatattacagcttatttttttctacataattgtgaccaatacatttgtattttgtgatgaatctacatttgtttgtattcatgttcatgtgattaactcttagaagtgttgtaaaagatgcagagtaagtattatgccccagttcagaaatttggcattgatcttaaactggaacatgcttttactttattgccctaacaattttttattaaatttatttgaaaatgcatcacatgatgaaaaattatagtagcttataagagggcatatacagtgaagagtaagttttccctcctactctcgatcttccagaagctgtacttttaccagtttctttgtcccaccaacttaaaaaaaaaaagtacaattcattgttttgcaaaagtgtatggtaggggcttaaaagaaactataaagttttatttgaatgaacactatgcactgctgtaactggtagtgttcagtaaaagcaaaatgatagttttctagatgacataaaatttacatttaatacagataagtgttcttcagtgtaatgtgacttcatgctatatatcttttgtaagacatttccttttttaaaaaaatttttgcaaataactgatctcaagtatatgtcatttactcaaaatctgtcataagcattactttatagctagtgacagtgcatgcacagccttgttcaactatgtttgctgcttttggacaatgttgcaagaactctatttttgacatgcattaatcttttattttgcacttttatgggtgacagtttttagcataacctttgataaaatacactcaagtgacttggacttagatgcttatccttacgtccttggtaccttttttgtattaacaaacactgcaatttatagattacatttgtaggaagttatgcttttttctggtttttgttttactttcaacctaggttataagactgttattctata

SEQ ID NO: 291107 - DNA, 2814 bp, Homo sapiens
tgataggactgcggtgctcggccgggcagcctgggctgctgcactgcgaagctgttccaatggcttgatgaatccgtgccgccgtcgctttgtgtttcaaagataaggatccgcgcttatcgaaaggaagctgttgaagttattgaagtacctgttgctatattctaagaaattaaaatgtccagaaatctgcctctgacttgacccaatgaaagaagcatatggcacttgtgaagataaatgttactcctccctttttaattggaacttctgcttaggacctgtgtatgacgtttcacctgtgatctgttctttcggtagccactgactttgagttacaggaaggtctccgaagatttgtgtcaaatgacgtcaatggccagcttgttttcttttactagtccagcagtaaagcgattgttgggctggaaacaaggtgatgaggaggagaaatgggcagaaaaggcagttgatgctttggtgaagaaactaaaaaagaaaaagggtgccatggaggaactggagaaagccttgagcagtccaggacagccgagtaaatgtgtcactattcccagatctttagatggacgcctgcaggtttctcacagaaaaggcttaccccatgttatatattgtcgtgtttggcgctggccggatttgcagagtcatcatgagctaaagccgttggatatttgtgaatttccttttggatctaagcaaaaagaagtttgtatcaacccataccactataagagagtggagagtccagtcttacctccagtattagtgcctcgtcataatgaattcaatccacaacacagccttctggttcagtttaggaacctgagccacaatgaaccacacatgccacaaaatgccacgtttccagattctttccaccagcccaacaacactccttttcccttatctccaaacagcccttatcccccttctcctgctagcagcacatatcccaactccccagcaagttctggaccaggaagtccatttcagctcccagctgatacgcctcctcctgcctatatgccacctgatgatcagatgggtcaagataattcccagcctatggatacaagcaataatatgattcctcagattatgcccagtatatccagcagggatgttcagcctgttgcctatgaagagcctaaacattggtgttcaatagtctactatgaattaaacaatcgtgttggagaagcttttcatgcatcttctactagtgtgttagtagatggattcacagatccttcaaataacaaaagtagattctgcttgggtttgttgtcaaatgttaatcgtaattcgacaattgaaaacactaggcgacatattggaaaaggtgttcatctgtactatgttggtggagaggtgtatgcggaatgcctcagtgacagcagcatatttgtacagagtaggaactgcaactttcatcatggctttcatcccaccactgtctgtaagattcccagcagctgcagcctcaaaatttttaacaatcaggagtttgctcagcttctggctcaatctgtcaaccatgggtttgaggcagtatatgagctcaccaaaatgtgtaccattcggatgagttttgtcaagggttggggagcagaatatcaccggcaggatgtaaccagcaccccatgttggattgagattcatcttcatgggcctcttcagtggctggataaagtccttactcagatgggctcccctctgaaccccatatcttctgtttcataatgcagaagtattcttttcaattatattgttagtggacttgttttaattttagagaaactttgagtacagatactgtgagcttacattgaaaacagatattacagcttatttttttctacataattgtgaccaatacatttgtattttgtgatgaatctacatttgtttgtattcatgttcatgtgattaactcttagaagtgttgtaaaagatgcagagtaagtattatgccccagttcagaaatttggcattgatcttaaactggaacatgcttttactttattgccctaacaattttttattaaatttatttgaaaatgcatcacatgatgaaaaattatagtagcttataagagggcatatacagtgaagagtaagttttccctcctactctcgatcttccagaagctgtacttttaccagtttctttgtcccaccaacttaaaaaaaaaaagtacaattcattgttttgcaaaagtgtatggtaggggcttaaaagaaactataaagttttatttgaatgaacactatgcactgctgtaactggtagtgttcagtaaaagcaaaatgatagttttctagatgacataaaatttacatttaatacagataagtgttcttcagtgtaatgtgacttcatgctatatatcttttgtaagacatttccttttttaaaaaaatttttgcaaataactgatctcaagtatatgtcatttactcaaaatctgtcataagcattactttatagctagtgacagtgcatgcacagccttgttcaactatgtttgctgcttttggacaatgttgcaagaactctatttttgacatgcattaatcttttattttgcacttttatgggtgacagtttttagcataacctttgataaaatacactcaagtgacttggacttagatgcttatccttacgtccttggtaccttttttgtattaacaaacactgcaatttatagattacatttgtaggaagttatgcttttttctggtttttgttttactttcaacctaggttataagactgttattctata

SEQ ID NO: 291108 - DNA, 2733 bp, Homo sapiens
ccgggtcctgggcgagcgggcgccgtgcgcgtgtcccgcggccgagctgctaataaagttgcagcgaggagaagcgcagcgacggcgtcgggagagcgcgcctagccggctcgcgagacttgacccaatgaaagaagcatatggcacttgtgaagataaatgttactcctccctttttaattggaacttctgcttaggacctgtgtatgacgtttcacctgtgatctgttctttcggtagccactgactttgagttacaggaaggtctccgaagatttgtgtcaaatgacgtcaatggccagcttgttttcttttactagtccagcagtaaagcgattgttgggctggaaacaaggtgatgaggaggagaaatgggcagaaaaggcagttgatgctttggtgaagaaactaaaaaagaaaaagggtgccatggaggaactggagaaagccttgagcagtccaggacagccgagtaaatgtgtcactattcccagatctttagatggacgcctgcaggtttctcacagaaaaggcttaccccatgttatatattgtcgtgtttggcgctggccggatttgcagagtcatcatgagctaaagccgttggatatttgtgaatttccttttggatctaagcaaaaagaagtttgtatcaacccataccactataagagagtggagagtccagtcttacctccagtattagtgcctcgtcataatgaattcaatccacaacacagccttctggttcagtttaggaacctgagccacaatgaaccacacatgccacaaaatgccacgtttccagattctttccaccagcccaacaacactccttttcccttatctccaaacagcccttatcccccttctcctgctagcagcacatatcccaactccccagcaagttctggaccaggaagtccatttcagctcccagctgatacgcctcctcctgcctatatgccacctgatgatcagatgggtcaagataattcccagcctatggatacaagcaataatatgattcctcagattatgcccagtatatccagcagggatgttcagcctgttgcctatgaagagcctaaacattggtgttcaatagtctactatgaattaaacaatcgtgttggagaagcttttcatgcatcttctactagtgtgttagtagatggattcacagatccttcaaataacaaaagtagattctgcttgggtttgttgtcaaatgttaatcgtaattcgacaattgaaaacactaggcgacatattggaaaaggtgttcatctgtactatgttggtggagaggtgtatgcggaatgcctcagtgacagcagcatatttgtacagagtaggaactgcaactttcatcatggctttcatcccaccactgtctgtaagattcccagcagctgcagcctcaaaatttttaacaatcaggagtttgctcagcttctggctcaatctgtcaaccatgggtttgaggcagtatatgagctcaccaaaatgtgtaccattcggatgagttttgtcaagggttggggagcagaatatcaccggcaggatgtaaccagcaccccatgttggattgagattcatcttcatgggcctcttcagtggctggataaagtccttactcagatgggctcccctctgaaccccatatcttctgtttcataatgcagaagtattcttttcaattatattgttagtggacttgttttaattttagagaaactttgagtacagatactgtgagcttacattgaaaacagatattacagcttatttttttctacataattgtgaccaatacatttgtattttgtgatgaatctacatttgtttgtattcatgttcatgtgattaactcttagaagtgttgtaaaagatgcagagtaagtattatgccccagttcagaaatttggcattgatcttaaactggaacatgcttttactttattgccctaacaattttttattaaatttatttgaaaatgcatcacatgatgaaaaattatagtagcttataagagggcatatacagtgaagagtaagttttccctcctactctcgatcttccagaagctgtacttttaccagtttctttgtcccaccaacttaaaaaaaaaaagtacaattcattgttttgcaaaagtgtatggtaggggcttaaaagaaactataaagttttatttgaatgaacactatgcactgctgtaactggtagtgttcagtaaaagcaaaatgatagttttctagatgacataaaatttacatttaatacagataagtgttcttcagtgtaatgtgacttcatgctatatatcttttgtaagacatttccttttttaaaaaaatttttgcaaataactgatctcaagtatatgtcatttactcaaaatctgtcataagcattactttatagctagtgacagtgcatgcacagccttgttcaactatgtttgctgcttttggacaatgttgcaagaactctatttttgacatgcattaatcttttattttgcacttttatgggtgacagtttttagcataacctttgataaaatacactcaagtgacttggacttagatgcttatccttacgtccttggtaccttttttgtattaacaaacactgcaatttatagattacatttgtaggaagttatgcttttttctggtttttgttttactttcaacctaggttataagactgttattctata

SEQ ID NO: 291109 - DNA, 1896 bp, Homo sapiens
ctgtcgccttaatccaagcctacgttttcacacttctagtaagcctctacctggaggtctacctgggttaggtctacctgcccaggtagacctaacctcccagctgatacgcctcctcctgcctatatgccacctgatgatcagatgggtcaagataattcccagcctatggatacaagcaataatatgattcctcagattatgcccagtatatccagcagggatgttcagcctgttgcctatgaagagcctaaacattggtgttcaatagtctactatgaattaaacaatcgtgttggagaagcttttcatgcatcttctactagtgtgttagtagatggattcacagatccttcaaataacaaaagtagattctgcttgggtttgttgtcaaatgttaatcgtaattcgacaattgaaaacactaggcgacatattggaaaaggtgttcatctgtactatgttggtggagaggtgtatgcggaatgcctcagtgacagcagcatatttgtacagagtaggaactgcaactttcatcatggctttcatcccaccactgtctgtaagattcccagcagctgcagcctcaaaatttttaacaatcaggagtttgctcagcttctggctcaatctgtcaaccatgggtttgaggcagtatatgagctcaccaaaatgtgtaccattcggatgagttttgtcaagggttggggagcagaatatcaccggcaggatgtaaccagcaccccatgttggattgagattcatcttcatgggcctcttcagtggctggataaagtccttactcagatgggctcccctctgaaccccatatcttctgtttcataatgcagaagtattcttttcaattatattgttagtggacttgttttaattttagagaaactttgagtacagatactgtgagcttacattgaaaacagatattacagcttatttttttctacataattgtgaccaatacatttgtattttgtgatgaatctacatttgtttgtattcatgttcatgtgattaactcttagaagtgttgtaaaagatgcagagtaagtattatgccccagttcagaaatttggcattgatcttaaactggaacatgcttttactttattgccctaacaattttttattaaatttatttgaaaatgcatcacatgatgaaaaattatagtagcttataagagggcatatacagtgaagagtaagttttccctcctactctcgatcttccagaagctgtacttttaccagtttctttgtcccaccaacttaaaaaaaaaaagtacaattcattgttttgcaaaagtgtatggtaggggcttaaaagaaactataaagttttatttgaatgaacactatgcactgctgtaactggtagtgttcagtaaaagcaaaatgatagttttctagatgacataaaatttacatttaatacagataagtgttcttcagtgtaatgtgacttcatgctatatatcttttgtaagacatttccttttttaaaaaaatttttgcaaataactgatctcaagtatatgtcatttactcaaaatctgtcataagcattactttatagctagtgacagtgcatgcacagccttgttcaactatgtttgctgcttttggacaatgttgcaagaactctatttttgacatgcattaatcttttattttgcacttttatgggtgacagtttttagcataacctttgataaaatacactcaagtgacttggacttagatgcttatccttacgtccttggtaccttttttgtattaacaaacactgcaatttatagattacatttgtaggaagttatgcttttttctggtttttgttttactttcaacctaggttataagactgttattctata

SEQ ID NO: 291110 - DNA, 1975 bp, Homo sapiens
ccgggtcctgggcgagcgggcgccgtgcgcgtgtcccgcggccgagctgctaataaagttgcagcgaggagaagcgcagcgacggcgtcgggagagcgcgcctagccggctcgcgaaaaggaagctgttgaagttattgaagtacctgttgctatattctaagaaattaaaatgtccagaaatctgcctctgacttgacccaatgaaagaagcatatggcacttgtgaagataaatgttactcctccctttttaattggaacttctgcttaggacctgtgtatgacgtttcacctgtgatctgttctttcggtagccactgactttgagttacaggaaggtctccgaagatttgtgtcaaatgacgtcaatggccagcttgttttcttttactagtccagcagtaaagcgattgttgggctggaaacaaggtgatgaggaggagaaatgggcagaaaaggcagttgatgctttggtgaagaaactaaaaaagaaaaagggtgccatggaggaactggagaaagccttgagcagtccaggacagccgagtaaatgtgtcactattcccagatctttagatggacgcctgcaggtttctcacagaaaaggcttaccccatgttatatattgtcgtgtttggcgctggccggatttgcagagtcatcatgagctaaagccgttggatatttgtgaatttccttttggatctaagcaaaaagaagtttgtatcaacccataccactataagagagtggagagtccagtcttacctccagtattagtgcctcgtcataatgaattcaatccacaacacagccttctggttcagtttaggaacctgagccacaatgaaccacacatgccacaaaatgccacgtttccagattctttccaccagcccaacaacactccttttcccttatctccaaacagcccttatcccccttctcctgctagcagcacatatcccaactccccagcaagttctggaccaggaagtccatttcagctcccagctgatacgcctcctcctgcctatatgccacctgatgatcagatgggtcaagataattcccagcctatggatacaagcaataatatgattcctcagattatgcccagtatatccagcagggatgttcagcctgttgcctatgaagagcctaaacattggtgttcaatagtctactatgaattaaacaatcgtgttggagaagcttttcatgcatcttctactagtgtgttagtagatggattcacagatccttcaaataacaaaagtagattctgcttgggtttgttgtcaaatgttaatcgtaattcgacaattgaaaacactaggcgacatattggaaaaggtgttcatctgtactatgttggtggagaggtgtatgcggaatgcctcagtgacagcagcatatttgtacagagtaggaactgcaactttcatcatggctttcatcccaccactgtctgtaagattcccagcagctgcagcctcaaaatttttaacaatcaggagtttgctcagcttctggctcaatctgtcaaccatgggtttgaggcagtatatgagctcaccaaaatgtgtaccattcggatgagttttgtcaagtctctgcaggagatatagtaataactgaagtgttacacaggtggagacgggaaacgttagttgctaagaactttggattaccaccgctaggaaaccagccacttggaagaccaatcaataaaggagtgttcaactcaatatttcacctgatacaagatgatgaaacgggctatcagaaatacagaaataacgatgaaggcatggagtggatgatcaagctcaggtcattggctccagaactcagactcttggtcaccactatgctacctctccttgactcctagcatctgcagctacctccccaccgtgatctccagcctctcccccaacccccaccaacaaaaatgcgttaacctcaacc

SEQ ID NO: 291111 - DNA, 1493 bp, Homo sapiens
ccgggtcctgggcgagcgggcgccgtgcgcgtgtcccgcggccgagctgctaataaagttgcagcgaggagaagcgcagcgacggcgtcgggagagcgcgcctagccggctcgcgaaaaggaagctgttgaagttattgaagtacctgttgctatattctaagaaattaaaatgtccagaaatctgcctctgacttgacccaatgaaagaagcatatggcacttgtgaagataaatgttactcctccctttttaattggaacttctgcttaggacctgtgtatgacgtttcacctgtgatctgttctttcggtagccactgactttgagttacaggaaggtctccgaagatttgtgtcaaatgacgtcaatggccagcttgttttcttttactagtccagcagtaaagcgattgttgggctggaaacaaggtgatgaggaggagaaatgggcagaaaaggcagttgatgctttggtgaagaaactaaaaaagaaaaagggtgccatggaggaactggagaaagccttgagcagtccaggacagccgagtaaatgtgtcactattcccagatctttagatggacgcctgcaggtttctcacagaaaaggcttaccccatgttatatattgtcgtgtttggcgctggccggatttgcagagtcatcatgagctaaagccgttggatatttgtgaatttccttttggatctaagcaaaaagaagtttgtatcaacccataccactataagagagtggagagtccagtcttacctccagtattagtgcctcgtcataatgaattcaatccacaacacagccttctggttcagtttaggaacctgagccacaatgaaccacacatgccacaaaatgccacgtttccagattctttccaccagcccaacaacactccttttcccttatctccaaacagcccttatcccccttctcctgctagcagcacatatcccaactccccagcaagttctggaccaggaagtccatttcagctcccagctgatacgcctcctcctgcctatatgccacctgatgatcagatgggtcaagataattcccagcctatggatacaagcaataatatgattcctcagattatgcccagtatatccagcagggatgttcagcctgttgcctatgaagagcctaaacattggtgttcaatagtctactatgaattaaacaatcgtgttgggtgttgggcgataacatcgatgttatccccaacacataactatttcactttctcaaaaaaagactttcacttttttcttgaacaaaaaacattcttggtcttttgttttcctaattttgatactttggagtacaaataatttcacttacttcttaacttaaaaaaggtggcacaggatgggcgcggtggctcatgcctgtaatcccagcactttgggaggccgaggtgggcagatcacgaggtcaggagatcaagaccacggtgaaaccccgtctctactaa

SEQ ID NO: 291112 - DNA, 1535 bp, Homo sapiens
ccgggtcctgggcgagcgggcgccgtgcgcgtgtcccgcggccgagctgctaataaagttgcagcgaggagaagcgcagcgacggcgtcgggagagcgcgcctagccggctcgcgaaaaggaagctgttgaagttattgaagtacctgttgctatattctaagaaattaaaatgtccagaaatctgcctctgacttgacccaatgaaagaagcatatggcacttgtgaagataaatgttactcctccctttttaattggaacttctgcttaggacctgtgtatgacgtttcacctgtgatctgttctttcggtagccactgactttgagttacaggaaggtctccgaagatttgtgtcaaatgacgtcaatggccagcttgttttcttttactagtccagcagtaaagcgattgttgggctggaaacaaggtgatgaggaggagaaatgggcagaaaaggcagttgatgctttggtgaagaaactaaaaaagaaaaagggtgccatggaggaactggagaaagccttgagcagtccaggacagccgagtaaatgtgtcactattcccagatctttagatggacgcctgcaggtttctcacagaaaaggcttaccccatgttatatattgtcgtgtttggcgctggccggatttgcagagtcatcatgagctaaagccgttggatatttgtgaatttccttttggatctaagcaaaaagaagtttgtatcaacccataccactataagagagtggagagtccagtcttacctccagtattagtgcctcgtcataatgaattcaatccacaacacagccttctggttcagtttaggaacctgagccacaatgaaccacacatgccacaaaatgccacgtttccagattctttccaccagcccaacaacactccttttcccttatctccaaacagcccttatcccccttctcctgctagcagcacatatcccaactccccagcaagttctggaccaggaagtccatttcagctcccagctgatacgcctcctcctgcctatatgccacctgatgatcagatgggtcaagataattcccagcctatggatacaagcaataatatgattcctcagattatgcccagtatatccagcagggatgttcagcctgttgcctatgaagagcctaaacattggtgttcaatagtctactatgaattaaacaatcgtgttggagaagcttttcatgcatcttctactagtgtgttagtagatggattcacagatccttcaaataacaaaagtagattctgcttgggtttgttgtcaaatgttaatcgtaattcgacaattgaaaacactaggcgacatattggaaaaggtaatcttgtcattttcctacatttaatcgaattcaatcatttgttgtacttgccatgaaccatgcattgtgaaaggtgctagaaacatacaaagaagtttgacacgtggcctctgccttaagttgccgatattgaagaatgtattaatcaaataaagacatgatgttccctcatttt

SEQ ID NO: 291113 - DNA, 459 bp, Homo sapiens
gagcgctcacctctgtttaactcctattgtgttaaattctctgttttatggttgttttttaatatcctttatctcatagaacaggagtggtatctttctctggattttctgtcttccagggtaccttatgcaggctaaatgcttacagagttttggattcagtttttatgtaaatagagattcagggctctataaaacagccctttctaaaagtaaattgttttaataggtttacagtcttacatgaatcctttctaccaaccccttagtgtggatggggcatttgtttagtcattcctgacaaatgacttttgatttttgtttttcagtcttacctccagtattagtgcctcgtcataatgaattcaatccacaacacagccttctggttcagtttaggaacctgagccacaatgaaccacacatgccacaaaatgccacgtttccagattctttcca

SEQ ID NO: 291114 - DNA, 3309 bp, Homo sapiens
aggggcggagggtgcagaggtgccgccgccgccgcgagccagtcgggagcgcgcgaggcgcggggagcctgggaccaggagcgagagccgcctacctgcagccgccgcccacggcacggcagccaccatggcgctcctgctgtgcttcgtgctcctgtgcggagtagtggatttcgccagaagtttgagtatcactactcctgaagagatgattgaaaaagccaaaggggaaactgcctatctgccatgcaaatttacgcttagtcccgaagaccagggaccgctggacatcgagtggctgatatcaccagctgataatcagaaggtggatcaagtgattattttatattctggagacaaaatttatgatgactactatccagatctgaaaggccgagtacattttacgagtaatgatctcaaatctggtgatgcatcaataaatgtaacgaatttacaactgtcagatattggcacatatcagtgcaaagtgaaaaaagctcctggtgttgcaaataagaagattcatctggtagttcttgttaagccttcaggtgcgagatgttacgttgatggatctgaagaaattggaagtgactttaagataaaatgtgaaccaaaagaaggttcacttccattacagtatgagtggcaaaaattgtctgactcacagaaaatgcccacttcatggttagcagaaatgacttcatctgttatatctgtaaaaaatgcctcttctgagtactctgggacatacagctgtacagtcagaaacagagtgggctctgatcagtgcctgttgcgtctaaacgttgtccctccttcaaataaagctggactaattgcaggagccattataggaactttgcttgctctagcgctcattggtcttatcatcttttgctgtcgtaaaaagcgcagagaagaaaaatatgaaaaggaagttcatcacgatatcagggaagatgtgccacctccaaagagccgtacgtccactgccagaagctacatcggcagtaatcattcatccctggggtccatgtctccttccaacatggaaggatattccaagactcagtataaccaagtaccaagtgaagactttgaacgcactcctcagagtccgactctcccacctgctaaggtagctgcccctaatctaagtcgaatgggtgcgattcctgtgatgattccagcacagagcaaggatgggtctatagtatagagcctccatatgtctcatctgtgctctccgtgttcctttcctttttttgatatatgaaaacctattctggtctaaattgtgttactagcctcaaaatacatcaaaaaataagttaatcaggaactgtacggaatatatttttaaaaatttttgtttggttatatcgaaatagttacaggcactaaagttagtaaagaaaagtttaccatctgaaaaagctggattttctttaagaggttgattataaagttttctaaatttatcagtacctaagtaagatgtagcgctttgaatatgaaatcataggtgaagacatgggtgaacttacttgcataccaagttgatacttgaataaccatctgaaagtggtacttgatcatttttaccattatttttaggatgtgtatttcatttatttatggcccaccagtctcccccaaattagtacagaaatatccatgacaaaattacttacgtatgtttgtacttggttttacagctcctttgaaaactctgtgtttggaatatctctaaaaacatagaaaacactacagtggtttagaaattactaattttacttctaagtcattcataaaccttgtctatgaaatgacttcttaaatatttagttgatagactgctacaggtaatagggacttagcaagctcttttatatgctaaaggagcatctatcagattaagttagaacatttgctgtcagccacatattgagatgacactaggtgcaatagcagggatagattttgttggtgagtagtctcatgccttgagatctgtggtggtcttcaaaatggtggccagccagatcaaggatgtagtatctcatagttcccaggtgatatttttcttattagaaaaatattataactcatttgttgtttgacacttatagattgaaatttcctaatttattctaaattttaagtggttctttggttccagtgctttatgttgttgttgtttttggatggtgttacatattatatgttctagaaacatgtaatcctaaatttaccctcttgaatataatccctggatgatattttttatcataaatgcagaataatcaaatacattttaagcaagttaagtgtcctccatcaattctgtattccagacttgggaggatgtacagttgctgttgtgtgatcaaacatgtctctgtgtagttccagcaaatcaagctgagctttgaaaaagtttgtcttagttttgtgaaggtgatttattcttaaaaaaaaaaagaaagaaaaagaaaaaaagataagaagaaggagtaaagggactactcctccttgccaaatgtgctaaatatcattttaggagaagaaagtgggtttattgtatttcccttaagattgtgagggagtgtggatacagtagaatgagccaacagtttctttataataaatacggtctgcaataaattatttcactagctctaaaacctttccctagattttagtagggagttggtttctgttaatatctttgggtgctgtggtggtaaatgctatattatgaacggtggcatgtatttacagttagagtattgtgtgtacactttttaatggtaaacttaagctgaatgtgtaatggatttgtgtatagttttacatatttggaagcattttaaaaacaggttttaaccttatgtaaaattacttttatactcgtgttaacattttcatctgtgccttttggtaatttaatttctattatgaatttctggtgcctatgagctagctatcacctacctgaaaggtgcttagaggtgaaggtactgtttctaaaaacacatcactgtgatacctttctatcctcacattttcaagcttgcctcttttctgttctttgtggatataacttaagcaattgtgttattcataaaggtttagaaatttcagtattcccaacactctatgtttctgattttataacagtagccatttttgaaagtcagatgtttggcctgttttatatgaataaagtttatttataaaatattataaaaaataagtaaataaacagaacattaataataaagttttggttcttcctat

SEQ ID NO: 291115 - DNA, 2239 bp, Homo sapiens
  misc_feature (64)..(64): n is a, c, g, or t
tctctatatattccttccttaaaattcatgattttgggccaaaaaaaaaaagcatatcgaaacnaaattttaactactaatgggaaggttcaaaagctgccacgtatttctagtacaatgtatccaataagagcaaggatgggtctatagtatagagcctccatatgtctcatctgtgctctccgtgttcctttcctttttttgatatatgaaaacctattctggtctaaattgtgttactagcctcaaaatacatcaaaaaataagttaatcaggaactgtacggaatatatttttaaaaatttttgtttggttatatcgaaatagttacaggcactaaagttagtaaagaaaagtttaccatctgaaaaagctggattttctttaagaggttgattataaagttttctaaatttatcagtacctaagtaagatgtagcgctttgaatatgaaatcataggtgaagacatgggtgaacttacttgcataccaagttgatacttgaataaccatctgaaagtggtacttgatcatttttaccattatttttaggatgtgtatttcatttatttatggcccaccagtctcccccaaattagtacagaaatatccatgacaaaattacttacgtatgtttgtacttggttttacagctcctttgaaaactctgtgtttggaatatctctaaaaacatagaaaacactacagtggtttagaaattactaattttacttctaagtcattcataaaccttgtctatgaaatgacttcttaaatatttagttgatagactgctacaggtaatagggacttagcaagctcttttatatgctaaaggagcatctatcagattaagttagaacatttgctgtcagccacatattgagatgacactaggtgcaatagcagggatagattttgttggtgagtagtctcatgccttgagatctgtggtggtcttcaaaatggtggccagccagatcaaggatgtagtatctcatagttcccaggtgatatttttcttattagaaaaatattataactcatttgttgtttgacacttatagattgaaatttcctaatttattctaaattttaagtggttctttggttccagtgctttatgttgttgttgtttttggatggtgttacatattatatgttctagaaacatgtaatcctaaatttaccctcttgaatataatccctggatgatattttttatcataaatgcagaataatcaaatacattttaagcaagttaagtgtcctccatcaattctgtattccagacttgggaggatgtacagttgctgttgtgtgatcaaacatgtctctgtgtagttccagcaaatcaagctgagctttgaaaaagtttgtcttagttttgtgaaggtgatttattcttaaaaaaaaaaagaaagaaaaagaaaaaaagataagaagaaggagtaaagggactactcctccttgccaaatgtgctaaatatcattttaggagaagaaagtgggtttattgtatttcccttaagattgtgagggagtgtggatacagtagaatgagccaacagtttctttataataaatacggtctgcaataaattatttcactagctctaaaacctttccctagattttagtagggagttggtttctgttaatatctttgggtgctgtggtggtaaatgctatattatgaacggtggcatgtatttacagttagagtattgtgtgtacactttttaatggtaaacttaagctgaatgtgtaatggatttgtgtatagttttacatatttggaagcattttaaaaacaggttttaaccttatgtaaaattacttttatactcgtgttaacattttcatctgtgccttttggtaatttaatttctattatgaatttctggtgcctatgagctagctatcacctacctgaaaggtgcttagaggtgaaggtactgtttctaaaaacacatcactgtgatacctttctatcctcacattttcaagcttgcctcttttctgttctttgtggatataacttaagcaattgtgttattcataaaggtttagaaatttcagtattcccaacactctatgtttctgattttataacagtagccatttttgaaagtcagatgtttggcctgttttatatgaataaagtttatttataaaatattataaaaaataagtaaataaacagaacattaataataaagttttggttcttcctat

SEQ ID NO: 291116 - DNA, 3047 bp, Homo sapiens
aggggcggagggtgcagaggtgccgccgccgccgcgagccagtcgggagcgcgcgaggcgcggggagcctgggaccaggagcgagagccgcctacctgcagccgccgcccacggcacggcagccaccatggcgctcctgctgtgcttcgtgctcctgtgcggagtagtggatttcgccagaagtttgagtatcactactcctgaagagatgattgaaaaagccaaaggggaaactgcctatctgccatgcaaatttacgcttagtcccgaagaccagggaccgctggacatcgagtggctgatatcaccagctgataatcagaaggtggatcaagtgattattttatattctggagacaaaatttatgatgactactatccagatctgaaaggccgagtacattttacgagtaatgatctcaaatctggtgatgcatcaataaatgtaacgaatttacaactgtcagatattggcacatatcagtgcaaagtgaaaaaagctcctggtgttgcaaataagaagattcatctggtagttcttgttaagccttcaggtgcgagatgttacgttgatggatctgaagaaattggaagtgactttaagataaaatgtgaaccaaaagaaggttcacttccattacagtatgagtggcaaaaattgtctgactcacagaaaatgcccacttcatggttagcagggaagatgtgccacctccaaagagccgtacgtccactgccagaagctacatcggcagtaatcattcatccctggggtccatgtctccttccaacatggaaggatattccaagactcagtataaccaagtaccaagtgaagactttgaacgcactcctcagagtccgactctcccacctgctaaggtagctgcccctaatctaagtcgaatgggtgcgattcctgtgatgattccagcacagagcaaggatgggtctatagtatagagcctccatatgtctcatctgtgctctccgtgttcctttcctttttttgatatatgaaaacctattctggtctaaattgtgttactagcctcaaaatacatcaaaaaataagttaatcaggaactgtacggaatatatttttaaaaatttttgtttggttatatcgaaatagttacaggcactaaagttagtaaagaaaagtttaccatctgaaaaagctggattttctttaagaggttgattataaagttttctaaatttatcagtacctaagtaagatgtagcgctttgaatatgaaatcataggtgaagacatgggtgaacttacttgcataccaagttgatacttgaataaccatctgaaagtggtacttgatcatttttaccattatttttaggatgtgtatttcatttatttatggcccaccagtctcccccaaattagtacagaaatatccatgacaaaattacttacgtatgtttgtacttggttttacagctcctttgaaaactctgtgtttggaatatctctaaaaacatagaaaacactacagtggtttagaaattactaattttacttctaagtcattcataaaccttgtctatgaaatgacttcttaaatatttagttgatagactgctacaggtaatagggacttagcaagctcttttatatgctaaaggagcatctatcagattaagttagaacatttgctgtcagccacatattgagatgacactaggtgcaatagcagggatagattttgttggtgagtagtctcatgccttgagatctgtggtggtcttcaaaatggtggccagccagatcaaggatgtagtatctcatagttcccaggtgatatttttcttattagaaaaatattataactcatttgttgtttgacacttatagattgaaatttcctaatttattctaaattttaagtggttctttggttccagtgctttatgttgttgttgtttttggatggtgttacatattatatgttctagaaacatgtaatcctaaatttaccctcttgaatataatccctggatgatattttttatcataaatgcagaataatcaaatacattttaagcaagttaagtgtcctccatcaattctgtattccagacttgggaggatgtacagttgctgttgtgtgatcaaacatgtctctgtgtagttccagcaaatcaagctgagctttgaaaaagtttgtcttagttttgtgaaggtgatttattcttaaaaaaaaaaagaaagaaaaagaaaaaaagataagaagaaggagtaaagggactactcctccttgccaaatgtgctaaatatcattttaggagaagaaagtgggtttattgtatttcccttaagattgtgagggagtgtggatacagtagaatgagccaacagtttctttataataaatacggtctgcaataaattatttcactagctctaaaacctttccctagattttagtagggagttggtttctgttaatatctttgggtgctgtggtggtaaatgctatattatgaacggtggcatgtatttacagttagagtattgtgtgtacactttttaatggtaaacttaagctgaatgtgtaatggatttgtgtatagttttacatatttggaagcattttaaaaacaggttttaaccttatgtaaaattacttttatactcgtgttaacattttcatctgtgccttttggtaatttaatttctattatgaatttctggtgcctatgagctagctatcacctacctgaaaggtgcttagaggtgaaggtactgtttctaaaaacacatcactgtgatacctttctatcctcacattttcaagcttgcctcttttctgttctttgtggatataacttaagcaattgtgttattcataaaggtttagaaatttcagtattcccaacactctatgtttctgattttataacagtagccatttttgaaagtcagatgtttggcctgttttatatgaataaagtttatttataaaatattataaaaaataagtaaataaacagaacattaataataaagttttggttcttcctat

SEQ ID NO: 291117 - DNA, 1193 bp, Homo sapiens
aggggcggagggtgcagaggtgccgccgccgccgcgagccagtcgggagcgcgcgaggcgcggggagcctgggaccaggagcgagagccgcctacctgcagccgccgcccacggcacggcagccaccatggcgctcctgctgtgcttcgtgctcctgtgcggagtagtggatttcgccagaagtttgagtatcactactcctgaagagatgattgaaaaagccaaaggggaaactgcctatctgccatgcaaatttacgcttagtcccgaagaccagggaccgctggacatcgagtggctgatatcaccagctgataatcagaaggtggatcaagtgattattttatattctggagacaaaatttatgatgactactatccagatctgaaaggccgagtacattttacgagtaatgatctcaaatctggtgatgcatcaataaatgtaacgaatttacaactgtcagatattggcacatatcagtgcaaagtgaaaaaagctcctggtgttgcaaataagaagattcatctggtagttcttggtaagttatttttatttgtgttaacgggttactgagtaagagaatgattagtcatagtactgtagtagcagcacttgtataaaataaagcttaattttttagaataacaattttaaacacttgaagtacttctatgttggatagcatcaaatataaaactagcttttggttttggataggaaaagtaagaagtgatcaacttctttgtgaaattcataagagtttgaaaataagtgaacgagtattatggtatggaggaagaaccctaagctaggagttaggagatctagggtttttgccttgtcctcagaatttgccctgagaattatgtagaaccatgtttctatgatgaataatttaagcatttagaatggagatgaagaaatatggaagaaggaatattgaattcaagtaaggccattaggcatcacatagtatttaagcttcttggcatcactgtttttcatcattaaagtgaggagatgagacattcactgatatcttatagccttcggaacagtaacagggggacggaaacgcttggtacgggcagacaccgagctccctcccaaccggggaaggcacagcccctacccccaagggacgacaacagcccccaactcccagcggggcccccccacgctggccccc

SEQ ID NO: 291118 - DNA, 1549 bp, Homo sapiens
aggggcggagggtgcagaggtgccgccgccgccgcgagccagtcgggagcgcgcgaggcgcggggagcctgggaccaggagcgagagccgcctacctgcagccgccgcccacggcacggcagccaccatggcgctcctgctgtgcttcgtgctcctgtgcggagtagtggatttcgccagaagtttgagtatcactactcctgaagagatgattgaaaaagccaaaggggaaactgcctatctgccatgcaaatttacgcttagtcccgaagaccagggaccgctggacatcgagtggctgatatcaccagctgataatcagaaggtggatcaagtgattattttatattctggagacaaaatttatgatgactactatccagatctgaaaggccgagtacattttacgagtaatgatctcaaatctggtgatgcatcaataaatgtaacgaatttacaactgtcagatattggcacatatcagtgcaaagtgaaaaaagctcctggtgttgcaaataagaagattcatctggtagttcttgttaagccttcaggtgcgagatgttacgttgatggatctgaagaaattggaagtgactttaagataaaatgtgaaccaaaagaaggttcacttccattacagtatgagtggcaaaaattgtctgactcacagaaaatgcccacttcatggttagcagaaatgacttcatctgttatatctgtaaaaaatgcctcttctgagtactctgggacatacagctgtacagtcagaaacagagtgggctctgatcagtgcctgttgcgtctaaacgttgtccctccttcaaataaagctggactaattgcaggagccattataggaactttgcttgctctagcgctcattggtcttatcatcttttgctgtcgtaaaaagcgcagagaagaaaaatatgaaaaggaagttcatcacgatatcagggaagatgtgccacctccaaagagccgtacgtccactgccagaagctacatcggcagtaatcattcatccctggggtccatgtctccttccaacatggaaggatattccaagactcagtataaccaagtaccaagtgaagactttgaacgcactcctcagagtccgactctcccacctgctaagttcaagtacccttacaagactgatggaattacagttgtataaatatggactactgaagaatctgaagtattgtattatttgactttattttaggcctctagtaaagacttaaatgttttttaaaaaaagcacaaggcacagagattagagcagctgtaagaacacatctactttatgcaatggcattagacatgtaagtcagatgtcatgtcaaaattagtacgagccaaattctttgttaaaaaaccctatgtatagtgacactgatagttaaaagatgttttattatattttcaataactaccactaacaaatttttaacttttcatatgcatattctgatatgtggtcttttaggaaaagtatggttaatagttgatttttcaaaggaaattttaaaattct

SEQ ID NO: 291119 - DNA, 1531 bp, Homo sapiens
aggggcggagggtgcagaggtgccgccgccgccgcgagccagtcgggagcgcgcgaggcgcggggagcctgggaccaggagcgagagccgcctacctgcagccgccgcccacggcacggcagccaccatggcgctcctgctgtgcttcgtgctcctgtgcggagtagtggatttcgccagaagtttgagtatcactactcctgaagagatgattgaaaaagccaaaggggaaactgcctatctgccatgcaaatttacgcttagtcccgaagaccagggaccgctggacatcgagtggctgatatcaccagctgataatcagaaggtggatcaagtgattattttatattctggagacaaaatttatgatgactactatccagatctgaaaggccgagtacattttacgagtaatgatctcaaatctggtgatgcatcaataaatgtaacgaatttacaactgtcagatattggcacatatcagtgcaaagtgaaaaaagctcctggtgttgcaaataagaagattcatctggtagttcttgttaagccttcaggtgcgagatgttacgttgatggatctgaagaaattggaagtgactttaagataaaatgtgaaccaaaagaaggttcacttccattacagtatgagtggcaaaaattgtctgactcacagaaaatgcccacttcatggttagcagaaatgacttcatctgttatatctgtaaaaaatgcctcttctgagtactctgggacatacagctgtacagtcagaaacagagtgggctctgatcagtgcctgttgcgtctaaacgttgtccctccttcaaataaagctggactaattgcaggagccattataggaactttgcttgctctagcgctcattggtcttatcatcttttgctgtcgtaaaaagcgcagagaagaaaaatatgaaaaggaagttcatcacgatatcagggaagatgtgccacctccaaagagccgtacgtccactgccagaagctacatcggcagtaatcattcatccctggggtccatgtctccttccaacatggaaggatattccaagactcagtataaccaagtaccaagtgaagactttgaacgcactcctcagagtccgactctcccacctgctaaggtagctgcccccccgcatggagtgtctcgctatgttgccccgcggtgtggggggagttctctaactcccggcctcaagcaatcctcctgcctctacctcccaaagtattgggataagctaatatttttaaagagaaaggaaggaggcaatatgaggcctctaaagaagagaggtaggaagaaggtgaagcccagatgcctggagcgcacagagctgcagccactgcctgcagctttgcttatgagggggattgagtttcttcaggccatgatgtttgatttgcgtttggagcagtaagccttacagctgataaatggttttttttctcctgggggagcacgagactctaggaagataatctattaggagaacctgagtgagccactt

SEQ ID NO: 291120 - DNA, 2009 bp, Homo sapiens
ctatcactggtgaatgactgagctgggattcaaagaactctcccagaaccaggagcttttcacccatggggagaatgataggaaataaaactgaagctagcaagggaacttggaaaaatacctccacagagctagatgtgcactgagactaggacccaggtcttccatcccacaagctggaggggtatctgagcatttccctaaggaaacagcaggaagtatgatgcctactcaactttagaaagtctcgcctgactgagagcccgtcctcaaagtcagaacagactcaaactataaattcactcttctcacctgccttccttcccaatacatagccaggatgggcagcactaataaaatgaggaatcataggccccaccccagttctgaaccagacctgaactcaaaaacaatcttcagataactcatatccaaactaaggcttgagaaacgcctctaaagaacagaaggaaggattgttactggaaggagtaagaaaccccccaactgcttctaccaattttgttgacattcttgtttttaaaaaactaatagcagggcactcttacaaggtgacttaatgttgacaacctcccaagacttaatctacaacatgtaacctctcaatactatctacaatatggagtagacacctatttcaatcatctacatatctacaggaatccaaagtcaatgacttgtatcaaaatggtattcaagactaacttttccattatctaacctgacttactctttttcaaaacctagcccgagatgctccagatactgactggtgtgactccatcccagcacgggacagactgccatgtgcaccttcacccatctctcgaggagactgtgaagggctaggctgttgttatagctctgaagaggtgaattcctgctactatggaaacactgtgaccttgcattgtacccgagagggccatttctctattgctgtgtctcggaacgtgacctcgccaccactgctcttggattctgtgcgcttggcccttaggaatgacagtgcgtgtaaccctgtgatggcaacacaagcttttgttctgttccagtttccatttacttcctgtggcaccacaagacagatcactggagaccgagcagtatatgaaaatgaactggtggcaactagggatgtgaaaaatgggagccgtggctctgtcactcgtgacagcatcttcaggctccatgtcagctgcagctactcagtaagtagcaactctctcccaatcaatgtccaggttttcactctcccaccaccctttcctgagacccagcctggacccctcactctggaacttcagattgccaaagataaaaactatggctcttactacggtgttggtgactacccagtggtgaagttgcttcgggatcccatttacgtggaggtctccatccttcacagaacagacccctacctggggctgctcctacaacagtgttgggcaacacccagcactgaccccctgagtcagccacagtggcccatcctggtaaagggctgcccctacattggagacaactatcagacccagctgatccctgtccagaaagccttggatcttccatttccctctcaccaccagcgcttcagcatcttcaccttcagctttgtgaaccctacagtggagaaacaggccctcaggggaccggtgcatctgcactgcagcgtgtcagtctgccagcctgctgagacaccatcctgtgtggtgacctgtcctgatctcagtcgaagaagaaattttgacaacagttctcagaacactactgctagtgtttctagcaaaggccccatgattctactccaagccactaaggaccctccagaaaagctccgtgttcctgtagactcgaaagttctgtgggtggcaggcctttctgggaccttaatccttggagccttgttagtatcctacttggctgtcaagaaacagaagagttgcccagaccaaatgtgtcaataaaaccagagtgtattccca

SEQ ID NO: 291121 - DNA, 1641 bp, Homo sapiens
atgtggctgctgcggtgcgttttgctgtgtgtttcattatctcttgctgtgagtggccagcataagcctgaggcaccagattattccagtgtgctccactgtgggccgtggagcttccagtttgctgtaaacctcaaccaggaggcaacgtctcctcctgtactaatagcttgggacaaccaagggctgctgcacgagctgcagaatgactccgactgtggcacctggataagaaaaggtccaggcagctccgtggtgttggaggcaacctatagcagctgctatgtcactgagtgggactcccactacatcatgccagttggagttgaaggagcaggcgcggctgaacacaaggtggttacagagaggaagctgctcaagtgtcctatggatcttctagcccgagatgctccagatactgactggtgtgactccatcccagcacgggacagactgccatgtgcaccttcacccatctctcgaggagactgtgaagggctaggctgttgttatagctctgaagaggtgaattcctgctactatggaaacactgtgaccttgcattgtacccgagagggccatttctctattgctgtgtctcggaacgtgacctcgccaccactgctcttggattctgtgcgcttggcccttaggaatgacagtgcgtgtaaccctgtgatggcaacacaagcttttgttctgttccagtttccatttacttcctgtggcaccacaagacagatcactggagaccgagcagtatatgaaaatgaactggtggcaactagggatgtgaaaaatgggagccgtggctctgtcactcgtgacagcatcttcaggctccatgtcagctgcagctactcagtaagtagcaactctctcccaatcaatgtccaggttttcactctcccaccaccctttcctgagacccagcctggacccctcactctggaacttcagattgccaaagataaaaactatggctcttactacggtgttggtgactacccagtggtgaagttgcttcgggatcccatttacgtggaggtctccatccttcacagaacagacccctacctggggctgctcctacaacagtgttgggcaacacccagcactgaccccctgagtcagccacagtggcccatcctggtaaagggctgcccctacattggagacaactatcagacccagctgatccctgtccagaaagccttggatcttccatttccctctcaccaccagcgcttcagcatcttcaccttcagctttgtgaaccctacagtggagaaacaggccctcaggggaccggtgcatctgcactgcagcgtgtcagtctgccagcctgctgagacaccatcctgtgtggtgacctgtcctgatctcagtcgaagaagaaattttgacaacagttctcagaacactactgctagtgtttctagcaaaggccccatgattctactccaagccactaaggaccctccagaaaagctccgtgttcctgtagactcgaaagttctgtgggtggcaggcctttctgggaccttaatccttggagccttgttagtatcctacttggctgtcaagaaacagaagagttgcccagaccaaatgtgtcaataaaaccagagtgtattccca

SEQ ID NO: 291122 - DNA, 959 bp, Homo sapiens
ctatgtgaggaggcagctgcaaggcaccacccctgagggatgggccctcaccaaacactgagcctaccatgccttaatcttggacttcccagcctccatgaacgccatacaagacgttaacaaaagaggaagctgggtaaagtgtattcatgaattctgcactattttgcaactcttagaaatttggactgggctgtgtgcttctcctataccattctccagctacttctggatgaagaggaagggaatggaggtcttgaaaggtggaagagtcatgctgaaatgttagctgcatatcagacccagaaaatacagcaagttttttggctgggcgcagcggctcaggaggagggcgcccgggaaatacctgctgcgtgaatgaataaatgaatgaaatgcttgggccctgggaaatgcttgggcccgcggccgcctgaccacgcgggctggaggatcggacgtaccgccggtgccccaccaggagacgaaggcatggttgggatgcgcagccctcccacgaggcccatggcgccccagggccctagggattgaccgggacccccgactggcagagtccacctgcttgatacacttatttgagaagggaggcctgggactatcttactccttttaggaaaacccaactgtagctgctattcctttggttcaggccgcaaggaagaattgtaggttaccatgaatccatgaacccctctttagtatacaaagtccactttcatgacggaagaattggaaagctccctccagagttgtcagtactcaattattagcatataaaaagtcaaattttcccagggattttcagactttagaacctgctagtgacctgtggcctcagctttcttccagccactctgagtattgtaaaacaaagatattatcccaaccctgaaggcagataccagattgtacgccatggtcttctgtttcaaagggat

SEQ ID NO: 291123 - DNA, 201 bp, Homo sapiens
gatctagaggatcccgacagcaccctaaccagcagaggctgcaagtcgggccatagttcagttcctagagattaatcagagtgaagaagccagtagaggctggatgcttctaacgacaattaatttgttagcttcctctggtcagaaaaccgtggactgcatgacaacaatgtcagtgccttccaccctggttaaatgttt

SEQ ID NO: 291124 - DNA, 842 bp, Homo sapiens
gcggccgcagaatcgagctcgggccccggcccccggcccgcggcgcggggctcccgggccccgccgcggacgtcgcgccggtcgccccttccccgtagcccgtgcgccctcggcgcggagccccggcccgccgcggtcccgtctcctgggcctgtcccgcccgcgccctccgccggccctcaggtataatacttctccacgtctgcttcaggaagaaagtgcctgccattcttatcatttctaagcaggttcatgccagcccagaacagagaatcagaattagaagtgcgtctcaccaaccagccaagatgaacatggtgaagaggatcatggggcggccgaggcaggaggagtgcagcccacaagacaacgccttaggactgatgcacctccgccggctcttcacggagttgtgccatcctccccggcacatgactcagaaggaacaagaagagaaactgtatatgatgctgccagtgtttaacagggtttttggaaatgctccgccgaatacaatgacagaaaaattttctgatcttctgcagttcacaacacaagtctcacgactaatggtgacagaaattcgaaggagagcatcaaacaaatccacaggtatttttacagtagccagcaaaaactgatttgtttgaatgaacaagcagttctgtaaaagtcccattaaaattaaatggaaaacagaccttgttctcagcacattgagttcatttacccattccctttccctttcttagagtcacattcttttcctggtttcagcatcttcaactctccagtagttctgctcaaggctactctgcctggaccactaccacttccaccct

SEQ ID NO: 291125 - DNA, 931 bp, Homo sapiens
gcggccgcagaatcgagctcgggccccggcccccggcccgcggcgcggggctcccgggccccgccgcggacgtcgcgccggtcgccccttccccgtagcccgtgcgccctcggcgcggagccccggcccgccgcggtcccgtctcctgggcctgtcccgcccgcgccctccgccggccctcaggtataatacttctccacgtctgcttcaggaagaaagtgcctgccattcttatcatttctaagcaggttcatgccagcccagaacagagaatcagatgtcttcaattgctgtggtgacaagaacatagtgaatataagctgctgaaagtagagctagtcgtggctggaacagagagaaattcagaattagaagtgcgtctcaccaaccagccaagatgaacatggtgaagaggatcatggggcggccgaggcaggaggagtgcagcccacaagacaacgccttaggactgatgcacctccgccggctcttcacggagttgtgccatcctccccggcacatgactcagaaggaacaagaagagaaactgtatatgatgctgccagtgtttaacagggtttttggaaatgctccgccgaatacaatgacagaaaaattttctgatcttctgcagttcacaacacaagtctcacgactaatggtgacagaaattcgaaggagagcatcaaacaaatccacaggtatttttacagtagccagcaaaaactgatttgtttgaatgaacaagcagttctgtaaaagtcccattaaaattaaatggaaaacagaccttgttctcagcacattgagttcatttacccattccctttccctttcttagagtcacattcttttcctggtttcagcatcttcaactctccagtagttctgctcaaggctactctgcctggaccactaccacttccaccct

SEQ ID NO: 291126 - DNA, 942 bp, Homo sapiens
gcggccgcagaatcgagctcgggccccggcccccggcccgcggcgcggggctcccgggccccgccgcggacgtcgcgccggtcgccccttccccgtagcccgtgcgccctcggcgcggagccccggcccgccgcggtcccgtctcctgggcctgtcccgcccgcgccctccgccggccctcaggtataatacttctccacgtctgcttcaggaagaaagtgcctgccattcttatcatttctaagcaggttcatgccagcccagaacagagaatcagctggagcccagatttcaagttttgagtaaaataccttcaagcgaatgggccctattgtgctcacacattcagaacctgttacccaaggaattccctaaagaattagaagtgcgtctcaccaaccagccaagatgaacatggtgaagaggatcatggggcggccgaggcaggaggagtgcagcccacaagacaacgccttaggactgatgcacctccgccggctcttcacggagttgtgccatcctccccggcacatgactcagaaggaacaagaagagaaactgtatatgatgctgccagtgtttaacagggtttttggaaatgctccgccgaatacaatgacagaaaaattttctgatcttctgcagttcacaacacaagtctcacgactaatggtgacagaaattcgaaggagagcatcaaacaaatccacaggtatttttacagtagccagcaaaaactgatttgtttgaatgaacaagcagttctgtaaaagtcccattaaaattaaatggaaaacagaccttgttctcagcacattgagttcatttacccattccctttccctttcttagagtcacattcttttcctggtttcagcatcttcaactctccagtagttctgctcaaggctactctgcctggaccactaccacttccaccct

SEQ ID NO: 291127 - DNA, 778 bp, Homo sapiens
gcggccgcagaatcgagctcgggccccggcccccggcccgcggcgcggggctcccgggccccgccgcggacgtcgcgccggtcgccccttccccgtagcccgtgcgccctcggcgcggagccccggcccgccgcggtcccgtctcctgggcctgtcccgcccgcgccctccgccggccctcaggtataatacttctccacgtctgcttcaggaagaaagtgcctgccattcttatcatttctaagcaggttcatgccagcccagaacagagaatcagaattagaagtgcgtctcaccaaccagccaagatgaacatggtgaagaggatcatggggcggccgaggcaggaggagtgcagcccacaagacaacgccttaggactgatgcacctccgccggctcttcacggagttgtgccatcctccccggcacatgactcagaaggaacaagaagagaaactgtatatgatgctgccagtgtttaacagggtttttggaaatgctccgccgaatacaatgacagaaaaattttctgatcttctgcagttcacaacacaagtctcacgactaatggtgacagaaattcgaaggagagcatcaaacaaatccacagaggctgcaagtcgggccatagttcagttcctagagattaatcagagtgaagaagccagtagaggctggatgcttctaacgacaattaatttgttagcttcctctggtcagaaaaccgtggactgcatgacaacaatgtcagtgccttccaccctggttaaatgttt

SEQ ID NO: 291128 - DNA, 848 bp, Homo sapiens
gcggccgcagaatcgagctcgggccccggcccccggcccgcggcgcggggctcccgggccccgccgcggacgtcgcgccggtcgccccttccccgtagcccgtgcgccctcggcgcggagccccggcccgccgcggtcccgtctcctgggcctgtcccgcccgcgccctccgccggccctcagctggagcccagatttcaagttttgagtaaaataccttcaagcgaatgggccctattgtgctcacacattcagaacctgttacccaaggaattccctaaagaattagaagtgcgtctcaccaaccagccaagatgaacatggtgaagaggatcatggggcggccgaggcaggaggagtgcagcccacaagacaacgccttaggactgatgcacctccgccggctcttcacggagttgtgccatcctccccggcacatgactcagaaggaacaagaagagaaactgtatatgatgctgccagtgtttaacagggtttttggaaatgctccgccgaatacaatgacagaaaaattttctgatcttctgcagttcacaacacaagtctcacgactaatggtgacagaaattcgaaggagagcatcaaacaaatccacaggtatttttacagtagccagcaaaaactgatttgtttgaatgaacaagcagttctgtaaaagtcccattaaaattaaatggaaaacagaccttgttctcagcacattgagttcatttacccattccctttccctttcttagagtcacattcttttcctggtttcagcatcttcaactctccagtagttctgctcaaggctactctgcctggaccactaccacttccaccct

SEQ ID NO: 291129 - DNA, 2522 bp, Homo sapiens
tatgacgacatggtcgtaaatccgccatcttcctgcggcgcgttgcgacatggagggcgcgatggcagtgcgggtgacggccgctcatacggcagaagcccaggccgaagccgggcgggaagcgggcgagggtgcagttgcggcggtggcggcggccttggcccccagcggcttcctcggcctcccggcgcccttcagcgaggaagatgaggacgatgtgcacagatgcggccgctgccaggcagagttcaccgccttggaggattttgttcagcacaagattcagaaggcctgccagcgggcccctccggaggccctgcctgccacccctgccaccacagcgttgctgggccaggaggtggtgccggcagcaccaggcccagaggagcccatcactgtggcccacatcgtggtggaggcggcctctctggcagcagacatcagccacgcatctgaccttgttggtggtgggcacatcaaagaggtcatcgtggctgctgaggcggagctgggagacggtgagatggccgaggccccgggcagcccccaccagcaggggctggggctcgcaggggagggtgagcaggcccaggtgaagctactggtgaacaaggatggccgctatgtgtgtgcgctgtgccacaagaccttcaagacgggcagcatcctcaaggcccacatggtcactcacagcagccgcaaggaccacgagtgcaagctctgtggggcctccttccgcaccaagggctcactcatccggcaccaccggcggcacacggatgagcgcccctacaagtgctccaagtgtggaaagagcttccgggagtcgggtgcactgacccggcacctcaagtctctcaccccctgcacagagaaaatccgcttcagtgtgagcaaggacgtggttgtcagcaaagaggacgcacgtgcaggttctggagctggagctgccggcttggggacagccacatcatcggtgacaggcgagcctatagagacttcacccgtgattcacctggtgacagatgccaagggcaccgtcatccacgaagtccacgtccagatgcaggagctgtccctgggcatgaaagccctggccccagagccccccgtctcccaggagctcccctgctccagcgagggcagccgtgagaacctgctgcaccaggccatgcagaactccggcatcgtccttgagcgcgctgctggggaggagggtgccctggagccagctcctgctgccgggtccagtccccagcccctggcagtggcagccccgcagctgccggtactggaagtgcagccgctggagacacaggtggccagcgaggcctcagcggtgcccaggacccacccatgtcctcagtgcagtgagaccttcccgacagcagccaccctggaggcccacaagaggggccacaccgggccgaggccgttcgcctgcgcgcagtgtggcaaggccttccccaaggcctacctgctcaagaagcaccaggaggtgcacgtgcgtgagcgccgcttccgctgtggcgactgcgggaagctctacaagaccattgcccatgtgcgtggccaccggcgcgtccactcagacgagcggccctacccttgtcccaagtgtggcaagcgctacaagactaagaacgcacagcaggtgcacttcaggacacacctggaggagaagccgcacgtgtgccagttctgcagccgtggcttccgagagaagggctcactggtgcggcacgtgcgacaccacacaggcgagaagccgttcaagtgctacaagtgcggccgtggcttcgccgagcacggcacgctgaaccggcacctgcgcaccaaagggggctgcctgctggaggtggaggagttgctggtgtctgaggacagccccgcggcagccaccaccgtcctcacggaagacccgcacacagtgccactgcggacgatgcggagaccagtgaggccacggagatcatcgagggcacccagacagaggtggacagccacatcatgaaggtggtgcagcagatcgtgcaccaggctagcgccggccaccagatcatcgtgcagaacgtcaccatggacgaggagacggcgctgggcccagaggcggctgccgccgacaccatcaccattgccacccccgagagcctgacagagcaggtggccatgacgctggcctcggccatcagcgagggcactgtgcttgccgcccgggcagggacaagtggcactgaacaggccactgtgaccatggtgtcatcagaggacatcgagatcctggagcatgcaggcgagctggtcatcgcctcgccggagggccagctggaggtgcagacggtcatcgtctagcatgaggtctgcggggtcctggccgggcagggacagggcagaggactctgagcgccccacccatgcctgcctggcctggtagagaagatggcacaggatggaggcgccccaagacggacagtgtacataagagtttcttgttgctttacaataaaacatgagaacctgca

SEQ ID NO: 291130 - DNA, 2676 bp, Homo sapiens
tatgacgacatggtcgtaaatccgccatcttcctgcggcgcgttgcgacatggagggcgcgatggcagtgcgggtgacggccgctcatacggcagaagcccaggccgaagccgggcgggaagcgggcgagggtgcagttgcggcggtggcggcggccttggcccccagcggcttcctcggcctcccggcgcccttcagcgaggaagatgaggacgatgtgcacagatgcggccgctgccaggcagagttcaccgccttggaggattttgttcagcacaagattcagaaggcctgccagcgggcccctccggaggccctgcctgccacccctgccaccacagcgttgctgggccaggaggtggtgccggcagcaccaggcccagaggagcccatcactgtggcccacatcgtggtggaggcggcctctctggcagcagacatcagccacgcatctgaccttgttggtggtgggcacatcaaagaggtcatcgtggctgctgaggcggagctgggagacggtgagatggccgaggccccgggcagcccccaccagcaggggctggggctcgcaggggagggtgagcaggcccaggtgaagctactggtgaacaaggatggccgctatgtgtgtgcgctgtgccacaagaccttcaagacgggcagcatcctcaaggcccacatggtcactcacagcagccgcaaggaccacgagtgcaagctctgtggggcctccttccgcaccaagggctcactcatccggcaccaccggcggcacacggatgagcgcccctacaagtgctccaagtgtggaaagagcttccgggagtcgggtgcactgacccggcacctcaagtctctcaccccctgcacagagaaaatccgcttcagtgtgagcaaggacgtggttgtcagcaaagaggacgcacgtgcaggttctggagctggagctgccggcttggggacagccacatcatcggtgacaggcgagcctatagagacttcacccgtgattcacctggtgacagatgccaagggcaccgtcatccacgaagtccacgtccagatgcaggagctgtccctgggcatgaaagccctggccccagagccccccgtctcccaggagctcccctgctccagcgagggcagccgtgagaacctgctgcaccaggccatgcagaactccggcatcgtccttgagcgcgctgctggggaggagggtgccctggagccagctcctgctgccgggtccagtccccagcccctggcagtggcagccccgcagctgccggtactggaagtgcagccgctggagacacaggtggccagcgaggcctcagcggtgcccaggacccacccatgtcctcagtgcagtgagaccttcccgacagcagccaccctggaggcccacaagaggggccacaccgggccgaggccgttcgcctgcgcgcagtgtggcaaggccttccccaaggcctacctgctcaagaagcaccaggaggtgcacgtgcgtgagcgccgcttccgctgtggcgactgcgggaagctctacaagaccattgcccatgtgcgtggccaccggcgcgtccactcagacgagcggccctacccttgtcccaagtgtggcaagcgctacaagactaagaacgcacagcaggtgcacttcaggacacacctggaggagaagccgcacgtgtgccagttctgcagccgtggcttccgagagaagggctcactggtgcggcacgtgcgacaccacacaggcgagaagccgttcaagtgctacaagtgcggccgtggcttcgccgagcacggcacgctgaaccggcacctgcgcaccaaagggggctgcctgctggaggtggaggagttgctggtgtctgaggacagccccgcggcagccaccaccgtcctcacggaagacccgcacacagtgttggtggagttctcgtccgtggtagctgacacccaggagtatatcatcgaggccactgcggacgatgcggagaccagtgaggccacggagatcatcgagggcacccagacagaggtggacagccacatcatgaaggtggtgcagcagatcgtgcaccaggctagcgccggccaccagatcatcgtgcagaacgtcaccatggacgaggagacggcgctgggcccagaggcggctgccgccgacaccatcaccattgccacccccgagagcctgacagagcaggtggccatgacgctggcctcggccatcagcgagggcactgtgcttgccgcccgggcagggacaagtggcactgaacaggccactgtgaccatggtgtcatcagaggacatcgagatcctggagcatgcaggcgagctggtcatcgcctcgccggagggccagctggaggtgcagacggtcatcgtctagcatgaggtctgcggggtcctggccgggcagggacagggcagaggactctgagcgccccacccatgcctgcctggcctggtagagaagatggcacaggatggaggcgccccaagacggacagtgtacataagagtttcttgttgctttacaataaaacatgagaacctgcaaaaaaaaacgaaagaacgaaaaaaatctcgcggaacatagtccgggggagccggaccccatttggggccgtggggcacgggacttgagagcaacaggtcccg

SEQ ID NO: 291131 - DNA, 2827 bp, Homo sapiens
tatgacgacatggtcgtaaatccgccatcttcctgcggcgcgttgcgacatggagggcgcgatggcagtgcgggtgacggccgctcatacggcagaagcccaggccgaagccgggcgggaagcgggcgagggtgcagttgcggcggtggcggcggccttggcccccagcggcttcctcggcctcccggcgcccttcagcgaggaagatgaggacgatgtgcacagatgcggccgctgccaggcagagttcaccgccttggaggattttgttcagcacaagattcagaaggcctgccagcgggcccctccggaggccctgcctgccacccctgccaccacagcgttgctgggccaggaggtggtgccggcagcaccaggcccagaggagcccatcactgtggcccacatcgtggtggaggcggcctctctggcagcagacatcagccacgcatctgaccttgttggtggtgggcacatcaaagaggtcatcgtggctgctgaggcggagctgggagacggtgagatggccgaggccccgggcagcccccaccagcaggggctggggctcgcaggggagggtgagcaggcccaggtgaagctactggtgaacaaggatggccgctatgtgtgtgcgctgtgccacaagaccttcaagacgggcagcatcctcaaggcccacatggtcactcacagcagccgcaaggaccacgagtgcaagctctgtggggcctccttccgcaccaagggctcactcatccggcaccaccggcggcacacggatgagcgcccctacaagtgctccaagtgtggaaagagcttccgggagtcgggtgcactgacccggcacctcaagtctctcaccccctgcacagagaaaatccgcttcagtgtgagcaaggacgtggttgtcagcaaagaggacgcacgtgcaggttctggagctggagctgccggcttggggacagccacatcatcggtgacaggcgagcctatagagacttcacccgtgattcacctggtgacagatgccaagggcaccgtcatccacgaagtccacgtccagatgcaggagctgtccctgggcatgaaagccctggccccagagccccccgtctcccaggagctcccctgctccagcgagggcagccgtgagaacctgctgcaccaggccatgcagaactccggcatcgtccttgagcgcgctgctggggaggagggtgccctggagccagctcctgctgccgggtccagtccccagcccctggcagtggcagccccgcagctgccggtactggaagtgcagccgctggagacacaggtggccagcgaggcctcagcggtgcccaggacccacccatgtcctcagtgcagtgagaccttcccgacagcagccaccctggaggcccacaagaggggccacaccgggccgaggccgttcgcctgcgcgcagtgtggcaaggccttccccaaggcctacctgctcaagaagcaccaggaggtgcacgtgcgtgagcgccgcttccgctgtggcgactgcgggaagctctacaagaccattgcccatgtgcgtggccaccggcgcgtccactcagacgagcggccctacccttgtcccaagtgtggcaagcgctacaagactaagaacgcacagcaggtgcacttcaggacacacctggaggagaagccgcacgtgtgccagttctgcagccgtggcttccgagagaagggctcactggtgcggcacgtgcgacaccacacaggcgagaagccgttcaagtgctacaagtgcggccgtggcttcgccgagcacggcacgctgaaccggcacctgcgcaccaaagggggctgcctgctggaggtggaggagttgctggtgtctgaggacagccccgcggcagccaccaccgtcctcacggaagacccgcacacagtgttggtggagttctcgtccgtggtagctgacacccaggagtatatcatcgaggtgggtgtggggccctggggccgtgctgggacccaggggcagccaaggctgacctctgtccttctgcccatctgcccaggccactgcggacgatgcggagaccagtgaggccacggagatcatcgagggcacccagacagaggtgaggggtagggcaggcgggggcggggaggctccctggcacagccgctcttgctgagccgtggccctgcaggtggacagccacatcatgaaggtggtgcagcagatcgtgcaccaggctagcgccggccaccagatcatcgtgcagaacgtcaccatggacgaggagacggcgctgggcccagaggcggctgccgccgacaccatcaccattgccacccccgagagcctgacagagcaggtggccatgacgctggcctcggccatcagcgagggcactgtgcttgccgcccgggcagggacaagtggcactgaacaggccactgtgaccatggtgtcatcagaggacatcgagatcctggagcatgcaggcgagctggtcatcgcctcgccggagggccagctggaggtgcagacggtcatcgtctagcatgaggtctgcggggtcctggccgggcagggacagggcagaggactctgagcgccccacccatgcctgcctggcctggtagagaagatggcacaggatggaggcgccccaagacggacagtgtacataagagtttcttgttgctttacaataaaacatgagaacctgcaaaaaaaaacgaaagaacgaaaaaaatctcgcggaacatagtccgggggagccggaccccatttggggccgtggggcacgggacttgagagcaacaggtcccg

SEQ ID NO: 291132 - DNA, 2861 bp, Homo sapiens
gtcttgaactcctgggctcaagctatcctcccaccttggccccttaaagtgctgagattacaagtgtgagccaccatgcccggccccagcagtcttaaatcctggtcctttactgtccccaaattagcatggaggagtccctctgcctcccagcccctctctgggcctctcgcctgtcagtcgctgaggtgggttttgagcatggcagccttagcaggtccctgcagcctaagcgtgctgtcagggccaccctctgctgggtgctgacctcctgagggtgggtctggcccctgcagacctgcagaggataggggctgtaccttgggatgaccttgttttgggcccgagtgtgttctcagcagcctggggaagtagctctgcttctgatggcctcctgggggaatctgttctagggctggaggaaaagccagacggagccctggctgcccagcctccgccttcccaggccctgctgacagcaggctcgttgcagatgaggacgatgtgcacagatgcggccgctgccaggcagagttcaccgccttggaggattttgttcagcacaagattcagaaggcctgccagcgggcccctccggaggccctgcctgccacccctgccaccacagcgttgctgggccaggaggtggtgccggcagcaccaggcccagaggagcccatcactgtggcccacatcgtggtggaggcggcctctctggcagcagacatcagccacgcatctgaccttgttggtggtgggcacatcaaagaggtcatcgtggctgctgaggcggagctgggagacggtgagatggccgaggccccgggcagcccccaccagcaggggctggggctcgcaggggagggtgagcaggcccaggtgaagctactggtgaacaaggatggccgctatgtgtgtgcgctgtgccacaagaccttcaagacgggcagcatcctcaaggcccacatggtcactcacagcagccgcaaggaccacgagtgcaagctctgtggggcctccttccgcaccaagggctcactcatccggcaccaccggcggcacacggatgagcgcccctacaagtgctccaagtgtggaaagagcttccgggagtcgggtgcactgacccggcacctcaagtctctcaccccctgcacagagaaaatccgcttcagtgtgagcaaggacgtggttgtcagcaaagaggacgcacgtgcaggttctggagctggagctgccggcttggggacagccacatcatcggtgacaggcgagcctatagagacttcacccgtgattcacctggtgacagatgccaagggcaccgtcatccacgaagtccacgtccagatgcaggagctgtccctgggcatgaaagccctggccccagagccccccgtctcccaggagctcccctgctccagcgagggcagccgtgagaacctgctgcaccaggccatgcagaactccggcatcgtccttgagcgcgctgctggggaggagggtgccctggagccagctcctgctgccgggtccagtccccagcccctggcagtggcagccccgcagctgccggtactggaagtgcagccgctggagacacaggtggccagcgaggcctcagcggtgcccaggacccacccatgtcctcagtgcagtgagaccttcccgacagcagccaccctggaggcccacaagaggggccacaccgggccgaggccgttcgcctgcgcgcagtgtggcaaggccttccccaaggcctacctgctcaagaagcaccaggaggtgcacgtgcgtgagcgccgcttccgctgtggcgactgcgggaagctctacaagaccattgcccatgtgcgtggccaccggcgcgtccactcagacgagcggccctacccttgtcccaagtgtggcaagcgctacaagactaagaacgcacagcaggtgcacttcaggacacacctggaggagaagccgcacgtgtgccagttctgcagccgtggcttccgagagaagggctcactggtgcggcacgtgcgacaccacacaggcgagaagccgttcaagtgctacaagtgcggccgtggcttcgccgagcacggcacgctgaaccggcacctgcgcaccaaagggggctgcctgctggaggtggaggagttgctggtgtctgaggacagccccgcggcagccaccaccgtcctcacggaagacccgcacacagtgttggtggagttctcgtccgtggtagctgacacccaggagtatatcatcgaggccactgcggacgatgcggagaccagtgaggccacggagatcatcgagggcacccagacagaggtggacagccacatcatgaaggtggtgcagcagatcgtgcaccaggctagcgccggccaccagatcatcgtgcagaacgtcaccatggacgaggagacggcgctgggcccagaggcggctgccgccgacaccatcaccattgccacccccgagagcctgacagagcaggtggccatgacgctggcctcggccatcagcgagggcactgtgcttgccgcccgggcagggacaagtggcactgaacaggccactgtgaccatggtgtcatcagaggacatcgagatcctggagcatgcaggcgagctggtcatcgcctcgccggagggccagctggaggtgcagacggtcatcgtctagcatgaggtctgcggggtcctggccgggcagggacagggcagaggactctgagcgccccacccatgcctgcctggcctggtagagaagatggcacaggatggaggcgccccaagacggacagtgtacataagagtttcttgttgctttacaataaaacatgagaacctgca

SEQ ID NO: 291133 - DNA, 2838 bp, Homo sapiens
tatgacgacatggtcgtaaatccgccatcttcctgcggcgcgttgcgacatggagggcgcgatggcagtgcgggtgacggccgctcatacggcagaagcccaggccgaagccgggcgggaagcgggcgagggtgcagttgcggcggtggcggcggccttggcccccagcggcttcctcggcctcccggcgcccttcagcgaggaagatgaggacgatgtgcacagatgcggccgctgccaggcagagttcaccgccttggaggattttgttcagcacaagattcagaaggcctgccagcgggcccctccggaggccctgcctgccacccctgccaccacagcgttgctgggccaggaggtggtgccggcagcaccaggcccagaggagcccatcactgtggcccacatcgtggtggaggcggcctctctggcagcagacatcagccacgcatctgaccttgttggtggtgggcacatcaaagaggtcatcgtggctgctgaggcggagctgggagacggtgagatggccgaggccccgggcagcccccaccagcaggggctggggctcgcaggggagggtgagcaggcccaggtgaagctactggtgaacaaggatggccgctatgtgtgtgcgctgtgccacaagaccttcaagacgggcagcatcctcaaggcccacatggtcactcacagcagccgcaaggaccacgagtgcaagctctgtggggcctccttccgcaccaagggctcactcatccggcaccaccggcggcacacggatgagcgcccctacaagtgctccaagtgtggaaagagcttccgggagtcgggtgcactgacccggcacctcaagtctctcaccccctgcacagagaaaatccgcttcagtgtgagcaaggacgtggttgtcagcaaagaggacgcacgtgcaggttctggagctggagctgccggcttggggacagccacatcatcggtgacaggcgagcctatagagacttcacccgtgattcacctggtgacagatgccaagggcaccgtcatccacgaagtccacgtccagatgcaggagctgtccctgggcatgaaagccctggccccagagccccccgtctcccaggagctcccctgctccagcgagggcagccgtgagaacctgctgcaccaggccatgcagaactccggcatcgtccttgagcgcgctgctggggaggagggtgccctggagccagctcctgctgccgggtccagtccccagcccctggcagtggcagccccgcagctgccggtactggaagtgcagccgctggagacacaggtggccagcgaggcctcagcggtgcccaggacccacccatgtcctcagtgcagtgagaccttcccgacagcagccaccctggaggcccacaagaggggccacaccgggccgaggccgttcgcctgcgcgcagtgtggcaaggccttccccaaggcctacctgctcaagaagcaccaggaggtgcacgtgcgtgagcgccgcttccgctgtggcgactgcgggaagctctacaagaccattgcccatgtgcgtggccaccggcgcgtccactcagacgagcggccctacccttgtcccaagtgtggcaagcgctacaagactaagaacgcacagcaggtgcacttcaggacacacctggaggagaagccgcacgtgtgccagttctgcagccgtggcttccgagagaagggctcactggtgcggcacgtgcgacaccacacaggcgagaagccgttcaagtgctacaagtgcggccgtggcttcgccgagcacggcacgctgaaccggcacctgcgcaccaaagggggctgcctgctggaggtggaggagttgctggtgtctgaggacagccccgcggcagccaccaccgtcctcacggaagacccgcacacagtgttggtggagttctcgtccgtggtagctgacacccaggagtatatcatcgaggccactgcggacgatgcggagaccagtgaggccacggagatcatcgagggcacccagacagaggtggacagccacatcatgaaggtggtgcagcagatcgtgcaccaggctagcgccggccaccagatcatcgtgcagaacgtcaccatggacgaggagacggcgctgggcccagaggcggctgccgccgacaccatcaccattgccacccccgagagcctgacagagcaggtggccatgacgctggcctcggccatcagcgagggcactgtgcttgccgcccgggcagggacaagtggcactgaacaggccactgtgaccatggtgtcatcagaggacatcgagatcctggagcatgcaggcgagctggtcatcgcctcgccggagggccagctggaggtgcagacggtcatcgtctagcatgaggtctgcggggtcctggccgggcagggacagggcagaggactctgagcgccccacccatgcctgcctggcctggtagagaagatggcacaggatggaggcgccccaagacggacagtgtacataagagtttcttgttgctttacaataaaacatgagaacctgcaaaaaaaaaaaaaaaaaaaaaaaattggggggattaatgcgcggggtggcgggaaaaagcgagggcaatggacatggggcccatggggccaaatgcggggtgttccccggtgggccccaggagttctctcgtggcaccaaagggggggcggtagaacctcgggcgcggagtctcccccatatatatggcgagaggcgcggcatataaagttcgcgagaaaagacgcacagggttaaaccccggcgccttaaagagcccggggaaa

SEQ ID NO: 291134 - DNA, 1455 bp, Homo sapiens
tatgacgacatggtcgtaaatccgccatcttcctgcggcgcgttgcgacatggagggcgcgatggcagtgcgggtgacggccgctcatacggcagaagcccaggccgaagccgggcgggaagcgggcgagggtgcagttgcggcggtggcggcggccttggcccccagcggcttcctcggcctcccggcgcccttcagcgaggaagatgaggacgatgtgcacagatgcggccgctgccaggcagagttcaccgccttggaggattttgttcagcacaagattcagaaggcctgccagcgggcccctccggaggccctgcctgccacccctgccaccacagcgttgctgggccaggaggtggtgccggcagcaccaggcccagaggagcccatcactgtggcccacatcgtggtggaggcggcctctctggcagcagacatcagccacgcatctgaccttgttggtggtgggcacatcaaagaggtcatcgtggctgctgaggcggagctgggagacggtgagatggccgaggccccgggcagcccccaccagcaggggctggggctcgcaggggagggtgagcaggcccaggtgaagctactggtgaacaaggatggccgctatgtgtgtgcgctgtgccacaagaccttcaagacgggcagcatcctcaaggcccacatggtcactcacagcagccgcaaggaccacgagtgcaagctctgtggggcctccttccgcaccaagggctcactcatccggcaccaccggcggcacacggatgagcgcccctacaagtgctccaagtgtggaaagagcttccgggagtcgggtgcactgacccggcacctcaagtctctcaccccctgcacagagaaaatccgcttcagtgtgagcaaggacgtggttgtcagcaaagaggacgcacgtgcaggttctggagctggagctgccggcttggggacagccacatcatcggtgacaggcgagcctatagagacttcacccgtgattcacctggtgacagatgccaagggcaccgtcatccacgaagtccacgtccagatgcaggagctgtccctgggcatgaaagccctggccccagagcaggtggccagcgaggcctcagcggtgcccaggacccacccatgtcctcagtgcagtgagaccttcccgacagcagccaccctggaggcccacaagaggggccacaccgggccgaggccgttcgcctgcgcgcagtgtggcaaggccttccccaaggcctacctgctcaagaagcaccaggaggtgcacgtgcgtgagcgccgcttccgctgtggcgactgcgggaagctctacaagaccattgcccatgtgcgtggccaccggcgcgtccactcagacgagcggccctacccttgtcccaagtgtggcaagcgctacaagactaagacgcacctctggccgcaggaccc

SEQ ID NO: 291135 - DNA, 1108 bp, Homo sapiens
tatgacgacatggtcgtaaatccgccatcttcctgcggcgcgttgcgacatggagggcgcgatggcagtgcgggtgacggccgctcatacggcagaagcccaggccgaagccgggcgggaagcgggcgagggtgcagttgcggcggtggcggcggccttggcccccagcggcttcctcggcctcccggcgcccttcagcgaggaaggtaaccgggccgacccggagggtgcggccggggtgcgggcagttcatcccgggctggcagaggcccggatggcccgagctgcgggctcgaccgaccctcccagacccagacacctcgcggatctcgcgggaccctcacagccctccacgaaacccccagatgaggacgatgtgcacagatgcggccgctgccaggcagagttcaccgccttggaggattttgttcagcacaagattcagaaggcctgccagcgggcccctccggaggccctgcctgccacccctgccaccacagcgttgctgggccaggaggtggtgccggcagcaccaggcccagaggagcccatcactgtggcccacatcgtggtggaggcggcctctctggcagcagacatcagccacgcatctgaccttgttggtggtgggcacatcaaagaggtcatcgtggctgctgaggcggagctgggagacggtgagatggccgaggccccgggcagcccccaccagcaggggctggggctcgcaggggagggtgagcaggcccaggtgaagctactggtgaacaaggatggccgctatgtgtgtgcgctgtgccacaagaccttcaagacgggcagcatcctcaaggcccacatggtcactcacagcagccgcaaggaccacgagtgcaagctctgtggggcctccttccgcaccaaggggccagctggaggtgcagacggtcatcgtctagcatgaggtctgcggggtcctggccgggcagggacagggcagaggactctgagcgccccacccatgcctgcctggcctggtagagaagatggcacaggatggaggcgccccaagacggacagtgtacataagagtttcttgttgctttacaataaaacatgagaacctgca

SEQ ID NO: 291136 - DNA, 1253 bp, Homo sapiens
gtcttgaactcctgggctcaagctatcctcccaccttggccccttaaagtgctgagattacaagtgtgagccaccatgcccggccccagcagtcttaaatcctggtcctttactgtccccaaattagcatggaggagtccctctgcctcccagcccctctctgggcctctcgcctgtcagtcgctgaggtgggttttgagcatggcagccttagcaggtccctgcagcctaagcgtgctgtcagggccaccctctgctgggtgctgacctcctgagggtgggtctggcccctgcagacctgcagaggataggggctgtaccttgggatgaccttgttttgggcccgagtgtgttctcagcagcctggggaagtagctctgcttctgatggcctcctgggggaatctgttctagggctggaggaaaagccagacggagccctggctgcccagcctccgccttcccaggccctgctgacagcaggctcgttgcagatgaggacgatgtgcacagatgcggccgctgccaggcagagttcaccgccttggaggattttgttcagcacaagattcagaaggcctgccagcgggcccctccggaggccctgcctgccacccctgccaccacagcgttgctgggccaggaggtggtgccggcagcaccaggcccagaggagcccatcactgtggcccacatcgtggtggaggcggcctctctggcagcagacatcagccacgcatctgaccttgttggtaagccgacttccatgaatcgctggcctgatagaccttcgtggttggggccagaggatggggcccctgctgcctgtatgctcgtctctcccgagaccagggcctggctgggaggggccgcggcctcgtggcagcctttctgcgggcacagcctgcaggaggaggaagcgttgggcactgggccttcctcaggtgtccacagtggccgggggcacacccaggcaccagggagtcattgggctgtgctctctcccgtcagctttcccgggtggtctctgccgtgtccctcccagaatcttccccacttccctgccaccccctggttcctgctccctgcccgtaggcagcaacatccaccaggcacccaccagaatggcccactcgcccagcagcggctctggagggtgggtacagggtggacgggactctcccgcctctctagctgggctcggacttgctgctggccgtggcctgccctccccagtgctccctctggtgtggg

SEQ ID NO: 291137 - DNA, 2574 bp, Homo sapiens
tatgacgacatggtcgtaaatccgccatcttcctgcggcgcgttgcgacatggagggcgcgatggcagtgcgggtgacggccgctcatacggcagaagcccaggccgaagccgggcgggaagcgggcgagggtgcagttgcggcggtggcggcggccttggcccccagcggcttcctcggcctcccggcgcccttcagcgaggaagatgaggacgatgtgcacagatgcggccgctgccaggcagagttcaccgccttggaggattttgttcagcacaagattcagaaggcctgccagcgggcccctccggaggccctgcctgccacccctgccaccacagcgttgctgggccaggaggtggtgccggcagcaccaggcccagaggagcccatcactgtggcccacatcgtggtggaggcggcctctctggcagcagacatcagccacgcatctgaccttgttggtggtgggcacatcaaagaggtcatcgtggctgctgaggcggagctgggagacggtgagatggccgaggccccgggcagcccccaccagcaggggctggggctcgcaggggagggtgagcaggcccaggtgaagctactggtgaacaaggatggccgctatgtgtgtgcgctgtgccacaagaccttcaagacgggcagcatcctcaaggcccacatggtcactcacagcagccgcaaggaccacgagtgcaagctctgtggggcctccttccgcaccaagggctcactcatccggcaccaccggcggcacacggatgagcgcccctacaagtgctccaagtgtggaaagagcttccgggagtcgggtgcactgacccggcacctcaagtctctcaccccctgcacagagaaaatccgcttcagtgtgagcaaggacgtggttgtcagcaaagaggacgcacgtgcaggttctggagctggagctgccggcttggggacagccacatcatcggtgacaggcgagcctatagagacttcacccgtgattcacctggtgacagatgccaagggcaccgtcatccacgaagtccacgtccagatgcaggagctgtccctgggcatgaaagccctggccccagagccccccgtctcccaggagctcccctgctccagcgagggcagccgtgagaacctgctgcaccaggccatgcagaactccggcatcgtccttgagcgcgctgctggggaggagggtgccctggagccagctcctgctgccgggtccagtccccagcccctggcagtggcagccccgcagctgccggtactggaagtgcagccgctggagacacaggtggccagcgaggcctcagcggtgcccaggacccacccatgtcctcagtgcagtgagaccttcccgacagcagccaccctggaggcccacaagaggggccacaccgggccgaggccgttcgcctgcgcgcagtgtggcaaggccttccccaaggcctacctgctcaagaagcaccaggaggtgcacgtgcgtgagcgccgcttccgctgtggcgactgcgggaagctctacaagaccattgcccatgtgcgtggccaccggcgcgtccactcagacgagcggccctacccttgtcccaagtgtggcaagcgctacaagactaagaacgcacagcaggtgcacttcaggacacacctggaggagaagccgcacgtgtgccagttctgcagccgtggcttccgagagaagggctcactggtgcggcacgtgcgacaccacacaggcgagaagccgttcaagtgctacaagtgcggccgtggcttcgccgagcacggcacgctgaaccggcacctgcgcaccaaagggggctgcctgctggaggtggaggagttgctggtgtctgaggacagccccgcggcagccaccaccgtcctcacggaagacccgcacacagtgttggtggagttctcgtccgtggtagctgacacccaggagtatatcatcgaggccactgcggacgatgcggagaccagtgaggccacggagatcatcgagggcacccagacagaggtggacagccacatcatgaaggtggtgcagcagatcgtgcaccaggctagcgccggccaccagatcatcgtgcagaacgtcaccatggacgaggagacggcgctgggcccagaggcggctgccgccgacaccatcaccattgccacccccgagagcctgacagagcaggtggccatgacgctggcctcggccatcagcgagggcactgtgcttgccgcccgggcagggacaagtggcactgaacaggccactgtgaccatggtgtcatcagaggacatcgagatcctggagcatgcaggcgagctggtcatcgcctcgccggagggccagctggaggtgcagacggtcatcgtctagcatgaggtctgcggggtcctggccgggcagggacagggcagaggactctgagcgccccacccatgcctgcctggcctggtagagaagatggcacaggatggaggcgccccaagacggacagtgtacataagagtttcttgttgctttacaataaaacatgagaacctgca

SEQ ID NO: 291138 - DNA, 2733 bp, Homo sapiens
tatgacgacatggtcgtaaatccgccatcttcctgcggcgcgttgcgacatggagggcgcgatggcagtgcgggtgacggccgctcatacggcagaagcccaggccgaagccgggcgggaagcgggcgagggtgcagttgcggcggtggcggcggccttggcccccagcggcttcctcggcctcccggcgcccttcagcgaggaaggtaaccgggccgacccggagggtgcggccggggtgcgggcagttcatcccgggctggcagaggcccggatggcccgagctgcgggctcgaccgaccctcccagacccagacacctcgcggatctcgcgggaccctcacagccctccacgaaacccccagatgaggacgatgtgcacagatgcggccgctgccaggcagagttcaccgccttggaggattttgttcagcacaagattcagaaggcctgccagcgggcccctccggaggccctgcctgccacccctgccaccacagcgttgctgggccaggaggtggtgccggcagcaccaggcccagaggagcccatcactgtggcccacatcgtggtggaggcggcctctctggcagcagacatcagccacgcatctgaccttgttggtggtgggcacatcaaagaggtcatcgtggctgctgaggcggagctgggagacggtgagatggccgaggccccgggcagcccccaccagcaggggctggggctcgcaggggagggtgagcaggcccaggtgaagctactggtgaacaaggatggccgctatgtgtgtgcgctgtgccacaagaccttcaagacgggcagcatcctcaaggcccacatggtcactcacagcagccgcaaggaccacgagtgcaagctctgtggggcctccttccgcaccaagggctcactcatccggcaccaccggcggcacacggatgagcgcccctacaagtgctccaagtgtggaaagagcttccgggagtcgggtgcactgacccggcacctcaagtctctcaccccctgcacagagaaaatccgcttcagtgtgagcaaggacgtggttgtcagcaaagaggacgcacgtgcaggttctggagctggagctgccggcttggggacagccacatcatcggtgacaggcgagcctatagagacttcacccgtgattcacctggtgacagatgccaagggcaccgtcatccacgaagtccacgtccagatgcaggagctgtccctgggcatgaaagccctggccccagagccccccgtctcccaggagctcccctgctccagcgagggcagccgtgagaacctgctgcaccaggccatgcagaactccggcatcgtccttgagcgcgctgctggggaggagggtgccctggagccagctcctgctgccgggtccagtccccagcccctggcagtggcagccccgcagctgccggtactggaagtgcagccgctggagacacaggtggccagcgaggcctcagcggtgcccaggacccacccatgtcctcagtgcagtgagaccttcccgacagcagccaccctggaggcccacaagaggggccacaccgggccgaggccgttcgcctgcgcgcagtgtggcaaggccttccccaaggcctacctgctcaagaagcaccaggaggtgcacgtgcgtgagcgccgcttccgctgtggcgactgcgggaagctctacaagaccattgcccatgtgcgtggccaccggcgcgtccactcagacgagcggccctacccttgtcccaagtgtggcaagcgctacaagactaagaacgcacagcaggtgcacttcaggacacacctggaggagaagccgcacgtgtgccagttctgcagccgtggcttccgagagaagggctcactggtgcggcacgtgcgacaccacacaggcgagaagccgttcaagtgctacaagtgcggccgtggcttcgccgagcacggcacgctgaaccggcacctgcgcaccaaagggggctgcctgctggaggtggaggagttgctggtgtctgaggacagccccgcggcagccaccaccgtcctcacggaagacccgcacacagtgttggtggagttctcgtccgtggtagctgacacccaggagtatatcatcgaggccactgcggacgatgcggagaccagtgaggccacggagatcatcgagggcacccagacagaggtggacagccacatcatgaaggtggtgcagcagatcgtgcaccaggctagcgccggccaccagatcatcgtgcagaacgtcaccatggacgaggagacggcgctgggcccagaggcggctgccgccgacaccatcaccattgccacccccgagagcctgacagagcaggtggccatgacgctggcctcggccatcagcgagggcactgtgcttgccgcccgggcagggacaagtggcactgaacaggccactgtgaccatggtgtcatcagaggacatcgagatcctggagcatgcaggcgagctggtcatcgcctcgccggagggccagctggaggtgcagacggtcatcgtctagcatgaggtctgcggggtcctggccgggcagggacagggcagaggactctgagcgccccacccatgcctgcctggcctggtagagaagatggcacaggatggaggcgccccaagacggacagtgtacataagagtttcttgttgctttacaataaaacatgagaacctgca

SEQ ID NO: 291139 - DNA, 2828 bp, Homo sapiens
tatgacgacatggtcgtaaatccgccatcttcctgcggcgcgttgcgacatggagggcgcgatggcagtgcgggtgacggccgctcatacggcagaagcccaggccgaagccgggcgggaagcgggcgagggtgcagttgcggcggtggcggcggccttggcccccagcggcttcctcggcctcccggcgcccttcagcgaggaagatgaggacgatgtgcacagatgcggccgctgccaggcagagttcaccgccttggaggattttgttcagcacaagattcagaaggcctgccagcgggcccctccggaggccctgcctgccacccctgccaccacagcgttgctgggccaggaggtggtgccggcagcaccaggcccagaggagcccatcactgtggcccacatcgtggtggaggcggcctctctggcagcagacatcagccacgcatctgaccttgttggtggtgggcacatcaaagaggtcatcgtggctgctgaggcggagctgggagacggtgagatggccgaggccccgggcagcccccaccagcaggggctggggctcgcaggggagggtgagcaggcccaggtgaagctactggtgaacaaggatggccgctatgtgtgtgcgctgtgccacaagaccttcaagacgggcagcatcctcaaggcccacatggtcactcacagcagccgcaaggaccacgagtgcaagctctgtggggcctccttccgcaccaagggctcactcatccggcaccaccggcggcacacggatgagcgcccctacaagtgctccaagtgtggaaagagcttccgggagtcgggtgcactgacccggcacctcaagtctctcaccccctgcacagagaaaatccgcttcagtgtgagcaaggacgtggttgtcagcaaagaggacgcacgtgcaggttctggagctggagctgccggcttggggacagccacatcatcggtgacaggcgagcctatagagacttcacccgtgattcacctggtgacagatgccaagggcaccgtcatccacgaagtccacgtccagatgcaggagctgtccctgggcatgaaagccctggccccagaggtgggggcgacggggggccccggagggctgctctgtcttctgcctgctcggtgccagtctttgttctgggcactggctccaggggtctgagccaggcaggcgagggctgggcttcccacagggagagcagggccagtgggagcgccatgggggtctgagggtttgcacaaggctcctggcgtgcgtctgccccatggggtgggtgctggatgccaggctgcctggccagcctcctctctctgcctcccctgcagccccccgtctcccaggagctcccctgctccagcgagggcagccgtgagaacctgctgcaccaggccatgcagaactccggcatcgtccttgagcgcgctgctggggaggagggtgccctggagccagctcctgctgccgggtccagtccccagcccctggcagtggcagccccgcagctgccggtactggaagtgcagccgctggagacacaggtggccagcgaggcctcagcggtgcccaggacccacccatgtcctcagtgcagtgagaccttcccgacagcagccaccctggaggcccacaagaggggccacaccgggccgaggccgttcgcctgcgcgcagtgtggcaaggccttccccaaggcctacctgctcaagaagcaccaggaggtgcacgtgcgtgagcgccgcttccgctgtggcgactgcgggaagctctacaagaccattgcccatgtgcgtggccaccggcgcgtccactcagacgagcggccctacccttgtcccaagtgtggcaagcgctacaagactaagaacgcacagcaggtgcacttcaggacacacctggaggagaagccgcacgtgtgccagttctgcagccgtggcttccgagagaagggctcactggtgcggcacgtgcgacaccacacaggcgagaagccgttcaagtgctacaagtgcggccgtggcttcgccgagcacggcacgctgaaccggcacctgcgcaccaaagggggctgcctgctggaggtggaggagttgctggtgtctgaggacagccccgcggcagccaccaccgtcctcacggaagacccgcacacagtgttggtggagttctcgtccgtggtagctgacacccaggagtatatcatcgaggccactgcggacgatgcggagaccagtgaggccacggagatcatcgagggcacccagacagaggtggacagccacatcatgaaggtggtgcagcagatcgtgcaccaggctagcgccggccaccagatcatcgtgcagaacgtcaccatggacgaggagacggcgctgggcccagaggcggctgccgccgacaccatcaccattgccacccccgagagcctgacagagcaggtggccatgacgctggcctcggccatcagcgagggcactgtgcttgccgcccgggcagggacaagtggcactgaacaggccactgtgaccatggtgtcatcagaggacatcgagatcctggagcatgcaggcgagctggtcatcgcctcgccggagggccagctggaggtgcagacggtcatcgtctagcatgaggtctgcggggtcctggccgggcagggacagggcagaggactctgagcgccccacccatgcctgcctggcctggtagagaagatggcacaggatggaggcgccccaagacggacagtgtacataagagtttcttgttgctttacaataaaacatgagaacctgca

SEQ ID NO: 291140 - DNA, 1294 bp, Homo sapiens
tatgacgacatggtcgtaaatccgccatcttcctgcggcgcgttgcgacatggagggcgcgatggcagtgcgggtgacggccgctcatacggcagaagcccaggccgaagccgggcgggaagcgggcgagggtgcagttgcggcggtggcggcggccttggcccccagcggcttcctcggcctcccggcgcccttcagcgaggaagatgaggacgatgtgcacagatgcggccgctgccaggcagagttcaccgccttggaggattttgttcagcacaagattcagaaggcctgccagcgggcccctccggaggccctgcctgccacccctgccaccacagcgttgctgggccaggaggtggtgccggcagcaccaggcccagaggagcccatcactgtggcccacatcgtggtggaggcggcctctctggcagcagacatcagccacgcatctgaccttgttggtggtgggcacatcaaagaggtcatcgtggctgctgaggcggagctgggagacggtgagatggccgaggccccgggcagcccccaccagcaggggctggggctcgcaggggagggtgagcaggcccaggtgaagctactggtgaacaaggatggccgctatgtgtgtgcgctgtgccacaagaccttcaagacgggcagcatcctcaaggcccacatggtcactcacagcagccgcaaggaccacgagtgcaagctctgtggggcctccttccgcaccaagggctcactcatccggcaccaccggcggcacacggatgagcgcccctacaagtgctccaagtgtggaaagagcttccgggagtcgggtgcactgacccggcacctcaagtctctcaccccctgcacagagaaaatccgcttcagtgtgagcaaggacgtggttgtcagcaaagaggacgcacgtgcaggttctggagctggagctgccggcttggggacagccacatcatcggtgacaggcgagcctatagagacttcacccgtgattcacctgtgtgaccatggtgtcatcagaggacatcgagatcctggagcatgcaggcgagctggtcatcgcctcgccggagggccagctggaggtgcagacggtcatcgtctagcatgaggtctgcggggtcctggccgggcagggacagggcagaggactctgagcgccccacccatgcctgcctggcctggtagagaagatggcacaggatggaggcgccccaagacggacagtgtacataagagtttcttgttgctttacaataaaacatgagaacctgca

SEQ ID NO: 291141 - DNA, 450 bp, Homo sapiens
tgttggttgcatggaggagtgtcatatacgcactcattccaccaaattcccttgatatcctttaccattactttataaaccatttacatttctcttgcagagagccacaacctaagtgccttacctgatgacactgacagagagaatcactggaaatgatagttttatacttaattcttgtcactaaaactctaatagtgtttttaaaaacctaatacaaggccaggcctggcggctcacacctatcatcccagcactttgggatgcctagggaggagaattgctcaaggccagaagtttgaaaccagaacagcctgggcaacatagtgagaccctgtctctgaaaaaacaaaacaaacaacaacagcaacaacaacaacaaaaatacctaacacaaatacttaaatgcatacaactatttttataacttttaacttttacacttagttg

SEQ ID NO: 291142 - DNA, 529 bp, Homo sapiens
aaggtcttgcattcatctctcccaggacagtgaagcctgctcagtctagacttacatgagagactactcaatgactctcacagaaaagagatcttcccaaggtgacatcttctcctcctaagccaataaggtcatcttactcacagtccacttccaggaactgaccccaaatggacagaatctacttatatcatggcacagctgtcaacttctcttgctaaagaagagaataacgctcacaaaattgccccagatggcggtgcaacatttttgggccaagtactacaactgaaaagcatgaacagagttttaccagcgggttacagctcttgtttaacttctagaaaactagtgacatgctcttggagaagcccctcttacagaaggccaaagaagctgagaaagcacagaggaaataatcaaggctcacctgggaaagcaacacagcttcaccatcattctctcgtccctgagaaaataaatcaaaacaaacaagtatattgagcactgggtgttcaaaaccacatga

SEQ ID NO: 291143 - DNA, 525 bp, Homo sapiens
gtgggaaccggacagcagccttggggacgcagcatcaacgacaccaaaggctgacagtgaactgaggacaatagtgacaagctcaccaagaaagaaggcaggatctcatgagaatgcgtaacaggacactccacctggcacggtaggtcaggaagaggtcctcaaagaaggaacacgtaaagtgtgagccagcggggcaggagtggaagctgcaagtgcatctttctgtatcgcgtttgtgagagctcattatcgagttgacacgaacccctggcccagcacatgctgcacatgccgtacctttcttgtgaagaatgttccgggctcgtaccaggtcaggatcgtcaggcccaacacccagaattctgagagacacatagttgagcgcagtcccaaacacggtggacttatcctcaatgtgcctacaggagcagaggacaggtgagaaaccggtatctgtccttacttctaagaaataaagcaaaactttctgtggagtttcctcagaaaactaagaatgctaaa

SEQ ID NO: 291144 - DNA, 2127 bp, Homo sapiens
caaatgggaggggacgtgttcccacctggtcgtctccccgtcctgtagccaaaccagacagaagcagcacctatgccaagcctcagcaaggtgggagaacccgcagcccccctccccttctgcaaaccagaacccagctgcagacaaagctggatgctgcgtggaccccggcctgctggagctggagtcgggccatctgaaggccgtgtggcctggatccagctgtgctgctctctctgagtgcccaccctctctggtcccagcaggcagctttgcaccacagaggcaggaagcaagctagacacagccggccctgcttcctgcccctgtgcagcctctggagaggggaggtgagagcagagccgccgggatctccctagtttctggccgcctcctccctgacagtcatcgccagattgtttatctgctaacagaacccagatttgtcccccaggacctccagtccctctgcaggccaggacctcgctcctccccaaccttccttagcatttccccacccaaaccccagacgaacatacaggaaggagagacagggagctgcctccaaacgcggccgtgcacccgcccaccccctcctgaaggccacatctgtgtcactgacacatatcgggggctttctgggtttctttagccgggcggccctgagcagcctggcccatccagcctctctgagctccatctgggtaacatccgtcatgcagggcgacatctcctccagcatgagcgctggagggctctggaggcccggcccccgctgccactacatggcttacagccctgcaaacaagcagggtggtcatgcactgaggttctcaatgggcgatcctgcccccagcggacccttggccatgtctgaacacacttgtggctgtcacgacggtgggtgccactggcacctagtgggcggcagccagggaggcggccacacacctgtgtcacacaggagggccctcacagcagagaggatctcctccaaacgtcagtagtgctgaggttgggagaccctgtaacagagccgcccgcactatggcgaggattacatgggaaagtgtgctgtgatgttctcggaacagtgtctggcacacaggaagccctcggcaaacaggggctgctgtgtttaccatcctcatctcagcctcgagaagtcaaagcagatgccaagatgcctgttttccaacaaggaaacaaagcccagaagagggacgtgctggcccagaactagaatctgggccccgatcctggtctctgagggagcctcctgcctggggccaggtcccatggagtgctggctccggacactaccaccatctcagaagggacgggctctggcccccaggatagaggctttctagagttggtgggggacatgtggggtgctgtttggggactggctgtgctcccaccccagcagcccctcctcccacgcccacaatggcagctgggaggctgccacacggagctctccggagccagctactgctcagcagagctcggccctcccgtttccaggaggtcacttggcctcgggagggctgccccgcgcctttcaggaggggatacaataggtggcgatgcaggcagtgaggccaaggccaccttccctgggactgagtccctggcatgcaccaggcaccgaggagggatggaagacgctgtgactttgatccacatgacctctccaagctcccaacagcctgtaggagggccgcctggtcccactgtccccccttcacagttggggaccgaggcccagggaggcaaaggaacctgcccgagagcccccagcccccagatcccccggcgcacccctcacaccatgctgccacccacgacccagaggacgtggccagctggaacctaccaggtgccctgcggctctcagtagcttgtgggtggagaacgggaaggcctcgttgctcaggtctgcgtccagcacctcctgcaaaatggctcggctgcaggcaagagcaaagtcgctcagtcagcaagtgctcacgggtggggcctgggcaggaaaggccccggggacctgccatgagtgggataagtccctgtcctcatgagacagatgacaataaacatggattaataaaaatacaccaagac

SEQ ID NO: 291145 - DNA, 813 bp, Homo sapiens
tggggccttctatcttcctaagagtgttctctgacagggctgttccctgcccagtgaaacaaaggaccaaagattttctcaaaaatgtttaaaaatttgacccatgtaacgcggacactccacactcacggaagtgggcagaagggggagggggaaaaaaaaggaaagaaaagcttcttcagcctcagcgcggagcagctgctcttccttacccagacgggacagtcgtggaccaccagcttgacattcccaaacgcactggcctgatactcggtgaacaccggacgcgcgaccgtgctggccgcgttcagcaacaagctgctctcgtccccggagaccagagggcttctccccaggttcagccatttaggaaagattggtgacctatctgcatgatggcattaactacaaggatcatcgaagagccacagtcacaaagccagtctctgaatatggttcaaagaaatcttataactctctgaacaggacgtgtattcgtcaacactacttggagggccggtacttccaaggaagtcacctttgcagtcgatctatgtgcactgttctcagagccagctcgcacccatgaagaacaacacaacttaccggtcataggagcagaaagtgtcaaccttgcagcaggatttggacactctgggagccaaactggatgtggaagctccaaaggtttacaaagtcctcttggagaagcagattcctgtgggaacctggttaaatctcccaagctagcagtgtttttactacaataagacagtgattaattgtgtcccactgggcactgtcctgataagg

SEQ ID NO: 291146 - DNA, 3661 bp, Homo sapiens
ggtatcatactccagcaagcgcacatcatcagtgacgtcgatcacgatgcatcgtcatggcggctgcgccggccttgaagcactggcgcaccacgctggagcgggtggagaagttcgtgtcgccgctctactttaccgactgtaacctccgcggcaggctttttggggccagctgccctgtggctgtgctctccagcttcctgacgccggagagacttccctaccaggaggcagtccagcgggacttccgccccgcgcaggtcggcgacagcttcggacccacatggtggacctgctggttccgggtggagctgaccatcccagaggcatgggtgggccaggaagttcacctttgctgggaaagtgatggagaaggtctggtgtggcgtgatggagaacctgtccagggtttaaccaaagagggtgagaagaccagctatgtcctgactgacaggctgggggaaagagacccccgaagcctcactctctatgtggaagtagcctgcaatgggctcctgggggccgggaagggaagcatgattgcagcccctgaccctgagaagatgttccagctgagccgggctgagctagctgtgttccaccgggatgtccacatgctcctggtggatctggagctgctgctgggcatagccaagggcctcgggaaggacaaccagcgcagcttccaggccctgtacacagccaatcagatggtgaacgtgtgtgaccctgcccagcccgagaccttcccagtggcccaggccctggcctccaggttctttggccaacatgggggtgaaagccaacacaccattcatgccacagggcactgccacattgatacagcctggctttggcccttcaaagagactgtgaggaaatgtgcccggagctgggtgaccgccctgcagctcatggagcggaaccctgagttcatctttgcctgctcccaggcgcagcagctggaatgggtgaagagccgctaccctggcctgtactcccgcatccaggagtttgcgtgccgtgggcagtttgtgcctgtggggggcacctgggtggagatggatgggaacctgcccagtggagaggccatggtgaggcagtttttgcagggccagaacttctttctgcaggagtttgggaagatgtgctctgagttctggctgccggacacctttggctactcagcacagctcccccagatcatgcacggctgtggcatcaggcgctttctcacccagaaattgagctggaatttggtgaactccttcccacaccatacatttttctgggagggcctggatggctcccgtgtactggtccacttcccacctggcgactcctatgggatgcagggcagcgtggaggaggtgctgaagaccgtggccaacaaccgggacaaggggcgggccaaccacagtgccttcctctttggctttggggatgggggtggtggccccacccagaccatgctggaccgcctgaagcgcctgagcaatacggatgggctgcccagggtgcagctatcttctccaagacagctcttctcagcactggagagtgactcagagcagctgtgcacgtgggttggggagctcttcttggagctgcacaatggcacatacaccacccatgcccagatcaagaaggggaaccgggaatgtgagcggatcctgcacgacgtggagctgctcagtagcctggccctggcccgcagtgcccagttcctatacccagcagcccagctgcagcacctctggaggctccttcttctgaaccagttccatgatgtggtgactggaagctgcatccagatggtggcagaggaagccatgtgccattatgaagacatccgttcccatggcaatacactgctcagcgctgcagccgcagccctgtgtgctggggagccaggtcctgagggcctcctcatcgtcaacacactgccctggaagcggatcgaagtgatggccctgcccaaaccgggcggggcccacagcctaggtacgagctgaggggaagggttgctactgcagcaggaaggatggaggccagacagatcaggcctgggataccccgagggatctgggtgcccctgactggagagtagtagcacatcttccaccaacccatccccacctgcgcaagcttcctgaaaggtcaggaaggctgcactgatgcccaggcctcacccccagccctggtgacagtgcccagcatgggctatgctcctgttcctccccccacctcactgcagcccctgctgccccagcagcctgtgttcgtagtgcaagaggtgagtcctgcatgccctggggggcaggaactgtgctgggatactttcttacaactgagggtcctgagctcccctgtctggagcaagtggtgaggcggggctggggttggggtgggaagacttttggtgtgggaagcccctacagactcagcctcaaggcctcctcccacaaagactgatggctccgtgactctggacaatggcatcatccgagtgaagctggacccaactggtcgcctgacgtccttggtcctggtggcctctggcagggaggccattgctgagggcgccgtggggaaccagtttgtgctatttgatgatgtccccttgtactgggatgcatgggacgtcatggactaccacctggagacacggaagcctgtgctgggccaggcagggaccctggcagtgggcaccgagggcggcctgcggggcagcgcctggttcttgctacagatcagccccaacagtcggcttagccaggaggttgtgctggacgttggctgcccctatgtccgcttccacaccgaggtacactggcatgaggcccacaagttcctgaaggtggagttccctgctcgcgtgcggagttcccaggccacctatgagatccagtttgggcacctgcagcgacctacccactacaatacctcttgggactgggctcgatttgaggtgtgggcccatcgctggatggatctgtcagaacacggctttgggctggccctgctcaacgactgcaagtatggcgcgtcagtgcgaggcagcatcctcagcctctcgctcttgcgggcgcctaaagccccggacgctactgctgacacggggcgccacgagttcacctatgcactgatgccgcacaagggctctttccaggatgctggcgttatccaagctgcctacagcctaaacttccccctgttggctctgccagcccccagcccagcgcccgccacctcctggagtgcgttttccgtgtcttcacccgcggtcgtattggagaccgtcaagcaggcggagagcagcccccagcgccgctcgctggtcctgaggctgtatgaggcccacggcagccacgtggactgctggctgcacttgtcgctgccggttcaggaggccatcctctgcgatctcttggagcgaccagaccctgctggccacttgacccttcgggacaaccgcctgaagctcaccttttctcccttccaagtgctgtccctgttgctcgtgcttcagcctccgccacactgagtccctggggctggggttttgtttgtagaaggctctggggactcctaatttctgcttccccagcctaaagcagggatcagtcttttcttgtggaataaatccttggatcgggaa

SEQ ID NO: 291147 - DNA, 3378 bp, Homo sapiens
ggtatcatactccagcaagcgcacatcatcagtgacgtcgatcacgatgcatcgtcatggcggctgcgccggccttgaagcactggcgcaccacgctggagcgggtggagaagttcgtgtcgccgctctactttaccgactgtaacctccgcggcaggctttttggggccagctgccctgtggctgtgctctccagcttcctgacgccggagagacttccctaccaggaggcagtccagcgggacttccgccccgcgcaggtcggcgacagcttcggacccacatggtggacctgctggttccgggtggagctgaccatcccagaggcatgggtgggccaggaagttcacctttgctgggaaagtgatggagaaggtctggtgtggcgtgatggagaacctgtccagggtttaaccaaagagggtgagaagaccagctatgtcctgactgacaggctgggggaaagagacccccgaagcctcactctctatgtggaagtagcctgcaatgggctcctgggggccgggaagggaagcatgattgcagcccctgaccctgagaagatgttccagctgagccgggctgagctagctgtgttccaccgggatgtccacatgctcctggtggatctggagctgctgctgggcatagccaagggcctcgggaaggacaaccagcgcagcttccaggccctgtacacagccaatcagatggtgaacgtgtgtgaccctgcccagcccgagaccttcccagtggcccaggccctggcctccaggttctttggccaacatgggggtgaaagccaacacaccattcatgccacagggcactgccacattgatacagcctggctttggcccttcaaagagactgtgaggaaatgtgcccggagctgggtgaccgccctgcagctcatggagcggaaccctgagttcatctttgcctgctcccaggcgcagcagctggaatgggtgaagagccgctaccctggcctgtactcccgcatccaggagtttgcgtgccgtgggcagtttgtgcctgtggggggcacctgggtggagatggatgggaacctgcccagtggagaggccatggtgaggcagtttttgcagggccagaacttctttctgcaggagtttgggaagatgtgctctgagttctggctgccggacacctttggctactcagcacagctcccccagatcatgcacggctgtggcatcaggcgctttctcacccagaaattgagctggaatttggtgaactccttcccacaccatacatttttctgggagggcctggatggctcccgtgtactggtccacttcccacctggcgactcctatgggatgcagggcagcgtggaggaggtgctgaagaccgtggccaacaaccgggacaaggggcgggccaaccacagtgccttcctctttggctttggggatgggggtggtggccccacccagaccatgctggaccgcctgaagcgcctgagcaatacggatgggctgcccagggtgcagctatcttctccaagacagctcttctcagcactggagagtgactcagagcagctgtgcacgtgggttggggagctcttcttggagctgcacaatggcacatacaccacccatgcccagatcaagaaggggaaccgggaatgtgagcggatcctgcacgacgtggagctgctcagtagcctggccctggcccgcagtgcccagttcctatacccagcagcccagctgcagcacctctggaggctccttcttctgaaccagttccatgatgtggtgactggaagctgcatccagatggtggcagaggaagccatgtgccattatgaagacatccgttcccatggcaatacactgctcagcgctgcagccgcagccctgtgtgctggggagccaggtcctgagggcctcctcatcgtcaacacactgccctggaagcggatcgaagtgatggccctgcccaaaccgggcggggcccacagcctagccctggtgacagtgcccagcatgggctatgctcctgttcctccccccacctcactgcagcccctgctgccccagcagcctgtgttcgtagtgcaagagactgatggctccgtgactctggacaatggcatcatccgagtgaagctggacccaactggtcgcctgacgtccttggtcctggtggcctctggcagggaggccattgctgagggcgccgtggggaaccagtttgtgctatttgatgatgtccccttgtactgggatgcatgggacgtcatggactaccacctggagacacggtataggctgggcagcatgtggggatggtggaggtggtgggaacacaggctgctctggatcagtatgtccacccctgtcccataggaagcctgtgctgggccaggcagggaccctggcagtgggcaccgagggcggcctgcggggcagcgcctggttcttgctacagatcagccccaacagtcggcttagccaggaggttgtgctggacgttggctgcccctatgtccgcttccacaccgaggtacactggcatgaggcccacaagttcctgaaggtggagttccctgctcgcgtgcggagttcccaggccacctatgagatccagtttgggcacctgcagcgacctacccactacaatacctcttgggactgggctcgatttgaggtgtgggcccatcgctggatggatctgtcagaacacggctttgggctggccctgctcaacgactgcaagtatggcgcgtcagtgcgaggcagcatcctcagcctctcgctcttgcgggcgcctaaagccccggacgctactgctgacacggggcgccacgagttcacctatgcactgatgccgcacaagggctctttccaggatgctggcgttatccaagctgcctacagcctaaacttccccctgttggctctgccagcccccagcccagcgcccgccacctcctggagtgcgttttccgtgtcttcacccgcggtcgtattggagaccgtcaagcaggcggagagcagcccccagcgccgctcgctggtcctgaggctgtatgaggcccacggcagccacgtggactgctggctgcacttgtcgctgccggttcaggaggccatcctctgcgatctcttggagcgaccagaccctgctggccacttgacccttcgggacaaccgcctgaagctcaccttttctcccttccaagtgctgtccctgttgctcgtgcttcagcctccgccacactgagtccctggggctggggttttgtttgtagaaggctctggggactcctaatttctgcttccccagcctaaagcagggatcagtcttttcttgtggaataaatccttggatcgggaa

SEQ ID NO: 291148 - DNA, 3552 bp, Homo sapiens
ggtatcatactccagcaagcgcacatcatcagtgacgtcgatcacgatgcatcgtcatggcggctgcgccggccttgaagcactggcgcaccacgctggagcgggtggagaagttcgtgtcgccgctctactttaccgactgtaacctccgcggcaggctttttggggccagctgccctgtggctgtgctctccagcttcctgacgccggagagacttccctaccaggaggcagtccagcgggacttccgccccgcgcaggtcggcgacagcttcggacccacatggtggacctgctggttccgggtggagctgaccatcccagaggcatgggtgggccaggaagttcacctttgctgggaaagtgatggagaaggtctggtgtggcgtgatggagaacctgtccagggtttaaccaaagagggtgagaagaccagctatgtcctgactgacaggctgggggaaagagacccccgaagcctcactctctatgtggaagtagcctgcaatgggctcctgggggccgggaagggaagcatgattgcagcccctgaccctgagaagatgttccagctgagccgggctgagctagctgtgttccaccgggatgtccacatgctcctggtggatctggagctgctgctgggcatagccaagggcctcgggaaggacaaccagcgcagcttccaggccctgtacacagccaatcagatggtgaacgtgtgtgaccctgcccagcccgagaccttcccagtggcccaggccctggcctccaggttctttggccaacatgggggtgaaagccaacacaccattcatgccacagggcactgccacattgatacagcctggctttggcccttcaaagagactgtgaggaaatgtgcccggagctgggtgaccgccctgcagctcatggagcggaaccctgagttcatctttgcctgctcccaggcgcagcagctggaatgggtgaagagccgctaccctggcctgtactcccgcatccaggagtttgcgtgccgtgggcagtttgtgcctgtggggggcacctgggtggagatggatgggaacctgcccagtggagaggccatggtgaggcagtttttgcagggccagaacttctttctgcaggagtttgggaagatgtgctctgagttctggctgccggacacctttggctactcagcacagctcccccagatcatgcacggctgtggcatcaggcgctttctcacccagaaattgagctggaatttggtgaactccttcccacaccatacatttttctgggagggcctggatggctcccgtgtactggtccacttcccacctggcgactcctatgggatgcagggcagcgtggaggaggtgctgaagaccgtggccaacaaccgggacaaggggcgggccaaccacagtgccttcctctttggctttggggatgggggtggtggccccacccagaccatgctggaccgcctgaagcgcctgagcaatacggatgggctgcccagggtgcagctatcttctccaagacagctcttctcagcactggagagtgactcagagcagctgtgcacgtgggttggggagctcttcttggagctgcacaatggcacatacaccacccatgcccagatcaagaaggggaaccgggaatgtgagcggatcctgcacgacgtggagctgctcagtagcctggccctggcccgcagtgcccagttcctatacccagcagcccagctgcagcacctctggaggctccttcttctgaaccagttccatgatgtggtgactggaagctgcatccagatggtggcagaggaagccatgtgccattatgaagacatccgttcccatggcaatacactgctcagcgctgcagccgcagccctgtgtgctggggagccaggtcctgagggcctcctcatcgtcaacacactgccctggaagcggatcgaagtgatggccctgcccaaaccgggcggggcccacagcctagccctggtgacagtgcccagcatgggctatgctcctgttcctccccccacctcactgcagcccctgctgccccagcagcctgtgttcgtagtgcaagaggtgagtcctgcatgccctggggggcaggaactgtgctgggatactttcttacaactgagggtcctgagctcccctgtctggagcaagtggtgaggcggggctggggttggggtgggaagacttttggtgtgggaagcccctacagactcagcctcaaggcctcctcccacaaagactgatggctccgtgactctggacaatggcatcatccgagtgaagctggacccaactggtcgcctgacgtccttggtcctggtggcctctggcagggaggccattgctgagggcgccgtggggaaccagtttgtgctatttgatgatgtccccttgtactgggatgcatgggacgtcatggactaccacctggagacacggtataggctgggcagcatgtggggatggtggaggtggtgggaacacaggctgctctggatcagtatgtccacccctgtcccataggaagcctgtgctgggccaggcagggaccctggcagtgggcaccgagggcggcctgcggggcagcgcctggttcttgctacagatcagccccaacagtcggcttagccaggaggttgtgctggacgttggctgcccctatgtccgcttccacaccgaggtacactggcatgaggcccacaagttcctgaaggtggagttccctgctcgcgtgcggagttcccaggccacctatgagatccagtttgggcacctgcagcgacctacccactacaatacctcttgggactgggctcgatttgaggtgtgggcccatcgctggatggatctgtcagaacacggctttgggctggccctgctcaacgactgcaagtatggcgcgtcagtgcgaggcagcatcctcagcctctcgctcttgcgggcgcctaaagccccggacgctactgctgacacggggcgccacgagttcacctatgcactgatgccgcacaagggctctttccaggatgctggcgttatccaagctgcctacagcctaaacttccccctgttggctctgccagcccccagcccagcgcccgccacctcctggagtgcgttttccgtgtcttcacccgcggtcgtattggagaccgtcaagcaggcggagagcagcccccagcgccgctcgctggtcctgaggctgtatgaggcccacggcagccacgtggactgctggctgcacttgtcgctgccggttcaggaggccatcctctgcgatctcttggagcgaccagaccctgctggccacttgacccttcgggacaaccgcctgaagctcaccttttctcccttccaagtgctgtccctgttgctcgtgcttcagcctccgccacactgagtccctggggctggggttttgtttgtagaaggctctggggactcctaatttctgcttccccagcctaaagcagggatcagtcttttcttgtggaataaatccttggatcgggaa

SEQ ID NO: 291149 - DNA, 4155 bp, Homo sapiens
ggtatcatactccagcaagcgcacatcatcagtgacgtcgatcacgatgcatcgtcatggcggctgcgccggccttgaagcactggcgcaccacgctggagcgggtggagaagttcgtgtcgccgctctactttaccgactgtaacctccgcggcaggctttttggggccagctgccctgtggctgtgctctccagcttcctgacgccggagagacttccctaccaggaggcagtccagcgggacttccgccccgcgcaggtcggcgacagcttcggacccacatggtggacctgctggttccgggtggagctgaccatcccagaggcatgggtgggccaggaagttcacctttgctgggaaagtgatggagaaggtctggtgtggcgtgatggagaacctgtccagggtttaaccaaagagggtgagaagaccagctatgtcctgactgacaggctgggggaaagagacccccgaagcctcactctctatgtggaagtagcctgcaatgggctcctgggggccgggaagggaagcatgattgcagcccctgaccctgagaagatgttccagctgagccgggctgagctagctgtgttccaccgggatgtccacatgctcctggtggatctggagctgctgctgggcatagccaagggcctcgggaaggacaaccagcgcagcttccaggccctgtacacagccaatcagatggtgaacgtgtgtgaccctgcccagcccgagaccttcccagtggcccaggccctggcctccaggttctttggccaacatgggggtgaaagccaacacaccattcatgccacagggcactgccacattgatacagcctggctttggcccttcaaagagactgtgaggaaatgtgcccggagctgggtgaccgccctgcagctcatggagcggaaccctgagttcatctttgcctgctcccaggcgcagcagctggaatgggtgaagagccgctaccctggcctgtactcccgcatccaggagtttgcgtgccgtgggcagtttgtgcctgtggggggcacctgggtggagatggatgggaacctgcccagtggagaggccatggtgaggcagtttttgcagggccagaacttctttctgcaggagtttgggaagatgtgctctgagttctggctgccggacacctttggctactcagcacagctcccccagatcatgcacggctgtggcatcaggcgctttctcacccagaaattgagctggaatttggtgaactccttcccacaccatacatttttctgggagggcctggatggctcccgtgtactggtccacttcccacctggcgactcctatgggatgcagggcagcgtggaggaggtgctgaagaccgtggccaacaaccgggacaaggggcgggccaaccacagtgccttcctctttggctttggggatgggggtggtggccccacccagaccatgctggaccgcctgaagcgcctgagcaatacggatgggctgcccagggtgcagctatcttctccaagacagctcttctcagcactggagagtgactcagagcagctgtgcacgtgggttggggagctcttcttggagctgcacaatggcacatacaccacccatgcccagatcaagaaggggaaccgggaatgtgagcggatcctgcacgacgtggagctgctcagtagcctggccctggcccgcagtgcccagttcctatacccagcagcccagctgcagcacctctggaggctccttcttctgaaccagttccatgatgtggtgactggaagctgcatccagatggtggcagaggaagccatgtgccattatgaagacatccgttcccatggcaatacactgctcagcgctgcagccgcagccctgtgtgctggggagccaggtcctgagggcctcctcatcgtcaacacactgccctggaagcggatcgaagtgatggccctgcccaaaccgggcggggcccacagcctaggtacgagctgaggggaagggttgctactgcagcaggaaggatggaggccagacagatcaggcctgggataccccgagggatctgggtgcccctgactggagagtagtagcacatcttccaccaacccatccccacctgcgcaagcttcctgaaaggtcaggaaggctgcactgatgcccaggcctcacccccagccctggtgacagtgcccagcatgggctatgctcctgttcctccccccacctcactgcagcccctgctgccccagcagcctgtgttcgtagtgcaagaggtgagtcctgcatgccctggggggcaggaactgtgctgggatactttcttacaactgagggtcctgagctcccctgtctggagcaagtggtgaggcggggctggggttggggtgggaagacttttggtgtgggaagcccctacagactcagcctcaaggcctcctcccacaaagactgatggctccgtgactctggacaatggcatcatccgagtgaagctggacccaactggtcgcctgacgtccttggtcctggtggcctctggcagggaggccattgctgagggcgccgtggggaaccagtttgtgctatttgatgatgtccccttgtactgggatgcatgggacgtcatggactaccacctggagacacggaagcctgtgctgggccaggcagggaccctggcagtgggcaccgagggcggcctgcggggcagcgcctggttcttgctacagatcagccccaacagtcggcttagccaggaggttgtgctggacgttggctgcccctatgtccgcttccacaccgaggtacactggcatgaggcccacaagttcctgaaggtggagttccctgctcgcgtgcggagttcccaggccacctatgagatccagtttgggcacctgcagcgacctacccactacaatacctcttgggactgggctcgatttgaggtgtgggcccatcgctggatggatctgtcagaacacggctttgggctggccctgctcaacgactgcaagtatggcgcgtcagtgcgaggcagcatcctcagcctctcgctcttgcgggcgcctaaagccccggacgctactgctgacacggggcgccacgagttcacctatgcactgatgccgcacaagggctctttccaggatgctggcgttatccaagctgcctacagcctaaacttccccctgttggctctgccagcccccagcccagcgcccgccacctcctggagtgcgttttccgtgtcttcacccgcggtcgtattggagaccgtcaagcaggcggagagcagcccccagcgccgctcgctggtcctgaggctgtatgaggcccacggcagccacgtggactgctggctgcacttgtcgctgccggttcaggaggccatcctctgcgatctcttggagcgaccagaccctgctggccacttgacccttcgggacaaccgcctgaagctcaccttttctcccttccaagtgctgtccctgttgctcgtgcttcagcctccgccacactgagtccctggggctggggttttgtttgtagaaggctctggggactcctaatttctgcttccccagcctaaagcagggatcagtcttttcttgtggaataaatccttggatcgggaaaaaaaaacacaacacaacacaaaaaaaaagggggcgcgccccgttttcaaatattatcccgcggggggccccagctttttacgcgccttcaccccgcgatttttcttggttacaaaggggccccctctttagggcaactccgttttataccgctaaggcccggggcaccggggtttttaaacacgcgtctgtaacctgggggaaacaactggcgtagccgtggacgcacaccttcgggtaaacgggcgcaccccctccctcctctgggggggtgggcaccaacattcttgcggcccaacacttacccttccggataattattccaacgcgcctccctaggggggtcacttattaacacttacacaggtgggttatactaacggcgtttaaccacatgcgctgcatattgccgtccccggcttggtacaagcttgcgccttaccgggacattgactttgcacaaactcttattcgccgggacgtgctctcaaagc

SEQ ID NO: 291150 - DNA, 3823 bp, Homo sapiens
ggtatcatactccagcaagcgcacatcatcagtgacgtcgatcacgatgcatcgtcatggcggctgcgccggccttgaagcactggcgcaccacgctggagcgggtggagaagttcgtgtcgccgctctactttaccgactgtaacctccgcggcaggctttttggggccagctgccctgtggctgtgctctccagcttcctgacgccggagagacttccctaccaggaggcagtccagcgggacttccgccccgcgcaggtcggcgacagcttcggacccacatggtggacctgctggttccgggtggagctgaccatcccagaggcatgggtgggccaggaagttcacctttgctgggaaagtgatggagaaggtctggtgtggcgtgatggagaacctgtccagggtttaaccaaagagggtgagaagaccagctatgtcctgactgacaggctgggggaaagagacccccgaagcctcactctctatgtggaagtagcctgcaatgggctcctgggggccgggaagggaagcatgattgcagcccctgaccctgagaagatgttccagctgagccgggctgagctagctgtgttccaccgggatgtccacatgctcctggtggatctggagctgctgctgggcatagccaagggcctcgggaaggacaaccagcgcagcttccaggccctgtacacagccaatcagatggtgaacgtgtgtgaccctgcccagcccgagaccttcccagtggcccaggccctggcctccaggttctttggccaacatgggggtgaaagccaacacaccattcatgccacagggcactgccacattgatacagcctggctttggcccttcaaagagactgtgaggaaatgtgcccggagctgggtgaccgccctgcagctcatggagcggaaccctgagttcatctttgcctgctcccaggcgcagcagctggaatgggtgaagagccgctaccctggcctgtactcccgcatccaggagtttgcgtgccgtgggcagtttgtgcctgtggggggcacctgggtggagatggatgggaacctgcccagtggagaggccatggtgaggcagtttttgcagggccagaacttctttctgcaggagtttgggaagatgtgctctgagttctggctgccggacacctttggctactcagcacagctcccccagatcatgcacggctgtggcatcaggcgctttctcacccagaaattgagctggaatttggtgaactccttcccacaccatacatttttctgggagggcctggatggctcccgtgtactggtccacttcccacctggcgactcctatgggatgcagggcagcgtggaggaggtgctgaagaccgtggccaacaaccgggacaaggggcgggccaaccacagtgccttcctctttggctttggggatgggggtggtggccccacccagaccatgctggaccgcctgaagcgcctgagcaatacggatgggctgcccagggtgcagctatcttctccaagacagctcttctcagcactggagagtgactcagagcagctgtgcacgtgggttggggagctcttcttggagctgcacaatggcacatacaccacccatgcccagatcaagaaggggaaccgggaatgtgagcggatcctgcacgacgtggagctgctcagtagcctggccctggcccgcagtgcccagttcctatacccagcagcccagctgcagcacctctggaggctccttcttctgaaccagttccatgatgtggtgactggaagctgcatccagatggtggcagaggaagccatgtgccattatgaagacatccgttcccatggcaatacactgctcagcgctgcagccgcagccctgtgtgctggggagccaggtcctgagggcctcctcatcgtcaacacactgccctggaagcggatcgaagtgatggccctgcccaaaccgggcggggcccacagcctaggtacgagctgaggggaagggttgctactgcagcaggaaggatggaggccagacagatcaggcctgggataccccgagggatctgggtgcccctgactggagagtagtagcacatcttccaccaacccatccccacctgcgcaagcttcctgaaaggtcaggaaggctgcactgatgcccaggcctcacccccagccctggtgacagtgcccagcatgggctatgctcctgttcctccccccacctcactgcagcccctgctgccccagcagcctgtgttcgtagtgcaagaggtgagtcctgcatgccctggggggcaggaactgtgctgggatactttcttacaactgagggtcctgagctcccctgtctggagcaagtggtgaggcggggctggggttggggtgggaagacttttggtgtgggaagcccctacagactcagcctcaaggcctcctcccacaaagactgatggctccgtgactctggacaatggcatcatccgagtgaagctggacccaactggtcgcctgacgtccttggtcctggtggcctctggcagggaggccattgctgagggcgccgtggggaaccagtttgtgctatttgatgatgtccccttgtactgggatgcatgggacgtcatggactaccacctggagacacggaagcctgtgctgggccaggcagggaccctggcagtgggcaccgagggcggcctgcggggcagcgcctggttcttgctacagatcagccccaacagtcggcttagccaggaggttgtgctggacgttggctgcccctatgtccgcttccacaccgaggtacactggcatgaggcccacaagttcctgaaggtggagttccctgctcgcgtgcggagttcccaggccacctatgagatccagtttgggcacctgcagcgacctacccactacaatacctcttgggactgggctcgatttgaggtgtgggcccatcgctggatggatctgtcagaacacggctttgggctggccctgctcaacgactgcaagtatggcgcgtcagtgcgaggcagcatcctcagcctctcgctcttgcgggcgcctaaagccccggacgctactgctgacacggggcgccacgagttcacctatgcactgatgccgcacaagggctctttccaggatgctggcgttatccaagctgcctacagcctaaacttccccctgttggctctgccagcccccagcccagcgcccgccacctcctggagtgcgttttccgtgtcttcacccgcggtcgtattggagaccgtcaagcaggcggagagcagcccccagcgccgctcgctggtcctgaggctgtatgaggcccacggcagccacgtggactgctggctgcacttgtcgctgccggttcaggaggccatcctctgcgatctcttggagcgaccagaccctgctggccacttgacccttcgggacaaccgcctgaagctcaccttttctcccttccaagtgctgtccctgttgctcgtgcttcagcctccgccacactgagtccctggggctggggttttgtttgtagaaggctctggggactcctaatttctgcttccccagcctaaagcagggatcagtcttttcttgtggaataaatccttggatcgggaaccctgctgctcagtccccttagggcccatcctcacgcttggggtgggggtgggaagtctggggtgggatggcttcccaggtatttggtgggtaggggcaagatcctaaggtacctgtgcgtgcagggtctgggttgcagcccccacaggagagactggggac

SEQ ID NO: 291151 - DNA, 3590 bp, Homo sapiens
ggtatcatactccagcaagcgcacatcatcagtgacgtcgatcacgatgcatcgtcatggcggctgcgccggccttgaagcactggcgcaccacgctggagcgggtggagaagttcgtgtcgccgctctactttaccgactgtaacctccgcggcaggctttttggggccagctgccctgtggctgtgctctccagcttcctgacgccggagagacttccctaccaggaggcagtccagcgggacttccgccccgcgcaggtcggcgacagcttcggacccacatggtggacctgctggttccgggtggagctgaccatcccagaggcatgggtgggccaggaagttcacctttgctgggaaagtgatggagaaggtctggtgtggcgtgatggagaacctgtccagggtttaaccaaagagggtgagaagaccagctatgtcctgactgacaggctgggggaaagagacccccgaagcctcactctctatgtggaagtagcctgcaatgggctcctgggggccgggaagggaagcatgattgcagcccctgaccctgagaagatgttccagctgagccgggctgagctagctgtgttccaccgggatgtccacatgctcctggtggatctggagctgctgctgggcatagccaagggcctcgggaaggacaaccagcgcagcttccaggccctgtacacagccaatcagatggtgaacgtgtgtgaccctgcccagcccgagaccttcccagtggcccaggccctggcctccaggttctttggccaacatgggggtgaaagccaacacaccattcatgccacagggcactgccacattgatacagcctggctttggcccttcaaagagactgtgaggaaatgtgcccggagctgggtgaccgccctgcagctcatggagcggaaccctgagttcatctttgcctgctcccaggcgcagcagctggaatgggtgaagagccgctaccctggcctgtactcccgcatccaggagtttgcgtgccgtgggcagtttgtgcctgtggggggcacctgggtggagatggatgggaacctgcccagtggagaggccatggtgaggcagtttttgcagggccagaacttctttctgcaggagtttgggaagatgtgctctgagttctggctgccggacacctttggctactcagcacagctcccccagatcatgcacggctgtggcatcaggcgctttctcacccagaaattgagctggaatttggtgaactccttcccacaccatacatttttctgggagggcctggatggctcccgtgtactggtccacttcccacctggcgactcctatgggatgcagggcagcgtggaggaggtgctgaagaccgtggccaacaaccgggacaaggggcgggccaaccacagtgccttcctctttggctttggggatgggggtggtggccccacccagaccatgctggaccgcctgaagcgcctgagcaatacggatgggctgcccagggtgcagctatcttctccaagacagctcttctcagcactggagagtgactcagagcagctgtgcacgtgggttggggagctcttcttggagctgcacaatggcacatacaccacccatgcccagatcaagaaggggaaccgggaatgtgagcggatcctgcacgacgtggagctgctcagtagcctggccctggcccgcagtgcccagttcctatacccagcagcccagctgcagcacctctggaggctccttcttctgaaccagttccatgatgtggtgactggaagctgcatccagatggtggcagaggaagccatgtgccattatgaagacatccgttcccatggcaatacactgctcagcgctgcagccgcagccctgtgtgctggggagccaggtcctgagggcctcctcatcgtcaacacactgccctggaagcggatcgaagtgatggccctgcccaaaccgggcggggcccacagcctaggtacgagctgaggggaagggttgctactgcagcaggaaggatggaggccagacagatcaggcctgggataccccgagggatctgggtgcccctgactggagagtagtagcacatcttccaccaacccatccccacctgcgcaagcttcctgaaaggtcaggaaggctgcactgatgcccaggcctcacccccagccctggtgacagtgcccagcatgggctatgctcctgttcctccccccacctcactgcagcccctgctgccccagcagcctgtgttcgtagtgcaagaggtgagtcctgcatgccctggggggcaggaactgtgctgggatactttcttacaactgagggtcctgagctcccctgtctggagcaagtggtgaggcggggctggggttggggtgggaagacttttggtgtgggaagcccctacagactcagcctcaaggcctcctcccacaaagactgatggctccgtgactctggacaatggcatcatccgagtgaagctggacccaactggtcgcctgacgtccttggtcctggtggcctctggcagggaggccattgctgagggcgccgtggggaaccagtttgtgctatttgatgatgtccccttgtactgggatgcatgggacgtcatggactaccacctggagacacggaagcctgtgctgggccaggcagggaccctggcagtgggcaccgagggcggcctgcggggcagcgcctggttcttgctacagatcagccccaacagtcggcttagccaggaggttgtgctggacgttggctgcccctatgtccgcttccacaccgaggtacactggcatgaggcccacaagttcctgaaggtggagttccctgctcgcgtgcggagttcccaggccacctatgagatccagtttgggcacctgcagcgacctacccactacaatacctcttgggactgggctcgatttgaggtgtgggcccatcgctggatggatctgtcagaacacggctttgggctggccctgctcaacgactgcaagtatggcgcgtcagtgcgaggcagcatcctcagcctctcgctcttgcgggcgcctaaagccccggacgctactgctgacacggggcgccacgagttcacctatgcactgatgccgcacaaggcccagcccagcgcccgccacctcctggagtgcgttttccgtgtcttcacccgcggtcgtattggagaccgtcaagcaggcggagagcagcccccagcgccgctcgctggtcctgaggctgtatgaggcccacggcagccacgtggactgctggctgcacttgtcgctgccggttcaggaggccatcctctgcgatctcttggagcgaccagaccctgctggccacttgacccttcgggacaaccgcctgaagctcaccttttctcccttccaagtgctgtccctgttgctcgtgcttcagcctccgccacactgagtccctggggctggggttttgtttgtagaaggctctggggactcctaatttctgcttccccagcctaaagcagggatcagtcttttcttgtggaataaatccttggatcgggaa

SEQ ID NO: 291152 - DNA, 3742 bp, Homo sapiens
ggtatcatactccagcaagcgcacatcatcagtgacgtcgatcacgatgcatcgtcatggcggctgcgccggccttgaagcactggcgcaccacgctggagcgggtggagaagttcgtgtcgccgctctactttaccgactgtaacctccgcggcaggctttttggggccagctgccctgtggctgtgctctccagcttcctgacgccggagagacttccctaccaggaggcagtccagcgggacttccgccccgcgcaggtcggcgacagcttcggacccacatggtggacctgctggttccgggtggagctgaccatcccagaggcatgggtgggccaggaagttcacctttgctgggaaagtgatggagaaggtctggtgtggcgtgatggagaacctgtccagggtttaaccaaagagggtgagaagaccagctatgtcctgactgacaggctgggggaaagagacccccgaagcctcactctctatgtggaagtagcctgcaatgggctcctgggggccgggaagggaagcatgattgcagcccctgaccctgagaagatgttccagctgagccgggctgagctagctgtgttccaccgggatgtccacatgctcctggtggatctggagctgctgctgggcatagccaagggcctcgggaaggacaaccagcgcagcttccaggccctgtacacagccaatcagatggtgaacgtgtgtgaccctgcccagcccgagaccttcccagtggcccaggccctggcctccaggttctttggccaacatgggggtgaaagccaacacaccattcatgccacagggcactgccacattgatacagcctggctttggcccttcaaagagactgtgaggaaatgtgcccggagctgggtgaccgccctgcagctcatggagcggaaccctgagttcatctttgcctgctcccaggcgcagcagctggaatgggtgaagagccgctaccctggcctgtactcccgcatccaggagtttgcgtgccgtgggcagtttgtgcctgtggggggcacctgggtggagatggatgggaacctgcccagtggagaggccatggtgaggcagtttttgcagggccagaacttctttctgcaggagtttgggaagatgtgctctgagttctggctgccggacacctttggctactcagcacagctcccccagatcatgcacggctgtggcatcaggcgctttctcacccagaaattgagctggaatttggtgaactccttcccacaccatacatttttctgggagggcctggatggctcccgtgtactggtccacttcccacctggcgactcctatgggatgcagggcagcgtggaggaggtgctgaagaccgtggccaacaaccgggacaaggggcgggccaaccacagtgccttcctctttggctttggggatgggggtggtggccccacccagaccatgctggaccgcctgaagcgcctgagcaatacggatgggctgcccagggtgcagctatcttctccaagacagctcttctcagcactggagagtgactcagagcagctgtgcacgtgggttggggagctcttcttggagctgcacaatggcacatacaccacccatgcccagatcaagaaggggaaccgggaatgtgagcggatcctgcacgacgtggagctgctcagtagcctggccctggcccgcagtgcccagttcctatacccagcagcccagctgcagcacctctggaggctccttcttctgaaccagttccatgatgtggtgactggaagctgcatccagatggtggcagaggaagccatgtgccattatgaagacatccgttcccatggcaatacactgctcagcgctgcagccgcagccctgtgtgctggggagccaggtcctgagggcctcctcatcgtcaacacactgccctggaagcggatcgaagtgatggccctgcccaaaccgggcggggcccacagcctaggtacgagctgaggggaagggttgctactgcagcaggaaggatggaggccagacagatcaggcctgggataccccgagggatctgggtgcccctgactggagagtagtagcacatcttccaccaacccatccccacctgcgcaagcttcctgaaaggtcaggaaggctgcactgatgcccaggcctcacccccagccctggtgacagtgcccagcatgggctatgctcctgttcctccccccacctcactgcagcccctgctgccccagcagcctgtgttcgtagtgcaagaggtgagtcctgcatgccctggggggcaggaactgtgctgggatactttcttacaactgagggtcctgagctcccctgtctggagcaagtggtgaggcggggctggggttggggtgggaagacttttggtgtgggaagcccctacagactcagcctcaaggcctcctcccacaaagactgatggctccgtgactctggacaatggcatcatccgagtgaagctggacccaactggtcgcctgacgtccttggtcctggtggcctctggcagggaggccattgctgagggcgccgtggggaaccagtttgtgctatttgatgatgtccccttgtactgggatgcatgggacgtcatggactaccacctggagacacggaagcctgtgctgggccaggcagggaccctggcagtgggcaccgagggcggcctgcggggcagcgcctggttcttgctacagatcagccccaacagtcggcttagccaggaggttgtgctggacgttggctgcccctatgtccgcttccacaccgaggtacactggcatgaggcccacaagttcctgaaggtggagttccctgctcgcgtgcggagttcccaggccacctatgagatccagtttgggcacctgcagcgacctacccactacaatacctcttgggactgggctcgatttgaggtgtgggcccatcgctggatggatctgtcagaacacggctttgggctggccctgctcaacgactgcaagtatggcgcgtcagtgcgaggcagcatcctcagcctctcgctcttgcgggcgcctaaagccccggacgctactgctgacacggggcgccacgagttcacctatgcactgatgccgcacaagggctctttccaggatgctggcgttatccaagctgcctacagcctaaacttccccctgttggctctgccagcccccagcccagcgcccgccacctcctggagtgcgttttccgtgtcttcacccgcggtcgtattggagaccgtcaagcaggcaaggggtgggacgtgctggggacggggttccgaactgggcctgccctcggcccctcccaccagacgtgttcctctgcaggcggagagcagcccccagcgccgctcgctggtcctgaggctgtatgaggcccacggcagccacgtggactgctggctgcacttgtcgctgccggttcaggaggccatcctctgcgatctcttggagcgaccagaccctgctggccacttgacccttcgggacaaccgcctgaagctcaccttttctcccttccaagtgctgtccctgttgctcgtgcttcagcctccgccacactgagtccctggggctggggttttgtttgtagaaggctctggggactcctaatttctgcttccccagcctaaagcagggatcagtcttttcttgtggaataaatccttggatcgggaa

SEQ ID NO: 291153 - DNA, 3172 bp, Homo sapiens
ggtatcatactccagcaagcgcacatcatcagtgacgtcgatcacgatgcatcgtcatggcggctgcgccggccttgaagcactggcgcaccacgctggagcgggtggagaagttcgtgtcgccgctctactttaccgactgtaacctccgcggcaggctttttggggccagctgccctgtggctgtgctctccagcttcctgacgccggagagacttccctaccaggaggcagtccagcgggacttccgccccgcgcaggtcggcgacagcttcggacccacatggtggacctgctggttccgggtggagctgaccatcccagaggcatgggtgggccaggaagttcacctttgctgggaaagtgatggagaaggtctggtgtggcgtgatggagaacctgtccagggtttaaccaaagagggtgagaagaccagctatgtcctgactgacaggctgggggaaagagacccccgaagcctcactctctatgtggaagtagcctgcaatgggctcctgggggccgggaagggaagcatgattgcagcccctgaccctgagaagatgttccagctgagccgggctgagctagctgtgttccaccgggatgtccacatgctcctggtggatctggagctgctgctgggcatagccaagggcctcgggaaggacaaccagcgcagcttccaggccctgtacacagccaatcagatggtgaacgtgtgtgaccctgcccagcccgagaccttcccagtggcccaggccctggcctccaggttctttggccaacatgggggtgaaagccaacacaccattcatgccacagggcactgccacattgatacagcctggctttggcccttcaaagagactgtgaggaaatgtgcccggagctgggtgaccgccctgcagctcatggagcggaaccctgagttcatctttgcctgctcccaggcgcagcagctggaatgggtgaagagccgctaccctggcctgtactcccgcatccaggagtttgcgtgccgtgggcagtttgtgcctgtggggggcacctgggtggagatggatgggaacctgcccagtggagaggccatggtgaggcagtttttgcagggccagaacttctttctgcaggagtttgggaagatgtgctctgagttctggctgccggacacctttggctactcagcacagctcccccagatcatgcacggctgtggcatcaggcgctttctcacccagaaattgagctggaatttggtgaactccttcccacaccatacatttttctgggagggcctggatggctcccgtgtactggtccacttcccacctggcgactcctatgggatgcagggcagcgtggaggaggtgctgaagaccgtggccaacaaccgggacaaggggcgggccaaccacagtgccttcctctttggctttggggatgggggtggtggccccacccagaccatgctggaccgcctgaagcgcctgagcaatacggatgggctgcccagggtgcagctatcttctccaagacagctcttctcagcactggagagtgactcagagcagctgtgcacgtgggttggggagctcttcttggagctgcacaatggcacatacaccacccatgcccagatcaagaaggggaaccgggaatgtgagcggatcctgcacgacgtggagctgctcagtagcctggccctggcccgcagtgcccagttcctatacccagcagcccagctgcagcacctctggaggctccttcttctgaaccagttccatgatgtggtgactggaagctgcatccagatggtggcagaggaagccatgtgccattatgaagacatccgttcccatggcaatacactgctcagcgctgcagccgcagccctgtgtgctggggagccaggtcctgagggcctcctcatcgtcaacacactgccctggaagcggatcgaagtgatggccctgcccaaaccgggcggggcccacagcctagccctggtgacagtgcccagcatgggctatgctcctgttcctccccccacctcactgcagcccctgctgccccagcagcctgtgttcgtagtgcaagagactgatggctccgtgactctggacaatggcatcatccgagtgaagctggacccaactggtcgcctgacgtccttggtcctggtggcctctggcagggaggccattgctgagggcgccgtggggaaccagtttgtgctatttgatgatgtccccttgtactgggatgcatgggacgtcatggactaccacctggagacacggaagcctgtgctgggccaggcagggaccctggcagtgggcaccgagggcggcctgcggggcagcgcctggttcttgctacagatcagccccaacagtcggcttagccaggaggttgtgctggacgttggctgcccctatgtccgcttccacaccgaggtagtcggggggtagggggtggctgttttccccaagtgtgcttggtaaggaggggccagccccaggccttggtgtgtctcttccttccctgactcccaccctccttcccactcccaggtacactggcatgaggcccacaagttcctgaaggtggagttccctgctcgcgtgcggagttcccaggccacctatgagatccagtttgggcacctgcagcgacctacccactacaatacctcttgggactgggctcgatttgaggtctgacatggcagggtgggagtggccttggactcctccctggctggggagactgcttgtgtggaacaggctggggaggaagaggataatcaacatttgctgcttcctaacgtgtgtgccaggcattgcactaaatgctttacattggcaaggcacagtggctcacgcctgtaattccagcactttgggaggccgaggtgggtggatcacctgaggtcaggagttcaagaccagcctggccaacatggtgaaacgccatctctactaaaaatacaaaaattgggccgggcgtggtgactcacgcctgtaatcccagcagtttgggaggctgaggtgggtggatcacgaggtcaagagatcgagaccatcctggctaacacgatgaaaccctgtctctactaaaaagctgaggcaggagaatggcgtgaatctgggaggcagagcttgcagtg

SEQ ID NO: 291154 - DNA, 2556 bp, Homo sapiens
ggtatcatactccagcaagcgcacatcatcagtgacgtcgatcacgatgcatcgtcatggcggctgcgccggccttgaagcactggcgcaccacgctggagcgggtggagaagttcgtgtcgccgctctactttaccgactgtaacctccgcggcaggctttttggggccagctgccctgtggctgtgctctccagcttcctgacgccggagagacttccctaccaggaggcagtccagcgggacttccgccccgcgcaggtcggcgacagcttcggacccacatggtggacctgctggttccgggtggagctgaccatcccagaggcatgggtgggccaggaagttcacctttgctgggaaagtgatggagaaggtctggtgtggcgtgatggagaacctgtccagggtttaaccaaagagggtgagaagaccagctatgtcctgactgacaggctgggggaaagagacccccgaagcctcactctctatgtggaagtagcctgcaatgggctcctgggggccgggaagggaagcatgattgcagcccctgaccctgagaagatgttccagctgagccgggctgagctagctgtgttccaccgggatgtccacatgctcctggtggatctggagctgctgctgggcatagccaagggcctcgggaaggacaaccagcgcagcttccaggccctgtacacagccaatcagatggtgaacgtgtgtgaccctgcccagcccgagaccttcccagtggcccaggccctggcctccaggttctttggccaacatgggggtgaaagccaacacaccattcatgccacagggcactgccacattgatacagcctggctttggcccttcaaagagactgtgaggaaatgtgcccggagctgggtgaccgccctgcagctcatggagcggaaccctgagttcatctttgcctgctcccaggcgcagcagctggaatgggtgaagagccgctaccctggcctgtactcccgcatccaggagtttgcgtgccgtgggcagtttgtgcctgtggggggcacctgggtggagatggatgggaacctgcccagtggagaggccatggtgaggcagtttttgcagggccagaacttctttctgcaggagtttgggaagatgtgctctgagttctggctgccggacacctttggctactcagcacagctcccccagatcatgcacggctgtggcatcaggcgctttctcacccagaaattgagctggaatttggtgaactccttcccacaccatacatttttctgggagggcctggatggctcccgtgtactggtccacttcccacctggcgactcctatgggatgcagggcagcgtggaggaggtgctgaagaccgtggccaacaaccgggacaaggggcgggccaaccacagtgccttcctctttggctttggggatgggggtggtggccccacccagaccatgctggaccgcctgaagcgcctgagcaatacggatgggctgcccagggtgcagctatcttctccaagacagctcttctcagcactggagagtgactcagagcagctgtgcacgtgggttggggagctcttcttggagctgcacaatggcacatacaccacccatgcccagatcaagaaggggaaccgggaatgtgagcggatcctgcacgacgtggagctgctcagtagcctggccctggcccgcagtgcccagttcctatacccagcagcccagctgcagcacctctggaggctccttcttctgaaccagttccatgatgtggtgactggaagctgcatccagatggtggcagaggaagccatgtgccattatgaagacatccgttcccatggcaatacactgctcagcgctgcagccgcagccctgtgtgctggggagccaggtcctgagggcctcctcatcgtcaacacactgccctggaagcggatcgaagtgatggccctgcccaaaccgggcggggcccacagcctagccctggtgacagtgcccagcatgggctatgctcctgttcctccccccacctcactgcagcccctgctgccccagcagcctgtgttcgtagtgcaagagactgatggctccgtgactctggacaatggcatcatccgagtgaagctggacccaactggtcgcctgacgtccttggtcctggtggcctctggcagggaggccattgctgagggcgccgtggggaaccagtttgtgctatttgatgatgtccccttgtactgggatgcatgggacgtcatggactaccacctggagacacggaagcctgtgctgggccaggcagggaccctggcagtgggcaccgagggcggcctgcggggcagcgcctggttcttgctacagatcagccccaacagtcggcttagccaggaggttgtgctggacgttggctgcccctatgtccgcttccacaccgaggtacactggcatgaggcccacaagttcctaatttctgcttccccagcctaaagcagggatcagtcttttcttgtggaataaatccttggatcgggaa

SEQ ID NO: 291155 - DNA, 1833 bp, Homo sapiens
ggtatcatactccagcaagcgcacatcatcagtgacgtcgatcacgatgcatcgtcatggcggctgcgccggccttgaagcactggcgcaccacgctggagcgggtggagaagttcgtgtcgccgctctactttaccgactgtaacctccgcggcaggctttttggggccagctgccctgtggctgtgctctccagcttcctgacgccggagagacttccctaccaggaggcagtccagcgggacttccgccccgcgcaggtcggcgacagcttcggacccacatggtggacctgctggttccgggtggagctgaccatcccagaggcatgggtgggccaggaagttcacctttgctgggaaagtgatggagaaggtctggtgtggcgtgatggagaacctgtccagggtttaaccaaagagggtgagaagaccagctatgtcctgactgacaggctgggggaaagagacccccgaagcctcactctctatgtggaagtagcctgcaatgggctcctgggggccgggaagggaagcatgattgcagcccctgaccctgagaagatgttccagctgagccgggctgagctagctgtgttccaccgggatgtccacatgctcctggtggatctggagctgctgctgggcatagccaagggcctcgggaaggacaaccagcgcagcttccaggccctgtacacagccaatcagatggtgaacgtgtgtgaccctgcccagcccgagaccttcccagtggcccaggccctggcctccaggttctttggccaacatgggggtgaaagccaacacaccattcatgccacagggcactgccacattgatacagcctggctttggcccttcaaagagactgtgaggaaatgtgcccggagctgggtgaccgccctgcagctcatggagcggaaccctgagttcatctttgcctgctcccaggcgcagcagctggaatgggtgaagagccgctaccctggcctgtactcccgcatccaggagtttgcgtgccgtgggcagtttgtgcctgtggggggcacctgggtggagatggatgggaacctgcccagtggagaggccatggtgaggcagtttttgcagggccagaacttctttctgcaggagtttgggaagatgtgctctgagttctggctgccggacacctttggctactcagcacagctcccccagatcatgcacggctgtggcatcaggcgctttctcacccagaaattgagctggaatttggtgaactccttcccacaccatacatttttctgggagggcctggatggctcccgtgtactggtccacttcccacctggcgactcctatgggatgcagggcagcgtggaggaggtgctgaagaccgtggccaacaaccgggacaaggggcgggccaaccacagtgccttcctctttggctttggggatgggggtggtggccccacccagaccatgctggaccgcctgaagcgcctgagcaatacggatgggctgcccagggtgcagctatcttctccaagacagctcttctcagcactggagagtgactcagagcagctgtgcacgtgggttggggagctcttcttggagctgcacaatggcacatacaccacccatgcccagatcaagaaggggaaccgggaatgtgagcggatctcagcacagctcccccagatcatgcacggctgtggcatcaggcgctttctcacccagaaattgagctggaatttggtgaactccttcccacaccatacatttttctgggagggcctggatggctcccgtgtactggtccacttcccacctggcgactcct

SEQ ID NO: 291156 - DNA, 199 bp, Homo sapiens
atcaagaaggggaaccgggaatgtgagcggatcctgcacgacgtggagctgctcagtagcctggccctggcccgcagtgcccagttcctatacccagcagcccagctgcagcacctctggaggtcagcccagttctgtccctgccatccacctgactgctcactgcagttacctctgtgcctgcccctcccagccttcc

SEQ ID NO: 291157 - DNA, 3293 bp, Homo sapiens
ggtatcatactccagcaagcgcacatcatcagtgacgtcgatcacgatgcatcgtcatggcggctgcgccggccttgaagcactggcgcaccacgctggagcgggtggagaagttcgtgtcgccgctctactttaccgactgtaacctccgcggcaggctttttggggccagctgccctgtggctgtgctctccagcttcctgacgccggagagacttccctaccaggaggcagtccagcgggacttccgccccgcgcaggtcggcgacagcttcggacccacatggtggacctgctggttccgggtggagctgaccatcccagaggcatgggtgggccaggaagttcacctttgctgggaaagtgatggagaaggtctggtgtggcgtgatggagaacctgtccagggtttaaccaaagagggtgagaagaccagctatgtcctgactgacaggctgggggaaagagacccccgaagcctcactctctatgtggaagtagcctgcaatgggctcctgggggccgggaagggaagcatgattgcagcccctgaccctgagaagatgttccagctgagccgggctgagctagctgtgttccaccgggatgtccacatgctcctggtggatctggagctgctgctgggcatagccaagggcctcgggaaggacaaccagcgcagcttccaggccctgtacacagccaatcagatggtgaacgtgtgtgaccctgcccagcccgagaccttcccagtggcccaggccctggcctccaggttctttggccaacatgggggtgaaagccaacacaccattcatgccacagggcactgccacattgatacagcctggctttggcccttcaaagagactgtgaggaaatgtgcccggagctgggtgaccgccctgcagctcatggagcggaaccctgagttcatctttgcctgctcccaggcgcagcagctggaatgggtgaagagccgctaccctggcctgtactcccgcatccaggagtttgcgtgccgtgggcagtttgtgcctgtggggggcacctgggtggagatggatgggaacctgcccagtggagaggccatggtgaggcagtttttgcagggccagaacttctttctgcaggagtttgggaagatgtgctctgagttctggctgccggacacctttggctactcagcacagctcccccagatcatgcacggctgtggcatcaggcgctttctcacccagaaattgagctggaatttggtgaactccttcccacaccatacatttttctgggagggcctggatggctcccgtgtactggtccacttcccacctggcgactcctatgggatgcagggcagcgtggaggaggtgctgaagaccgtggccaacaaccgggacaaggggcgggccaaccacagtgccttcctctttggctttggggatgggggtggtggccccacccagaccatgctggaccgcctgaagcgcctgagcaatacggatgggctgcccagggtgcagctatcttctccaagacagctcttctcagcactggagagtgactcagagcagctgtgcacgtgggttggggagctcttcttggagctgcacaatggcacatacaccacccatgcccagatcaagaaggggaaccgggaatgtgagcggatcctgcacgacgtggagctgctcagtagcctggccctggcccgcagtgcccagttcctatacccagcagcccagctgcagcacctctggaggctccttcttctgaaccagttccatgatgtggtgactggaagctgcatccagatggtggcagaggaagccatgtgccattatgaagacatccgttcccatggcaatacactgctcagcgctgcagccgcagccctgtgtgctggggagccaggtcctgagggcctcctcatcgtcaacacactgccctggaagcggatcgaagtgatggccctgcccaaaccgggcggggcccacagcctagccctggtgacagtgcccagcatgggctatgctcctgttcctccccccacctcactgcagcccctgctgccccagcagcctgtgttcgtagtgcaagagactgatggctccgtgactctggacaatggcatcatccgagtgaagctggacccaactggtcgcctgacgtccttggtcctggtggcctctggcagggaggccattgctgagggcgccgtggggaaccagtttgtgctatttgatgatgtccccttgtactgggatgcatgggacgtcatggactaccacctggagacacggaagcctgtgctgggccaggcagggaccctggcagtgggcaccgagggcggcctgcggggcagcgcctggttcttgctacagatcagccccaacagtcggcttagccaggaggttgtgctggacgttggctgcccctatgtccgcttccacaccgaggtacactggcatgaggcccacaagttcctgaaggtggagttccctgctcgcgtgcggagttcccaggccacctatgagatccagtttgggcacctgcagcgacctacccactacaatacctcttgggactgggctcgatttgaggtgtgggcccatcgctggatggatctgtcagaacacggctttgggctggccctgctcaacgactgcaagtatggcgcgtcagtgcgaggcagcatcctcagcctctcgctcttgcgggcgcctaaagccccggacgctactgctgacacggggcgccacgagttcacctatgcactgatgccgcacaagggctctttccaggatgctggcgttatccaagctgcctacagcctaaacttccccctgttggctctgccagcccccagcccagcgcccgccacctcctggagtgcgttttccgtgtcttcacccgcggtcgtattggagaccgtcaagcaggcggagagcagcccccagcgccgctcgctggtcctgaggctgtatgaggcccacggcagccacgtggactgctggctgcacttgtcgctgccggttcaggaggccatcctctgcgatctcttggagcgaccagaccctgctggccacttgacccttcgggacaaccgcctgaagctcaccttttctcccttccaagtgctgtccctgttgctcgtgcttcagcctccgccacactgagtccctggggctggggttttgtttgtagaaggctctggggactcctaatttctgcttccccagcctaaagcagggatcagtcttttcttgtggaataaatccttggatcgggaa

SEQ ID NO: 291158 - DNA, 653 bp, Homo sapiens
ttgtgccgtattgcctgtgtaaattgtatccgcgaaacagaaggctcgaaccgcgagcagggcggcaaccgccagcagcgttaagccgcaggtcgtgggggcggctcgccaggtgcgggtccgccccttttcttttgccctgacggcgccctacatgacccgacgcttcgaagccgaagacctgctgctggaacagcgcatcaccgacatccatgtcatccccgaccaccccatcgcgctgtgtgccgtggcatgggcggacacccacagccgccgcaccgcatcgtcgctgtggaccttctcgctggcctacagcacatgccggcatgtgctgtaggcccagcccagcgcccgccacctcctggagtgcgttttccgtgtcttcacccgcggtcgtattggagaccgtcaagcaggcggagagcagcccccagcgccgctcgctggtcctgaggctgtatgaggcccacggcagccacgtggactgctggctgcacttgtcgctgccggttcaggaggccatcctctgcgatctcttggagcgaccagacccgctggcctacagcacatgcctggcgatgtcgcgtgccatgtagagaatggaaggaagcatcgggcccatctcccaactgggctcagctggaaaccaggag

SEQ ID NO: 291159 - DNA, 3768 bp, Homo sapiens
ggtatcatactccagcaagcgcacatcatcagtgacgtcgatcacgatgcatcgtcatggcggctgcgccggccttgaagcactggcgcaccacgctggagcgggtggagaagttcgtgtcgccgctctactttaccgactgtaacctccgcggcaggctttttggggccagctgccctgtggctgtgctctccagcttcctgacgccggagagacttccctaccaggaggcagtccagcgggacttccgccccgcgcaggtcggcgacagcttcggacccacatggtggacctgctggttccgggtggagctgaccatcccagaggcatgggtgggccaggaagttcacctttgctgggaaagtgatggagaaggtctggtgtggcgtgatggagaacctgtccagggtttaaccaaagagggtgagaagaccagctatgtcctgactgacaggctgggggaaagagacccccgaagcctcactctctatgtggaagtagcctgcaatgggctcctgggggccgggaagggaagcatgattgcagcccctgaccctgagaagatgttccagctgagccgggctgagctagctgtgttccaccgggatgtccacatgctcctggtggatctggagctgctgctgggcatagccaagggcctcgggaaggacaaccagcgcagcttccaggccctgtacacagccaatcagatggtgaacgtgtgtgaccctgcccagcccgagaccttcccagtggcccaggccctggcctccaggttctttggccaacatgggggtgaaagccaacacaccattcatgccacagggcactgccacattgatacagcctggctttggcccttcaaagagactgtgaggaaatgtgcccggagctgggtgaccgccctgcagctcatggagcggaaccctgagttcatctttgcctgctcccaggcgcagcagctggaatgggtgaagagccgctaccctggcctgtactcccgcatccaggagtttgcgtgccgtgggcagtttgtgcctgtggggggcacctgggtggagatggatgggaacctgcccagtggagaggccatggtgaggcagtttttgcagggccagaacttctttctgcaggagtttgggaagatgtgctctgagttctggctgccggacacctttggctactcagcacagctcccccagatcatgcacggctgtggcatcaggcgctttctcacccagaaattgagctggaatttggtgaactccttcccacaccatacatttttctgggagggcctggatggctcccgtgtactggtccacttcccacctggcgactcctatgggatgcagggcagcgtggaggaggtgctgaagaccgtggccaacaaccgggacaaggggcgggccaaccacagtgccttcctctttggctttggggatgggggtggtggccccacccagaccatgctggaccgcctgaagcgcctgagcaatacggatgggctgcccagggtgcagctatcttctccaagacagctcttctcagcactggagagtgactcagagcagctgtgcacgtgggttggggagctcttcttggagctgcacaatggcacatacaccacccatgcccagatcaagaaggggaaccgggaatgtgagcggatcctgcacgacgtggagctgctcagtagcctggccctggcccgcagtgcccagttcctatacccagcagcccagctgcagcacctctggaggctccttcttctgaaccagttccatgatgtggtgactggaagctgcatccagatggtggcagaggaagccatgtgccattatgaagacatccgttcccatggcaatacactgctcagcgctgcagccgcagccctgtgtgctggggagccaggtcctgagggcctcctcatcgtcaacacactgccctggaagcggatcgaagtgatggccctgcccaaaccgggcggggcccacagcctaggtacgagctgaggggaagggttgctactgcagcaggaaggatggaggccagacagatcaggcctgggataccccgagggatctgggtgcccctgactggagagtagtagcacatcttccaccaacccatccccacctgcgcaagcttcctgaaaggtcaggaaggctgcactgatgcccaggcctcacccccagccctggtgacagtgcccagcatgggctatgctcctgttcctccccccacctcactgcagcccctgctgccccagcagcctgtgttcgtagtgcaagaggtgagtcctgcatgccctggggggcaggaactgtgctgggatactttcttacaactgagggtcctgagctcccctgtctggagcaagtggtgaggcggggctggggttggggtgggaagacttttggtgtgggaagcccctacagactcagcctcaaggcctcctcccacaaagactgatggctccgtgactctggacaatggcatcatccgagtgaagctggacccaactggtcgcctgacgtccttggtcctggtggcctctggcagggaggccattgctgagggcgccgtggggaaccagtttgtgctatttgatgatgtccccttgtactgggatgcatgggacgtcatggactaccacctggagacacggaagcctgtgctgggccaggcagggaccctggcagtgggcaccgagggcggcctgcggggcagcgcctggttcttgctacagatcagccccaacagtcggcttagccaggaggttgtgctggacgttggctgcccctatgtccgcttccacaccgaggtacactggcatgaggcccacaagttcctgaaggtggagttccctgctcgcgtgcggagttcccaggccacctatgagatccagtttgggcacctgcagcgacctacccactacaatacctcttgggactgggctcgatttgaggtgtgggcccatcgctggatggatctgtcagaacacggctttgggctggccctgctcaacgactgcaagtatggcgcgtcagtgcgaggcagcatcctcagcctctcgctgtaagtggggtacccaccaggcctgggagctggcatggagaaatgggtcttcccgaccacaactccaacagcttcagcgtggcccctacgcgccctcctcaccccagcttgcgggcgcctaaagccccggacgctactgctgacacggggcgccacgagttcacctatgcactgatgccgcacaagggctctttccaggatgctggcgttatccaagctgcctacagcctaaacttccccctgttggctctgccagcccccagcccagcgcccgccacctcctggagtgcgttttccgtgtcttcacccgcggtcgtattggagaccgtcaagcaggcggagagcagcccccagcgccgctcgctggtcctgaggctgtatgaggcccacggcagccacgtggactgctggctgcacttgtcgctgccggttcaggaggccatcctctgcgatctcttggagcgaccagaccctgctggccacttgacccttcgggacaaccgcctgaagctcaccttttctcccttccaagtgctgtccctgttgctcgtgcttcagcctccgccacactgagtccctggggctggggttttgtttgtagaaggctctggggactcctaatttctgcttccccagcctaaagcagggatcagtcttttcttgtggaataaatccttggatcgggaa

SEQ ID NO: 291160 - DNA, 3416 bp, Homo sapiens
ggtatcatactccagcaagcgcacatcatcagtgacgtcgatcacgatgcatcgtcatggcggctgcgccggccttgaagcactggcgcaccacgctggagcgggtggagaagttcgtgtcgccgctctactttaccgactgtaacctccgcggcaggctttttggggccagctgccctgtggctgtgctctccagcttcctgacgccggagagacttccctaccaggaggcagtccagcgggacttccgccccgcgcaggtcggcgacagcttcggacccacatggtggacctgctggttccgggtggagctgaccatcccagaggcatgggtgggccaggaagttcacctttgctgggaaagtgatggagaaggtctggtgtggcgtgatggagaacctgtccagggtttaaccaaagagggtgagaagaccagctatgtcctgactgacaggctgggggaaagagacccccgaagcctcactctctatgtggaagtagcctgcaatgggctcctgggggccgggaagggaagcatgattgcagcccctgaccctgagaagatgttccagctgagccgggctgagctagctgtgttccaccgggatgtccacatgctcctggtggatctggagctgctgctgggcatagccaagggcctcgggaaggacaaccagcgcagcttccaggccctgtacacagccaatcagatggtgaacgtgtgtgaccctgcccagcccgagaccttcccagtggcccaggccctggcctccaggttctttggccaacatgggggtgaaagccaacacaccattcatgccacagggcactgccacattgatacagcctggctttggcccttcaaagagactgtgaggaaatgtgcccggagctgggtgaccgccctgcagctcatggagcggaaccctgagttcatctttgcctgctcccaggcgcagcagctggaatgggtgaagagccgctaccctggcctgtactcccgcatccaggagtttgcgtgccgtgggcagtttgtgcctgtggggggcacctgggtggagatggatgggaacctgcccagtggagaggccatggtgaggcagtttttgcagggccagaacttctttctgcaggagtttgggaagatgtgctctgagttctggctgccggacacctttggctactcagcacagctcccccagatcatgcacggctgtggcatcaggcgctttctcacccagaaattgagctggaatttggtgaactccttcccacaccatacatttttctgggagggcctggatggctcccgtgtactggtccacttcccacctggcgactcctatgggatgcagggcagcgtggaggaggtgctgaagaccgtggccaacaaccgggacaaggggcgggccaaccacagtgccttcctctttggctttggggatgggggtggtggccccacccagaccatgctggaccgcctgaagcgcctgagcaatacggatgggctgcccagggtgcagctatcttctccaagacagctcttctcagcactggagagtgactcagagcagctgtgcacgtgggttggggagctcttcttggagctgcacaatggcacatacaccacccatgcccagatcaagaaggggaaccgggaatgtgagcggatcctgcacgacgtggagctgctcagtagcctggccctggcccgcagtgcccagttcctatacccagcagcccagctgcagcacctctggaggctccttcttctgaaccagttccatgatgtggtgactggaagctgcatccagatggtggcagaggaagccatgtgccattatgaagacatccgttcccatggcaatacactgctcagcgctgcagccgcagccctgtgtgctggggagccaggtcctgagggcctcctcatcgtcaacacactgccctggaagcggatcgaagtgatggccctgcccaaaccgggcggggcccacagcctagccctggtgacagtgcccagcatgggctatgctcctgttcctccccccacctcactgcagcccctgctgccccagcagcctgtgttcgtagtgcaagagcccctacagactcagcctcaaggcctcctcccacaaagactgatggctccgtgactctggacaatggcatcatccgagtgaagctggacccaactggtcgcctgacgtccttggtcctggtggcctctggcagggaggccattgctgagggcgccgtggggaaccagtttgtgctatttgatgatgtccccttgtactgggatgcatgggacgtcatggactaccacctggagacacggtataggctgggcagcatgtggggatggtggaggtggtgggaacacaggctgctctggatcagtatgtccacccctgtcccataggaagcctgtgctgggccaggcagggaccctggcagtgggcaccgagggcggcctgcggggcagcgcctggttcttgctacagatcagccccaacagtcggcttagccaggaggttgtgctggacgttggctgcccctatgtccgcttccacaccgaggtacactggcatgaggcccacaagttcctgaaggtggagttccctgctcgcgtgcggagttcccaggccacctatgagatccagtttgggcacctgcagcgacctacccactacaatacctcttgggactgggctcgatttgaggtgtgggcccatcgctggatggatctgtcagaacacggctttgggctggccctgctcaacgactgcaagtatggcgcgtcagtgcgaggcagcatcctcagcctctcgctcttgcgggcgcctaaagccccggacgctactgctgacacggggcgccacgagttcacctatgcactgatgccgcacaagggctctttccaggatgctggcgttatccaagctgcctacagcctaaacttccccctgttggctctgccagcccccagcccagcgcccgccacctcctggagtgcgttttccgtgtcttcacccgcggtcgtattggagaccgtcaagcaggcggagagcagcccccagcgccgctcgctggtcctgaggctgtatgaggcccacggcagccacgtggactgctggctgcacttgtcgctgccggttcaggaggccatcctctgcgatctcttggagcgaccagaccctgctggccacttgacccttcgggacaaccgcctgaagctcaccttttctcccttccaagtgctgtccctgttgctcgtgcttcagcctccgccacactgagtccctggggctggggttttgtttgtagaaggctctggggactcctaatttctgcttccccagcctaaagcagggatcagtcttttcttgtggaataaatccttggatcgggaa

SEQ ID NO: 291161 - DNA, 4084 bp, Homo sapiens
ggtatcatactccagcaagcgcacatcatcagtgacgtcgatcacgatgcatcgtcatggcggctgcgccggccttgaagcactggcgcaccacgctggagcgggtggagaagttcgtgtcgccgctctactttaccgactgtaacctccgcggcaggctttttggggccagctgccctgtggctgtgctctccagcttcctgacgccggagagacttccctaccaggaggcagtccagcgggacttccgccccgcgcaggtcggcgacagcttcggacccacatggtggacctgctggttccgggtggagctgaccatcccagaggcatgggtgggccaggaagttcacctttgctgggaaagtgatggagaaggtctggtgtggcgtgatggagaacctgtccagggtttaaccaaagagggtgagaagaccagctatgtcctgactgacaggctgggggaaagagacccccgaagcctcactctctatgtggaagtagcctgcaatgggctcctgggggccgggaagggaagcatgattgcagcccctgaccctgagaagatgttccagctgagccgggctgagctagctgtgttccaccgggatgtccacatgctcctggtggatctggagctgctgctgggcatagccaagggcctcgggaaggacaaccagcgcagcttccaggccctgtacacagccaatcagatggtgaacgtgtgtgaccctgcccagcccgagaccttcccagtggcccaggccctggcctccaggttctttggccaacatgggggtgaaagccaacacaccattcatgccacagggcactgccacattgatacagcctggctttggcccttcaaagagactgtgaggaaatgtgcccggagctgggtgaccgccctgcagctcatggagcggaaccctgagttcatctttgcctgctcccaggcgcagcagctggaatgggtgaagagccgctaccctggcctgtactcccgcatccaggagtttgcgtgccgtgggcagtttgtgcctgtggggggcacctgggtggagatggatgggaacctgcccagtggagaggccatggtgaggcagtttttgcagggccagaacttctttctgcaggagtttgggaagatgtgctctgagttctggctgccggacacctttggctactcagcacagctcccccagatcatgcacggctgtggcatcaggcgctttctcacccagaaattgagctggaatttggtgaactccttcccacaccatacatttttctgggagggcctggatggctcccgtgtactggtccacttcccacctggcgactcctatgggatgcagggcagcgtggaggaggtgctgaagaccgtggccaacaaccgggacaaggggcgggccaaccacagtgccttcctctttggctttggggatgggggtggtggccccacccagaccatgctggaccgcctgaagcgcctgagcaatacggatgggctgcccagggtgcagctatcttctccaagacagctcttctcagcactggagagtgactcagagcagctgtgcacgtgggttggggagctcttcttggagctgcacaatggcacatacaccacccatgcccagatcaagaaggggaaccgggaatgtgagcggatcctgcacgacgtggagctgctcagtagcctggccctggcccgcagtgcccagttcctatacccagcagcccagctgcagcacctctggaggctccttcttctgaaccagttccatgatgtggtgactggaagctgcatccagatggtggcagaggaagccatgtgccattatgaagacatccgttcccatggcaatacactgctcagcgctgcagccgcagccctgtgtgctggggagccaggtcctgagggcctcctcatcgtcaacacactgccctggaagcggatcgaagtgatggccctgcccaaaccgggcggggcccacagcctaggtacgagctgaggggaagggttgctactgcagcaggaaggatggaggccagacagatcaggcctgggataccccgagggatctgggtgcccctgactggagagtagtagcacatcttccaccaacccatccccacctgcgcaagcttcctgaaaggtcaggaaggctgcactgatgcccaggcctcacccccagccctggtgacagtgcccagcatgggctatgctcctgttcctccccccacctcactgcagcccctgctgccccagcagcctgtgttcgtagtgcaagaggtgagtcctgcatgccctggggggcaggaactgtgctgggatactttcttacaactgagggtcctgagctcccctgtctggagcaagtggtgaggcggggctggggttggggtgggaagacttttggtgtgggaagcccctacagactcagcctcaaggcctcctcccacaaagactgatggctccgtgactctggacaatggcatcatccgagtgaagctggacccaactggtcgcctgacgtccttggtcctggtggcctctggcagggaggccattgctgagggcgccgtggggaaccagtttgtgctatttgatgatgtccccttgtactgggatgcatgggacgtcatggactaccacctggagacacggaagcctgtgctgggccaggcagggaccctggcagtgggcaccgagggcggcctgcggggcagcgcctggttcttgctacagatcagccccaacagtcggcttagccaggaggttgtgctggacgttggctgcccctatgtccgcttccacaccgaggtacactggcatgaggcccacaagttcctgaaggtggagttccctgctcgcgtgcggagttcccaggccacctatgagatccagtttgggcacctgcagcgacctacccactacaatacctcttgggactgggctcgatttgaggtgtgggcccatcgctggatggatctgtcagaacacggctttgggctggccctgctcaacgactgcaagtatggcgcgtcagtgcgaggcagcatcctcagcctctcgctcttgcgggcgcctaaagccccggacgctactgctgacacggggcgccacgagttcacctatgcactgatgccgcacaaggcccagcccagcgcccgccacctcctggagtgcgttttccgtgtcttcacccgcggtcgtattggagaccgtcaagcaggcggagagcagcccccagcgccgctcgctggtcctgaggctgtatgaggcccacggcagccacgtggactgctggctgcacttgtcgctgccggttcaggaggccatcctctgcgatctcttggagcgaccagaccctgctggccacttgacccttcgggacaaccgcctgaagctcaccttttctcccttccaagtgctgtccctgttgctcgtgcttcagcctccgccacactgagtccctggggctggggttttgtttgtagaaggctctggggactcctaatttctgcttccccagcctaaagcagggatcagtcttttcttgtggaataaatccttggatcgggaaaaaaaaacacaacacaacacaaaaaaaaagggggcgcgccccgttttcaaatattatcccgcggggggccccagctttttacgcgccttcaccccgcgatttttcttggttacaaaggggccccctctttagggcaactccgttttataccgctaaggcccggggcaccggggtttttaaacacgcgtctgtaacctgggggaaacaactggcgtagccgtggacgcacaccttcgggtaaacgggcgcaccccctccctcctctgggggggtgggcaccaacattcttgcggcccaacacttacccttccggataattattccaacgcgcctccctaggggggtcacttattaacacttacacaggtgggttatactaacggcgtttaaccacatgcgctgcatattgccgtccccggcttggtacaagcttgcgccttaccgggacattgactttgcacaaactcttattcgccgggacgtgctctcaaagc

SEQ ID NO: 291162 - DNA, 3620 bp, Homo sapiens
ggtatcatactccagcaagcgcacatcatcagtgacgtcgatcacgatgcatcgtcatggcggctgcgccggccttgaagcactggcgcaccacgctggagcgggtggagaagttcgtgtcgccgctctactttaccgactgtaacctccgcggcaggctttttggggccagctgccctgtggctgtgctctccagcttcctgacgccggagagacttccctaccaggaggcagtccagcgggacttccgccccgcgcaggtcggcgacagcttcggacccacatggtggacctgctggttccgggtggagctgaccatcccagaggcatgggtgggccaggaagttcacctttgctgggaaagtgatggagaaggtctggtgtggcgtgatggagaacctgtccagggtttaaccaaagagggtgagaagaccagctatgtcctgactgacaggctgggggaaagagacccccgaagcctcactctctatgtggaagtagcctgcaatgggctcctgggggccgggaagggaagcatgattgcagcccctgaccctgagaagatgttccagctgagccgggctgagctagctgtgttccaccgggatgtccacatgctcctggtggatctggagctgctgctgggcatagccaagggcctcgggaaggacaaccagcgcagcttccaggccctgtacacagccaatcagatggtgaacgtgtgtgaccctgcccagcccgagaccttcccagtggcccaggccctggcctccaggttctttggccaacatgggggtgaaagccaacacaccattcatgccacagggcactgccacattgatacagcctggctttggcccttcaaagagactgtgaggaaatgtgcccggagctgggtgaccgccctgcagctcatggagcggaaccctgagttcatctttgcctgctcccaggcgcagcagctggaatgggtgaagagccgctaccctggcctgtactcccgcatccaggagtttgcgtgccgtgggcagtttgtgcctgtggggggcacctgggtggagatggatgggaacctgcccagtggagaggccatggtgaggcagtttttgcagggccagaacttctttctgcaggagtttgggaagatgtgctctgagttctggctgccggacacctttggctactcagcacagctcccccagatcatgcacggctgtggcatcaggcgctttctcacccagaaattgagctggaatttggtgaactccttcccacaccatacatttttctgggagggcctggatggctcccgtgtactggtccacttcccacctggcgactcctatgggatgcagggcagcgtggaggaggtgctgaagaccgtggccaacaaccgggacaaggggcgggccaaccacagtgccttcctctttggctttggggatgggggtggtggccccacccagaccatgctggaccgcctgaagcgcctgagcaatacggatgggctgcccagggtgcagctatcttctccaagacagctcttctcagcactggagagtgactcagagcagctgtgcacgtgggttggggagctcttcttggagctgcacaatggcacatacaccacccatgcccagatcaagaaggggaaccgggaatgtgagcggatcctgcacgacgtggagctgctcagtagcctggccctggcccgcagtgcccagttcctatacccagcagcccagctgcagcacctctggaggctccttcttctgaaccagttccatgatgtggtgactggaagctgcatccagatggtggcagaggaagccatgtgccattatgaagacatccgttcccatggcaatacactgctcagcgctgcagccgcagccctgtgtgctggggagccaggtcctgagggcctcctcatcgtcaacacactgccctggaagcggatcgaagtgatggccctgcccaaaccgggcggggcccacagcctaggtacgagctgaggggaagggttgctactgcagcaggaaggatggaggccagacagatcaggcctgggataccccgagggatctgggtgcccctgactggagagtagtagcacatcttccaccaacccatccccacctgcgcaagcttcctgaaaggtcaggaaggctgcactgatgcccaggcctcacccccagccctggtgacagtgcccagcatgggctatgctcctgttcctccccccacctcactgcagcccctgctgccccagcagcctgtgttcgtagtgcaagaggtgagtcctgcatgccctggggggcaggaactgtgctgggatactttcttacaactgagggtcctgagctcccctgtctggagcaagtggtgaggcggggctggggttggggtgggaagacttttggtgtgggaagcccctacagactcagcctcaaggcctcctcccacaaagactgatggctccgtgactctggacaatggcatcatccgagtgaagctggacccaactggtcgcctgacgtccttggtcctggtggcctctggcagggaggccattgctgagggcgccgtggggaaccagtttgtgctatttgatgatgtccccttgtactgggatgcatgggacgtcatggactaccacctggagacacggaagcctgtgctgggccaggcagggaccctggcagtgggcaccgagggcggcctgcggggcagcgcctggttcttgctacagatcagccccaacagtcggcttagccaggaggttgtgctggacgttggctgcccctatgtccgcttccacaccgaggtacactggcatgaggcccacaagttcctgaaggtggagttccctgctcgcgtgcggagttcccaggccacctatgagatccagtttgggcacctgcagcgacctacccactacaatacctcttgggactgggctcgatttgaggtgtgggcccatcgctggatggatctgtcagaacacggctttgggctggccctgctcaacgactgcaagtatggcgcgtcagtgcgaggcagcatcctcagcctctcgctcttgcgggcgcctaaagccccggacgctactgctgacacggggcgccacgagttcacctatgcactgatgccgcacaagggctctttccaggatgctggcgttatccaagctgcctacagcctaaacttccccctgttggctctgccagcccccagcccagcgcccgccacctcctggagtgcgttttccgtgtcttcacccgcggtcgtattggagaccgtcaagcaggcggagagcagcccccagcgccgctcgctggtcctgaggctgtatgaggcccacggcagccacgtggactgctggctgcacttgtcgctgccggttcaggaggccatcctctgcgatctcttggagcgaccagaccctgctggccacttgacccttcgggacaaccgccacactgagtccctggggctggggttttgtttgtagaaggctctggggactcctaatttctgcttccccagcctaaagcagggatcagtcttttcttgtggaataaatccttggatcgggaaaaaaaaagtaagaactatga

SEQ ID NO: 291163 - DNA, 3423 bp, Homo sapiens
ggtatcatactccagcaagcgcacatcatcagtgacgtcgatcacgatgcatcgtcatggcggctgcgccggccttgaagcactggcgcaccacgctggagcgggtggagaagttcgtgtcgccgctctactttaccgactgtaacctccgcggcaggctttttggggccagctgccctgtggctgtgctctccagcttcctgacgccggagagacttccctaccaggaggcagtccagcgggacttccgccccgcgcaggtcggcgacagcttcggacccacatggtggacctgctggttccgggtggagctgaccatcccagaggcatgggtgggccaggaagttcacctttgctgggaaagtgatggagaaggtctggtgtggcgtgatggagaacctgtccagggtttaaccaaagagggtgagaagaccagctatgtcctgactgacaggctgggggaaagagacccccgaagcctcactctctatgtggaagtagcctgcaatgggctcctgggggccgggaagggaagcatgattgcagcccctgaccctgagaagatgttccagctgagccgggctgagctagctgtgttccaccgggatgtccacatgctcctggtggatctggagctgctgctgggcatagccaagggcctcgggaaggacaaccagcgcagcttccaggccctgtacacagccaatcagatggtgaacgtgtgtgaccctgcccagcccgagaccttcccagtggcccaggccctggcctccaggttctttggccaacatgggggtgaaagccaacacaccattcatgccacagggcactgccacattgatacagcctggctttggcccttcaaagagactgtgaggaaatgtgcccggagctgggtgaccgccctgcagctcatggagcggaaccctgagttcatctttgcctgctcccaggcgcagcagctggaatgggtgaagagccgctaccctggcctgtactcccgcatccaggagtttgcgtgccgtgggcagtttgtgcctgtggggggcacctgggtggagatggatgggaacctgcccagtggagaggccatggtgaggcagtttttgcagggccagaacttctttctgcaggagtttgggaagatgtgctctgagttctggctgccggacacctttggctactcagcacagctcccccagatcatgcacggctgtggcatcaggcgctttctcacccagaaattgagctggaatttggtgaactccttcccacaccatacatttttctgggagggcctggatggctcccgtgtactggtccacttcccacctggcgactcctatgggatgcagggcagcgtggaggaggtgctgaagaccgtggccaacaaccgggacaaggggcgggccaaccacagtgccttcctctttggctttggggatgggggtggtggccccacccagaccatgctggaccgcctgaagcgcctgagcaatacggatgggctgcccagggtgcagctatcttctccaagacagctcttctcagcactggagagtgactcagagcagctgtgcacgtgggttggggagctcttcttggagctgcacaatggcacatacaccacccatgcccagatcaagaaggggaaccgggaatgtgagcggatcctgcacgacgtggagctgctcagtagcctggccctggcccgcagtgcccagttcctatacccagcagcccagctgcagcacctctggaggctccttcttctgaaccagttccatgatgtggtgactggaagctgcatccagatggtggcagaggaagccatgtgccattatgaagacatccgttcccatggcaatacactgctcagcgctgcagccgcagccctgtgtgctggggagccaggtcctgagggcctcctcatcgtcaacacactgccctggaagcggatcgaagtgatggccctgcccaaaccgggcggggcccacagcctaggtacgagctgaggggaagggttgctactgcagcaggaaggatggaggccagacagatcaggcctgggataccccgagggatctgggtgcccctgactggagagtagtagcacatcttccaccaacccatccccacctgcgcaagcttcctgaaaggtcaggaaggctgcactgatgcccaggcctcacccccagccctggtgacagtgcccagcatgggctatgctcctgttcctccccccacctcactgcagcccctgctgccccagcagcctgtgttcgtagtgcaagaggtgagtcctgcatgccctggggggcaggaactgtgctgggatactttcttacaactgagggtcctgagctcccctgtctggagcaagtggtgaggcggggctggggttggggtgggaagacttttggtgtgggaagcccctacagactcagcctcaaggcctcctcccacaaagactgatggctccgtgactctggacaatggcatcatccgagtgaagctggacccaactggtcgcctgacgtccttggtcctggtggcctctggcagggaggccattgctgagggcgccgtggggaaccagtttgtgctatttgatgatgtccccttgtactgggatgcatgggacgtcatggactaccacctggagacacggaagcctgtgctgggccaggcagggaccctggcagtgggcaccgagggcggcctgcggggcagcgcctggttcttgctacagatcagccccaacagtcggcttagccaggaggttgtgctggacgttggctgcccctatgtccgcttccacaccgaggtacactggcatgaggcccacaagttcctgaaggtggagttccctgctcgcgtgcggagttcccaggccacctatgagatccagtttgggcacctgcagcgacctacccactacaatacctcttgggactgggctcgatttgaggtctgacatggcagggtgggagtggccttggactcctccctggctggggagactgcttgtgtggaacaggctggggaggaagaggataatcaacatttgctgcttcctaacgtgtgtgccaggcattgcactaaatgctttacattggcaaggcacagtggctcacgcctgtaattccagcactttgggaggccgaggtgggtggatcacctgaggtcaggagttcaagaccagcctggccaacatggtgaaacgccatctctactaaaaatacaaaaattgggccgggcgtggtgactcacgcctgtaatcccagcagtttgggaggctgaggtgggtggatcacgaggtcaagagatcgagaccatcctggctaacacgatgaaaccctgtctctactaaaaagctgaggcaggagaatggcgtgaatctgggaggcagagcttgcagtg

SEQ ID NO: 291164 - DNA, 756 bp, Homo sapiens
ctctggagtctgggagcacaaagaggggcacagggccaccaagtgggtcttggatctgccctccaggtgtgggcccatcgctggatggatctgtcagaacacggctttgggctggccctgctcaacgactgcaagtatggcgcgtcagtgcgaggcagcatcctcagcctctcgctcttgcgggcgcctaaagccccggacgctactgctgacacggggcgccacgagttcacctatgcactgatgccgcacaagggctctttccaggatgctggcgttatccaagctgcctacagcctaaacttccccctgttggctctgccagcccccagcccagcgcccgccacctcctggagtgcgttttccgtgtcttcacccgcggtcgtattggagaccgtcaagcaggcggagagcagcccccagcgccgctcgctggtcctgaggctgtatgaggcccacggcagccacgtggactgctggctgcacttgtcgctgccggttcaggaggccatcctctgcgatctcttggagcgaccagaccctgctggccacttgacccttcgggacaaccgcctgaagctcaccttttctcccttccaagtgctgtccctgttgctcgtgcttcagcctccgccacactgagtccctggggctggggttttgtttgtagaaggctctggggactcctaatttctgcttccccagcctaaagcagggatcagtcttttcttgtggaataaatccttggatcgggaa

SEQ ID NO: 291165 - DNA, 536 bp, Homo sapiens
tcgctctggagcgcaatctgtaataaagtcctgagcaatttctcgcaccagacgctggaaggggagtatgcgaatcagaagttcagtggacttctgataacgtctaatttcacggagcgccacagtaccaggcctgtaacgatgaggtttcttcacccgcggtcgtattggagaccgtcaagcaggcggagagcagcccccagcgccgctcgctggtcctgaggctgtatgaggcccacggcagccacgtggactgctggctgcacttgtcgctgccggttcaggaggccatcctctgcgatctcttggagcgaccagaccctgctggccacttgacccttcgggacaaccgcctgaagctcaccttttctcccttccaagtgctgtccctgttgctcgtgcttcagcctccgccacactgagtccctggggctggggttttgtttgtagaaggctctggggactcctaatttctgcttccccagcctaaagcagggatcagtcttttcttgtggaataaatccttggatcgggaa

SEQ ID NO: 291166 - DNA, 365 bp, Homo sapiens
gctttgggctggccctgctcaacgactgcaagtatggcgcgtcagtgcgaggcagcatcctcagcctctcgctgtaagtggggtacccaccaggcctgggagctggcatggagaaatgggtcttcccgaccacaactccaacagcttcagcgtggcccctacgcgccctcctcaccccagcttgcgggcgcctaaagccccggacgctactgctgacacggggcgccacgagttcacctatgcactgatgccgcacaagggtgagtgctggggacggtggggccttcctgcagccctagacacctctctgcccttccctgagcccaaaccccagcaacctggcttcctgccccttctagggacag

SEQ ID NO: 291167 - DNA, 678 bp, Homo sapiens
caccatcatgcctgactccttttggtatttttttgtgtagagatgtgttctcattatgttgcccaggctggtctccaactcctgaactcaagcaatccacccaccttggccttgcaaagggctgagattacaggtgtgagccaccatgcctgggcaacattgagattgatttaaagaaattgattagggctgggtgtggtggtgcacactgcttatctcaacactttgggaggcagaagtggaagatttgcttgagcccaggagcttgagaccagcctgggaggtataatgaggccttgtctctacaaagataacaataaaaacattagcatgacatgatggtatgcacctgtagttccagctatccaggaagttgaggtgggaagattgcttgaggtcaggagtttgagaccacagtgagccataatcaggcccctgcattctagccctgggttgacagagtgagacccagtttcataaaaagagattgataagaaactcttgatgcaactcattataattttaaatggaaactaattcttgatattaccttagcagtgtgtccccgagaaagtgtcagagcctttacgtggaccttctcatgaaaaaggaaacagaatagtcaatggaaaaggaaaagggcctcctgcaaaacatccttccttgaaggtaattaat

SEQ ID NO: 291168 - DNA, 361 bp, Homo sapiens
gtcttctctgcagtgggagcagctctcctgccacagctcctcaccccctgaaaatgttcgcctgctccaagtttgtctccactccccttggtcaagagcacctcacagctgctgagccgtccgctatctgcagtggtgctgaaacgaccggagatactgacagatgagagcctcagcagcttggcagtctcatgtccccttacctcacttgtctctagccgcagcttccaaaccagcgccatttcaagggacatcgacacagcagccaagttcattggagctggggctgccacagttggggtggctggttctggggctgggattggaactgtgtttgggagcctcatcattggttatgcca

SEQ ID NO: 291169 - DNA, 4644 bp, Homo sapiens
  misc_feature (1501)..(1501): n is a, c, g, or t
  misc_feature (2759)..(2759): n is a, c, g, or t
  misc_feature (2837)..(2837): n is a, c, g, or t
gaattccaagctcataatggagaacctcattttggaccatgggggtcaactgaagaattttaaatgaagaggaaaattaatcagtgtgcaaggttaaatggagtggcagagactaggagctattaggaatctactgcaagatgattctaacagccataggtagtgggtaaaagaggaaagtgagccaataagggaaacagaagaacaagttgaatatgtgggaatataatcaggagaatgtggagtgaacccagggattctcaacctcagcactggtgacattttgagccccactctctgttgtgggagccgtcctgtgcaatgtaggacatttagcagcatcgttggcctctacccactaaaaacgccaagtagtaaggccccatcccttagtgacaacccaaaatgtctccagacattgccaattgcctctggttgagacccactgatttatggaaatcaaaagaataatcatttccaaaagcctgacagcaaacagcaaagtccaaaaataaaatgagaacaagaccattggctttggtggttggaggtcatgagataccttcaagaaagcaccctctataatatcaagtccatgtagaagacgttacagaggaaacaaacaatataaaagtgaaaacaaccaagggtgagctactctcagaaagtatgcctttgaaaagaaagtcagaagccatagcttgggatctctgcagatccctaaaagaatagattcctattctactgactttctatgaagatcaaattgtaaaaagcaaaagtttctctccaagggtttcctttgcagtgacctgtatgtccaaccacgcaagggcccattgtggggacatatgttgtccaaaaggaccatagcagagacaggccagtgagccaaagtgtggaaacttttgagactggcttgagcttggcacttatagaacaataaaccaagcctttgaaggggttcaacaaaggaaccatttgtccactctagtagctacaaagtaaggcagggttgcagcaaagaacaaaaaaataaaagaaggccaagctggaggtatgaccaaagtttactaggtccattctgagaccttctgctagggtctgagatctagaagacagtgaataaggaaacaaacccaaaactcaacgcaacacaggatatggaagctctcaggcctgacgttaacagcatctactatttttcttctcagctactttaatgaatgcagtatactaaaagccaggaggggaagggacaacactaagcaaaaaacatgcattttttaaaatgcacagattttcttcactgccgtttttgttatcattcctatgaattagtgatgccgaatttcattttctcatctgctgaagagctttcctgtgttcctctcgttggaacacatgcttggcattaaaatgcttgtgagaacttctcttcctttaacgttccctggctagcttggtttttaatctaacagcccttctttcaaaatgatcnttccactggagatagatatttatcattctcttccttcacctcatctcttgacaggccgcacgtgacttgaaggaatttttcaaatagcagctcagccaccctgaggggcttcagtctcacccctaagttcgctggctttttcttcaccacgtccagttgctttccatcttattaactgctcttttcactagaggaccaactcagtaggaaattttttgagaggtggagaaagagatgttcaaagaaggtgttggggtcgggggaaactggttttattttatacaagtcacacattctgaatcttcccttttgtgtctctggggagaaaggagaaagtttgatcaaatcgctcattatttctgcacttctttcttttttcctaagtataaaaatatatgactactactactgtgagactatgtgattgtgagaatgaatgattcttttttttttttttttttttttgaaacggagtctctcgctgtcacccaggctggagtgcagtagcacgatcttggctcactgcaacatctgcctcccgggttcaagcaattctcctgcctcagcctcctgagtagctgggactacaggtgcgctccaccacccccagctaatttttgtatttttagtggagacggggtttcaccatgttggtcaggctggtcttgaactcctgacctcatgatcctctcacctcggcctcacaaagtgctaggattacaggcgcatggccaagaatgaatgattatttgtgccttcctatgtgaaaaaaaaatgtttcctctagctacacactattctgttctgtgaggccgccccatcagactgttgacctagagtcccaaccccggccctccaggagacctgcctgttcttagaagcccaacccactcagcagcagctccaaataacagggggagccaacaaaaaagagtgctgctagagcaacaagcaaggggcaattagtcagaaggcaacttccatggtcttccaaaaaaaattgaggtgaaagaccaaagatgtccctaaaatgtcttcctaaaagataaacttcatcaactacctctgactggtcagtattaagaaccactttcaggccaggtgtcatggttcacgcctgtaactccatctactccagaggctgaggcaggacaattgcttcaggccggaggattgcttgaggccaggagctggagaccaagcctgagcaacacagtgagacctcatctctaccaaaaatgtacctctattaaaaaanaaaaaagaagaagaagaagaagaagaaggagaggaggctgggtatggtggctaatgcctttgtaatcccagaactttngaaggctgaggcaggagaatcacttaggctgaggcaggagaatcaccagagtctaggagtttgagaccagcctgggcaacatagtgagacccccatctctacaaaaaaaaaaattcaaaaattagccaagcgtggggtttgtgcctgtagacccaactactcaggaggctcaggtaggaggatcacctgagtccagggaggtcgaggctgcagtgagtcatgattattccactgccttccagcctagactacagggtgagaccctgtcttaaaaaaaaaattaaagaagaaaaaactctcttttcttttctttctttcttcttcttcttttctttttttttttttctttttttttttttagagatggcacgtcaccacattgcccaggctgttgtcgaactcctggcctcaaacgatgctcccacttgagcctcccaaagtgctgggactacaagcataagccaccacacacggccttttcctttctttttctatttctcaatggatttttccaatggacacgtatcactttggtagttatacatgatactagttgtaatctcagccatttttcaacccagcaaatgtctattctaggtcaaatatgtctcaaaaattactaaaagaaaatcagttatgtcctttaacctggctgaggtctggctttgttttctctcatgtaaaaatggagatggcacaaaacaactccaagctgttacttgaaagtaacacctcaggtgatgtcaccagcctgagggagagtgaggttaagttctgaacccacaggcattatatctgcctggggttcacatgccctacactggactggcataatttgagagtcagatccgaagatgtggtatatccgccatctttagcaactttcaaaaactaccctatgaggtcaagctggacctacttttggttttgccattgttgtttgtttgttgttgagggttttctttgaggggcggggagtgcatgcccctgtggagagcactcatttagcttcaattagagtaatgccaaaagtgccagattcctgggaaatcagcctacaaggctcctgcgggaaggaacctccactgccagaagtccttagggcatctaagtgatcagacaccgtcagggattctttgccccgtaaaaacctacttgaccagggacacgtgccaggtaaatttccttcacatttacttcaaccttattgcatactcattttagtattaaaacctttaataaaatgctcctattccttcacactttttttctatgagatctcaaataccccttcttgctattaaaaaaaatcacttattattcaccagcccaatattttaaaagtaaaaataataagccaaggccaggagcgatgactcgcacttgtattcccagcagtttcagaggcaaaggccgaaggatcgctttaaccgaggagtttgagaccagcctgggcaacatgaccagactgcctctctacaaaaagtttaaaaaattaaccgggtgtggtggtgcactgcactcccagctactgggctggggtatcaggctgaggtaggaggtttgctttgagcccggggggatcgaggctgcagtgagctttgattgtgccactgcactccagcctgggtgacagaaggagacctgtctcaaaaataataagaataataattaataataataggccaaaccaaatacccatcaccttctgctgtgcctcccctttccccaataaatccagtgtcttgctttcaaattttgtggttaaaaaagatgatgagtttctaagacgtgggggctaaagctt

SEQ ID NO: 291170 - DNA, 1813 bp, Homo sapiens
cggcccccgccctgttcgccccgcgccaccggcccgcgccccgccatggaggacctggatgccctgctctctgacctggagactaccacctcgcacatgccaaggtcaggggctcccaaagagcgccctgcggagcctctcacccctcccccatcctatggccaccagccacagacagggtctggggagtcttcaggagcctcgggggacaaggaccacctgtacagcacggtatgcaagcctcggtccccaaagcctgcagccccggcggcccctccattctcctcttccagcggtgtcttgggtaccgggctctgtgagctagatcggttgcttcaggaacttaatgccactcagttcaacatcacagatgaaatcatgtctcagttcccatctagcaaggtggcttcaggagagcagaaggaggaccagtctgaagataagaaaagacccagcctcccttccagcccgtctcctggcctcccaaaggcttctgccacctcagccactctggagctggatagactgatggcctcactctctgacttccgcgttcaaaaccatcttccagcctctgggccaactcagccaccggtggtgagctccacaaatgagggctccccatccccaccagagccgactggcaagggcagcctagacaccatgctggggctgctgcagtccgacctcagccgccggggtgttcccacccaggccaaaggcctctgtggctcctgcaataaacctattgctgggcaagtggtgacggctctgggccgcgcctggcaccccgagcacttcgtttgcggaggctgttccaccgccctgggaggcagcagcttcttcgagaaggatggagcccccttctgccccgagtgctactttgagcgcttctcgccaagatgtggcttctgcaaccagcccatccgacacaagatggtgaccgccttgggcactcactggcacccagagcatttctgctgcgtcagttgcggggagcccttcggagatgagggtttccacgagcgcgagggccgcccctactgccgccgggacttcctgcagctgttcgccccgcgctgccagggctgccagggccccatcctggataactacatctcggcgctcagcgcgctctggcacccggactgtttcgtctgcagggaatgcttcgcgcccttctcgggaggcagctttttcgagcacgagggccgcccgttgtgcgagaaccacttccacgcacgacgcggctcgctgtgcgccacgtgtggcctccctgtgaccggccgctgcgtgtcggccctgggtcgccgcttccacccggaccacttcacatgcaccttctgcctgcgcccgctcaccaaggggtccttccaggagcgcgccggcaagccctactgccagccctgcttcctgaagctcttcggctgacagcccgctcggctcgccctctcccccggaggccgcgccctcccggaaaagccgggtcctccagaccccgaggccttgctctcagagcgggaggccccacccactggagagccccgcccctaaggtactatgagtcctcaggggtcaagttcagaaacggcccagccagacctaaacccacacgcccacaaagtggattgcacacagacaagaactcccgtgcgggcctccactctattcccacccttgagggagcccccttactgggggagggtccttgcaattccagcgaatcggaggccaggccaggacgtccttgctccctgcaccctcactgttctgtgcactttttctacctacataaacacacgcattccacctc

SEQ ID NO: 291171 - DNA, 1810 bp, Homo sapiens
ggcacgaggggagaataaaataatcaggaggctgggtttgtgcttggctccaagcatgccctgctctctgacctggagactaccacctcgcacatgccaaggtcaggggctcccaaagagcgccctgcggagcctctcacccctcccccatcctatggccaccagccacagacagggtctggggagtcttcaggagcctcgggggacaaggaccacctgtacagcacggtatgcaagcctcggtccccaaagcctgcagccccggcggcccctccattctcctcttccagcggtgtcttgggtaccgggctctgtgagctagatcggttgcttcaggaacttaatgccactcagttcaacatcacagatgaaatcatgtctcagttcccatctagcaaggtggcttcaggagagcagaaggaggaccagtctgaagataagaaaagacccagcctcccttccagcccgtctcctggcctcccaaaggcttctgccacctcagccactctggagctggatagactgatggcctcactctctgacttccgcgttcaaaaccatcttccagcctctgggccaactcagccaccggtggtgagctccacaaatgagggctccccatccccaccagagccgactggcaagggcagcctagacaccatgctggggctgctgcagtccgacctcagccgccggggtgttcccacccaggccaaaggcctctgtggctcctgcaataaacctattgctgggcaagtggtgacggctctgggccgcgcctggcaccccgagcacttcgtttgcggaggctgttccaccgccctgggaggcagcagcttcttcgagaaggatggagcccccttctgccccgagtgctactttgagcgcttctcgccaagatgtggcttctgcaaccagcccatccgacacaagatggtgaccgccttgggcactcactggcacccagagcatttctgctgcgtcagttgcggggagcccttcggagatgagggtttccacgagcgcgagggccgcccctactgccgccgggacttcctgcagctgttcgccccgcgctgccagggctgccagggccccatcctggataactacatctcggcgctcagcgcgctctggcacccggactgtttcgtctgcagggaatgcttcgcgcccttctcgggaggcagctttttcgagcacgagggccgcccgttgtgcgagaaccacttccacgcacgacgcggctcgctgtgcgccacgtgtggcctccctgtgaccggccgctgcgtgtcggccctgggtcgccgcttccacccggaccacttcacatgcaccttctgcctgcgcccgctcaccaaggggtccttccaggagcgcgccggcaagccctactgccagccctgcttcctgaagctcttcggctgacagcccgctcggctcgccctctcccccggaggccgcgccctcccggaaaagccgggtcctccagaccccgaggccttgctctcagagcgggaggccccacccactggagagccccgcccctaaggtactatgagtcctcaggggtcaagttcagaaacggcccagccagacctaaacccacacgcccacaaagtggattgcacacagacaagaactcccgtgcgggcctccactctattcccacccttgagggagcccccttactgggggagggtccttgcaattccagcgaatcggaggccaggccaggacgtccttgctccctgcaccctcactgttctgtgcactttttctacctacataaacacacgcattccacctc

SEQ ID NO: 291172 - DNA, 1326 bp, Homo sapiens
cctggtggcgaattcggcacgagggaggacctggatgccctgctctctgacctggagactaccacctcgcacatgccaaggtcaggggctcccaaagagcgccctgcggagcctctcacccctcccccatcctatggccaccagccacagacagggtctggggagtcttcaggagcctcgggggacaaggaccacctgtacagcacggtatgcaagcctcggtccccaaagcctgcagccccggcggcccctccattctcctcttccagcggtgtcttgggtaccgggctctgtgagctagatcggttgcttcaggaacttaatgccactcagttcaacatcacagatgaaatcatgtctcagttcccatctagcaaggtggcttcaggagagcagaaggaggaccagtctgaagataagaaaagacccagcctcccttccagcccgtctcctggcctcccaaaggcttctgccacctcagccactctggagctggatagactgatggcctcactctctgacttccgcgttcaaaaccatcttccagcctctgggccaactcagccaccggtggtgagctccacaaatgagggctccccatccccaccagagccgactggcaagggcagcctagacaccatgctggggctgctgcagtccgacctcagccgccggggtgttcccacccaggccaaaggcctctgtggctcctgcaataaacctattgctgggcaagtaagtggagccttgtgagaagggaggcagagacctgtcacagacccatctttagtgagagctgggctttatgctgttcccttttagtaagttaatctgggaagtgggtatcattattacttatgttttatggatgaggaaactgaagctctgaaccacacagcaggttagtggtagggtgaaaattccaaccatgttaccatttattgtggtcctactgtgtgccaggcactgtgccagctcctttacaaaccctcatctcatctgatcttcacaaaacactctgtggctccacccaatatctctcaggcatctacaaaggctctctcttcctccgtcagagtctggactgggttcactggtccttgttttattgactgagcagatgtgattgacaacagctgtgcctaggggttaacctagtgccccctgctagatcaagtacctgactcccagcccagaattgcccatctcagcaaaggagggtggcattgtgacttttgtggatcataggcactttcatcttcatgagtcccttcgtccattaaaataaatagatttttatgtctgtgttggtgtaaaaatgaaaat

SEQ ID NO: 291173 - DNA, 462 bp, Homo sapiens
ctcatgtataggtcaatcctggagcgcagctggaagacggaacacgggagctagatctccatcgcttacaggctgcgtgatctcgaacactggattctttattctgatcgctcagagaggactcgaaaaacgccgcgtaaatcttgcctcactgggcatgtggttgtcagagccgctctgacccgcctcacctcccactcgcaggtggtgacggctctgggccgcgcctggcaccccgagcacttcgtttgcggaggctgttccaccgccctgggaggcagcagcttcttcgagaaggatggagcccccttctgccccgagtgctactttgagcgcttctcgccaagatgtggcttctgcaaccagcccatccgacacgtgagccccgcccggccgcaccgagcccgccctatctcaccaggagagctgtgggacgggcctccaccgcatgggtcccgcccc

SEQ ID NO: 291174 - DNA, 2446 bp, Homo sapiens
cggcccccgccctgttcgccccgcgccaccggcccgcgccccgccatggaggacctggatgccctgctctctgacctggagactaccacctcgcacatgccaaggtcaggggctcccaaagagcgccctgcggagcctctcacccctcccccatcctatggccaccagccacagacagggtctggggagtcttcaggagcctcgggggacaaggaccacctgtacagcacggtatgcaagcctcggtccccaaagcctgcagccccggcggcccctccattctcctcttccagcggtgtcttgggtaccgggctctgtgagctagatcggttgcttcaggaacttaatgccactcagttcaacatcacagatgaaatcatgtctcagttcccatctagcaaggtggcttcaggagagcagaaggaggaccagtctgaagataagaaaagacccagcctcccttccagcccgtctcctggcctcccaaaggcttctgccacctcagccactctggagctggatagactgatggcctcactctctgacttccgcgttcaaaaccatcttccagcctctgggccaactcagccaccggtggtgagctccacaaatgagggctccccatccccaccagagccgactggcaagggcagcctagacaccatgctggggctgctgcagtccgacctcagccgccggggtgttcccacccaggccaaaggcctctgtggctcctgcaataaacctattgctgggcaagtggtgacggctctgggccgcgcctggcaccccgagcacttcgtttgcggaggctgttccaccgccctgggaggcagcagcttcttcgagaaggatggagcccccttctgccccgagtgctactttgagcgcttctcgccaagatgtggcttctgcaaccagcccatccgacacaagatggtgaccgccttgggcactcactggcacccagagcatttctgctgcgtcagttgcggggagcccttcggagatgagggtttccacgagcgcgagggccgcccctactgccgccgggacttcctgcagctgttcgccccgcgctgccagggctgccagggccccatcctggataactacatctcggcgctcagcgcgctctggcacccggactgtttcgtctgcagggaatgcttcgcgcccttctcgggaggcagctttttcgagcacgagggccgcccgttgtgcgagaaccacttccacgcacgacgcggctcgctgtgcgccacgtgtggcctccctgtgaccggccgctgcgtgtcggccctgggtcgccgcttccacccggaccacttcacatgcaccttctgcctgcgcccgctcaccaaggggtccttccaggagcgcgccggcaagccctactgccagccctgcttcctgaagctcttcggctgacagcccgctcggctcgccctctcccccggaggccgcgccctcccggaaaagccgggtcctccagaccccgaggccttgctctcagagcgggaggccccacccactggagagccccgcccctaaggtactatgagtcctcaggggtcaagttcagaaacggcccagccagacctaaacccacacgcccacaaagtggattgcacacagacaagaactcccgtgcgggcctccactctattcccacccttgagggagcccccttactgggggagggtccttgcaattccagcgaatcggaggccaggccaggacgtccttgctccctgcaccctcactgttctgtgcactttttctacctacataaacacacgcattccacctcaaaaaaaaaaaaaaaaaaaaaaaaaaaaaaaaaaaaaaaaaaaaaaaaaaaaaaaaaaaaaaaaaaaaaaaaaaaaaaaaaaacgaggggggccgccggcgccgactagtacccctctacgggggcgctgccacctcccgccgcacccaccgcggttgtagtagagagaggaggggccgccactaggggtgcggttatatataaagacgacgagcgcggaacgccacagaataataatacaaacagactgaagccagaaggggagaaacaaggccgcggacgagtgagaggaaactactgttgagtgacaagcagccacacccatccactaccagcggcgggggcacacacatacaaatatgaggggcgcaaacaaccctcgctccatagagagaagatatatattattagaaacaccccctcgctcgaagggggaggaaataaattatacagcagattattaagacactgagagatatgagctagtgcgagtgagtgcaaacaccaacacgcagcagcaacgttatattagcatctgttacgagggacggagagaaagagcaaaaaaaggttgcgtgatgagtaacatacgagaagatatttattattgattgtgaataaaactaattattc

SEQ ID NO: 291175 - DNA, 1789 bp, Homo sapiens
cctggtggcgaattcggcacgagggaggacctggatgccctgctctctgacctggagactaccacctcgcacatgccaaggtcaggggctcccaaagagcgccctgcggagcctctcacccctcccccatcctatggccaccagccacagacagggtctggggagtcttcaggagcctcgggggacaaggaccacctgtacagcacggtatgcaagcctcggtccccaaagcctgcagccccggcggcccctccattctcctcttccagcggtgtcttgggtaccgggctctgtgagctagatcggttgcttcaggaacttaatgccactcagttcaacatcacagatgaaatcatgtctcagttcccatctagcaaggtggcttcaggagagcagaaggaggaccagtctgaagataagaaaagacccagcctcccttccagcccgtctcctggcctcccaaaggcttctgccacctcagccactctggagctggatagactgatggcctcactctctgacttccgcgttcaaaaccatcttccagcctctgggccaactcagccaccggtggtgagctccacaaatgagggctccccatccccaccagagccgactggcaagggcagcctagacaccatgctggggctgctgcagtccgacctcagccgccggggtgttcccacccaggccaaaggcctctgtggctcctgcaataaacctattgctgggcaagtggtgacggctctgggccgcgcctggcaccccgagcacttcgtttgcggaggctgttccaccgccctgggaggcagcagcttcttcgagaaggatggagcccccttctgccccgagtgctactttgagcgcttctcgccaagatgtggcttctgcaaccagcccatccgacacaagatggtgaccgccttgggcactcactggcacccagagcatttctgctgcgtcagttgcggggagcccttcggagatgagggtttccacgagcgcgagggccgcccctactgccgccgggacttcctgcagctgttcgccccgcgctgccagggctgccagggccccatcctggataactacatctcggcgctcagcgcgctctggcacccggactgtttcgtctgcagggaatgcttcgcgcccttctcgggaggcagctttttcgagcacgagggccgcccgttgtgcgagaaccacttccacgcacgacgcggctcgctgtgcgccacgtgtggcctccctgtgaccggccgctgcgtgtcggccctgggtcgccgcttccacccggaccacttcacatgcaccttctgcctgcgcccgctcaccaaggggtccttccaggagcgcgccggcaagccctactgccagccctgcttcctgaagctcttcggctgacagcccgctcggctcgccctctcccccggaggccgcgccctcccggaaaagccgggtcctccagaccccgaggccttgctctcagagcgggaggccccacccactggagagccccgcccctaaggtactatgagtcctcaggggtcaagttcagaaacggcccagccagacctaaacccacacgcccacaaagtggattgcacacagacaagaactcccgtgcgggcctccactctattcccacccttgagggagcccccttactgggggagggtccttgcaattccagcgaatcggaggccaggccaggacgtccttgctccctgcaccctcactgttctgtgcactttttctacctacataaacacacgcattccacctc

SEQ ID NO: 291176 - DNA, 1732 bp, Homo sapiens
cggcccccgccctgttcgccccgcgccaccggcccgcgccccgccatggaggacctggatgccctgctctctgacctggagactaccacctcgcacatgccaaggtcaggggctcccaaagagcgccctgcggagcctctcacccctcccccatcctatggccaccagccacagacagggtctggggagtcttcaggagcctcgggggacaaggaccacctgtacagcacggtatgcaagcctcggtccccaaagcctgcagccccggcggcccctccattctcctcttccagcggtgtcttgggtaccgggctctgtgagctagatcggttgcttcaggaacttaatgccactcagttcaacatcacagatgaaatcatgtctcagttcccatctagcaaggtggcttcaggagagcagaaggaggaccagtctgaagataagaaaagacccagcctcccttccagcccgtctcctggcctcccaaaggcttctgccacctcagccactctggagctggatagactgatggcctcactctctgacttccgcgttcaaaaccatcttccagcctctgggccaactcagccaccggtggtgagctccacaaatgagggctccccatccccaccagagccgactggcaagggcagcctagacaccatgctggggctgctgcagtccgacctcagccgccggggtgttcccacccaggccaaaggcctctgtggctcctgcaataaacctattgctgggcaagtggtgacggctctgggccgcgcctggcaccccgagcacttcgtttgcggaggctgttccaccgccctgggaggcagcagcttcttcgagaaggatggagcccccttctgccccgagtgctactttgagcgcttctcgccaagatgtggcttctgcaaccagcccatccgacacaagatggtgaccgccttgggcactcactggcacccagagcatttctgctgcgtcagttgcggggagcccttcggagatgagggtttccacgagcgcgagggccgcccctactgccgccgggacttcctgcagctgttcgccccgcgctgccagggctgccagggccccatcctggataactacatctcggcgctcagcgcgctctggcacccggactgtttcgtctgcagggaatgcttcgcgcccttctcgggaggcagctttttcgagcacgagggccgcccgttgtgcgagaaccacttccacgcacgacgcggctcgctgtgcgccacgtgtggcctccctgtgaccggccgctgcgtgtcggccctgggtcgccgcttccacccggaccacttcacatgcaccttctgcctgcgcccgctcaccaaggggtccttccaggagcgccgcgccctcccggaaaagccgggtcctccagaccccgaggccttgctctcagagcgggaggccccacccactggagagccccgcccctaaggtactatgagtcctcaggggtcaagttcagaaacggcccagccagacctaaacccacacgcccacaaagtggattgcacacagacaagaactcccgtgcgggcctccactctattcccacccttgagggagcccccttactgggggagggtccttgcaattccagcgaatcggaggccaggccaggacgtccttgctccctgcaccctcactgttctgtgcactttttctacctacataaacacacgcattccacctc

SEQ ID NO: 291177 - DNA, 1595 bp, Homo sapiens
cggcccccgccctgttcgccccgcgccaccggcccgcgccccgccatggaggacctggatgccctgctctctgacctggagactaccacctcgcacatgccaaggtcaggggctcccaaagagcgccctgcggagcctctcacccctcccccatcctatggccaccagccacagacagggtctggggagtcttcaggagcctcgggggacaaggaccacctgtacagcacggtatgcaagcctcggtccccaaagcctgcagccccggcggcccctccattctcctcttccagcggtgtcttgggtaccgggctctgtgagctagatcggttgcttcaggaacttaatgccactcagttcaacatcacagatgaaatcatgtctcagttcccatctagcaaggtggcttcaggagagcagaaggaggaccagtctgaagataagaaaagacccagcctcccttccagcccgtctcctggcctcccaaaggcttctgccacctcagccactctggagctggatagactgatggcctcactctctgacttccgcgttcaaaaccatcttccagcctctgggccaactcagccaccggtggtgagctccacaaatgagggctccccatccccaccagagccgactggcaagggcagcctagacaccatgctggggctgctgcagtccgacctcagccgccggggtgttcccacccaggccaaaggcctctgtggctcctgcaataaacctattgctgggcaagtggtgacggctctgggccgcgcctggcaccccgagcacttcgtttgcggaggctgttccaccgccctgggaggcagcagcttcttcgagaaggatggagcccccttctgccccgagtgctactttgagcgcttctcgccaagatgtggcttctgcaaccagcccatccgacacaagatggtgaccgccttgggcactcactggcacccagagcatttctgctgcgtcagttgcggggagcccttcggagatgagggtttccacgagcgcgagggccgcccctactgccgccgggacttcctgcagctgttcgccccgcgctgccagggctgccagggccccatcctggataactacatctcggcgctcagcgcgctctggcacccggactgtttcgtctgcagggaatgcttcgcgcccttctcgggaggcagctttttcgagcacgagggccgcccgttgtgcgagaaccacttccacgcacgacgcggctcgctgtgcgccacgtgtggcctccctgtgaccggccttgctctcagagcgggaggccccacccactggagagccccgcccctaaggtactatgagtcctcaggggtcaagttcagaaacggcccagccagacctaaacccacacgcccacaaagtggattgcacacagacaagaactcccgtgcgggcctccactctattcccacccttgagggagcccccttactgggggagggtccttgcaattccagcgaatcggaggccaggccaggacgtccttgctccctgcaccctcactgttctgtgcactttttctacctacataaacacacgcattccacctc

SEQ ID NO: 291178 - DNA, 1639 bp, Homo sapiens
cctcgtgcgcgctcgtgccgaggagcctcgggggacaaggaccacctgtacagcacggtatgcaagcctcggtccccaaagcctgcagccccggcggcccctccattctcctcttccagcggtgtcttgggtaccgggctctgtgagctagatcggttgcttcaggaacttaatgccactcagttcaacatcacagatgaaatcatgtctcagttcccatctagcaaggtggcttcaggagagcagaaggaggaccagtctgaagataagaaaagacccagcctcccttccagcccgtctcctggcctcccaaaggcttctgccacctcagccactctggagctggatagactgatggcctcactctctgacttccgcgttcaaaaccatcttccagcctctgggccaactcagccaccggtggtgagctccacaaatgagggctccccatccccaccagagccgactggcaagggcagcctagacaccatgctggggctgctgcagtccgacctcagccgccggggtgttcccacccaggccaaaggcctctgtggctcctgcaataaacctattgctgggcaagtggtgacggctctgggccgcgcctggcaccccgagcacttcgtttgcggaggctgttccaccgccctgggaggcagcagcttcttcgagaaggatggagcccccttctgccccgagtgctactttgagcgcttctcgccaagatgtggcttctgcaaccagcccatccgacacaagatggtgaccgccttgggcactcactggcacccagagcatttctgctgcgtcagttgcggggagcccttcggagatgagggtttccacgagcgcgagggccgcccctactgccgccgggacttcctgcagctgttcgccccgcgctgccagggctgccagggccccatcctggataactacatctcggcgctcagcgcgctctggcacccggactgtttcgtctgcagggaatgcttcgcgcccttctcgggaggcagctttttcgagcacgagggccgcccgttgtgcgagaaccacttccacgcacgacgcggctcgctgtgcgccacgtgtggcctccctgtgaccggccgctgcgtgtcggccctgggtcgccgcttccacccggaccacttcacatgcaccttctgcctgcgcccgctcaccaaggggtccttccaggagcgcgccggcaagccctactgccagccctgcttcctgaagctcttcggctgacagcccgctcggctcgccctctcccccggaggccgcgccctcccggaaaagccgggtcctccagaccccgaggccttgctctcagagcgggaggccccacccactggagagccccgcccctaaggtactatgagtcctcaggggtcaagttcagaaacggcccagccagacctaaacccacacgcccacaaagtggattgcacacagacaagaactcccgtgcgggcctccactctattcccacccttgagggagcccccttactgggggagggtccttgcaattccagcgaatcggaggccaggccaggacgtccttgctccctgcaccctcactgttctgtgcactttttctacctacataaacacacgcattccacctc

SEQ ID NO: 291179 - DNA, 1258 bp, Homo sapiens
ctcatgtataggtcaatcctggagcgcagctggaagacggaacacgggagctagatctccatcgcttacaggctgcgtgatctcgaacactggattctttattctgatcgctcagagaggactcgaaaaacgccgcgtaaatcttgcctcactgggcatgtggttgtcagagccgctctgacccgcctcacctcccactcgcaggtggtgacggctctgggccgcgcctggcaccccgagcacttcgtttgcggaggctgttccaccgccctgggaggcagcagcttcttcgagaaggatggagcccccttctgccccgagtgctactttgagcgcttctcgccaagatgtggcttctgcaaccagcccatccgacacaagatggtgaccgccttgggcactcactggcacccagagcatttctgctgcgtcagttgcggggagcccttcggagatgagggtttccacgagcgcgagggccgcccctactgccgccgggacttcctgcagctgttcgccccgcgctgccagggctgccagggccccatcctggataactacatctcggcgctcagcgcgctctggcacccggactgtttcgtctgcagggaatgcttcgcgcccttctcgggaggcagctttttcgagcacgagggccgcccgttgtgcgagaaccacttccacgcacgacgcggctcgctgtgcgccacgtgtggcctccctgtgaccggccgctgcgtgtcggccctgggtcgccgcttccacccggaccacttcacatgcaccttctgcctgcgcccgctcaccaaggggtccttccaggagcgcgccggcaagccctactgccagccctgcttcctgaagctcttcggctgacagcccgctcggctcgccctctcccccggaggccgcgccctcccggaaaagccgggtcctccagaccccgaggccttgctctcagagcgggaggccccacccactggagagccccgcccctaaggtactatgagtcctcaggggtcaagttcagaaacggcccagccagacctaaacccacacgcccacaaagtggattgcacacagacaagaactcccgtgcgggcctccactctattcccacccttgagggagcccccttactgggggagggtccttgcaattccagcgaatcggaggccaggccaggacgtccttgctccctgcaccctcactgttctgtgcactttttctacctacataaacacacgcattccacctc

SEQ ID NO: 291180 - DNA, 1062 bp, Homo sapiens
ctcatgtataggtcaatcctggagcgcagctggaagacggaacacgggagctagatctccatcgcttacaggctgcgtgatctcgaacactggattctttattctgatcgctcagagaggactcgaaaaacgccgcgtaaatcttgcctcactgggcatgtggttgtcagagccgctctgacccgcctcacctcccactcgcaggtggtgacggctctgggccgcgcctggcaccccgagcacttcgtttgcggaggctgttccaccgccctgggaggcagcagcttcttcgagaaggatggagcccccttctgccccgagtgctactttgccagggctgccagggccccatcctggataactacatctcggcgctcagcgcgctctggcacccggactgtttcgtctgcagggaatgcttcgcgcccttctcgggaggcagctttttcgagcacgagggccgcccgttgtgcgagaaccacttccacgcacgacgcggctcgctgtgcgccacgtgtggcctccctgtgaccggccgctgcgtgtcggccctgggtcgccgcttccacccggaccacttcacatgcaccttctgcctgcgcccgctcaccaaggggtccttccaggagcgcgccggcaagccctactgccagccctgcttcctgaagctcttcggctgacagcccgctcggctcgccctctcccccggaggccgcgccctcccggaaaagccgggtcctccagaccccgaggccttgctctcagagcgggaggccccacccactggagagccccgcccctaaggtactatgagtcctcaggggtcaagttcagaaacggcccagccagacctaaacccacacgcccacaaagtggattgcacacagacaagaactcccgtgcgggcctccactctattcccacccttgagggagcccccttactgggggagggtccttgcaattccagcgaatcggaggccaggccaggacgtccttgctccctgcaccctcactgttctgtgcactttttctacctacataaacacacgcattccacctc

SEQ ID NO: 291181 - DNA, 3431 bp, Homo sapiens
gccgcgcggcgcgggggaggagaccttcatctgttcacgcggtagcgcggattgcggttcgcggcgcgcgccaccggggaaggagcggtgggccgaggggttggaggtggggccccaggaggacctcgggctgtgggccgggagagcggagtcggggagtggggcgggggagcgaggtggcgccggggagcctgggatatggcgcggccagacgatgaggagggggcggcggtggcgcccggacacccgctcgcgaaaggatacctcccgttgccgaggggcgcgcccgttgggaaggagagcgtggagctgcagaacgggcccaaagcgggcaccttcccggtgaatggggccccccgggacagcctcgctgccgcctcgggagttctgggcgggcctcagactccactggccccagaagaggagacccaggcccggctgctgcctgcgggcgcgggagctgagaccccgggggccgagagcagcccgctgccccttacggcgctctccccgcggcgcttcgtggtgctcctgatcttcagcctgtactcgctggtcaacgcctttcagtggatccagtacagcatcattagcaacgtcttcgagggcttctacggtgtcaccttgctgcacatcgactggctgtccatggtgtacatgctggcctacgtgcccctcatcttcccggccacctggctgctggacaccagaggcctgcggctcaccgccctgctgggctccggcctcaactgcctgggtgcctggatcaagtgcggcagtgtgcagcagcatctcttctgggtcaccatgttgggccagtgcttgtgctcggtggcccaggtgttcatcctgggcttgccctcccgcatcgcctcagtgtggtttgggcccaaagaggtgtccacagcttgtgccaccgccgtgctgggcaatcagcttggaactgcagttggctttttgctaccaccagttttagtacccaacacacagaatgacacaaatctcctggcttgtaatatcagcaccatgttttatggaacatcagctgttgccacacttttatttattttaacagcaattgccttcaaagaaaaacctcggtatccaccaagtcaggctcaagcagctcttcaagacagtccccctgaagagtactcctataagaaatcaataagaaacctgtttaaaaacattccttttgtccttctgttgatcacttatggtatcatgactggtgccttttattcagtctcaacgttattaaatcaaatgatattgacatattatgagggagaagaagtcaatgctggaaggattgggctaacgctagtagtagctggaatggtgggctctattctttgtggcttatggctggattatactaaaacatacaaacagactactctgatagtttatattttgtcttttattggaatggttatctttactttcacattggaccttagatatattatcatcgtgtttgttactggaggggtgcttggcttcttcatgactggttacctccctttgggttttgaatttgctgttgaaatcacttaccctgaatctgaaggtacttcatctggtcttcttaatgcttctgcacagatatttggaattttgttcacattggctcaaggaaagctcacatcagactatggtcctaaggcagggaacatttttctctgtgtctggatgtttataggcatcatattaacagcattaatcaagtctgatctgcgaagacacaacataaatataggaattacaaatgttgatgttaaagctataccagctgacagtcccacagaccaagaaccaaaaacggttatgttgtccaagcagtcagaatcagcaatttgaagagaaaggcaaagttactgtcctgtagtaattggggacaatgtgatcatccttggagagagatgtgagcaccaaggctgggtttgtatgtggtgggggaataaacacacttacttgaaaattaccatatgaactctaaatgcataattattattttgcttaattgttaaattaagggaaattttcttaaaattcttctgtttacatcatgttaacactactgtttatctaattagtatccggtttttagtctcatattgtatctgaaagtaagcttcttgacgtttactttttaaaagtcgatgtttttcttttttgtagaaaatggaagcttagaagactttttaaagtgataatatggggtgttcagtccccataagatataatagttcatgcagtttatatattaaagtatccagtggaactaaatgtacaatatattcctaattggctgcctttttcactgtgctgaccagctgttcaagccacttcagtttgagtacaacataccaacatgacactactcacccacaaaggacagcattgggatcaggctttcagatgacctctaagatttttcccatttattgtactcttgttacaaagtactttttaacacatgcagtcaatggctataaaaactattctgtgtacagattctacccagactttggtcttagaattatgttctaattaaggagcctggttacaggttcattctgtcttgagttcttttctgtgctgcctttctatcatggataaatgctaacgctgtattttttcactccaacttgagatagagtagttttgtacccattgccttttttttcttttaaactctctttttttttttttcctgatgtgtaactttctagtaagataatttcatcatgtatgttactggctatttcatgatttcatgtatcacatcgtatattttgccttgaagattcctgaaataaggaaatctataataacttcagatagcctacatgtccccatttagtggagacctcttgaatgctatttgaattctgcagtatcatttttatgaccattctcctttgaggaatactatgcccaggtacatgctctatcagtgtgccgggagagtggattcttttcttcactgcagagtcatcacactgttggaatagtctgctcttttacatgctcaggtagggaaaataggaccaaatatatttccacagtgcctaccactgtgtcatgtttacagtgagagtttaaatattgttgatgtcctgactctgtgagctcatagggagtatcttcatagtaatgacatttgatcagccataaaatttacattatgttcatatgcacccaaaaaagctagtcaggtaatgaatacccttgaagtgaatagcaattttgatttaggcagtgtgttaggccatccttgcattgctataaagaaatatttaggctgggcgtggtggctcacgcctgtaatcccagcactttgggaggctgaagcgtgtggatcacctgaggtcaggagttcaagaccagcctggccaacatggtaaaaccccatctctact

SEQ ID NO: 291182 - DNA, 1140 bp, Homo sapiens
aaccttaggctaggtacgaggctgggtggtgattttcactgtgctgaccagctgttcaagccacttcagtttgagtacaacataccaacatgacactactcacccacaaaggacagcattgggatcaggctttcagatgacctctaagatttttcccatttattgtactcttgttacaaagtactttttaacacatgcagtcaatggctataaaaactattctgtgtacagattctacccagactttggtcttagaattatgttctaattaaggagcctggttacaggttcattctgtcttgagttcttttctgtgctgcctttctatcatggataaatgctaacgctgtattttttcactccaacttgagatagagtagttttgtacccattgccttttttttcttttaaactctctttttttttttttcctgatgtgtaactttctagtaagataatttcatcatgtatgttactggctatttcatgatttcatgtatcacatcgtatattttgccttgaagattcctgaaataaggaaatctataataacttcagatagcctacatgtccccatttagtggagacctcttgaatgctatttgaattctgcagtatcatttttatgaccattctcctttgaggaatactatgcccaggtacatgctctatcagtgtgccgggagagtggattcttttcttcactgcagagtcatcacactgttggaatagtctgctcttttacatgctcaggtagggaaaataggaccaaatatatttccacagtgcctaccactgtgtcatgtttacagtgagagtttaaatattgttgatgtcctgactctgtgagctcatagggagtatcttcatagtaatgacatttgatcagccataaaatttacattatgttcatatgcacccaaaaaagctagtcaggtaatgaatacccttgaagtgaatagcaattttgatttaggcagtgtgttaggccatccttgcattgctataaagaaatatttaggctgggcgtggtggctcacgcctgtaatcccagcactttgggaggctgaagcgtgtggatcacctgaggtcaggagttcaagaccagcctggccaacatggtaaaaccccatctctact

SEQ ID NO: 291183 - DNA, 3290 bp, Homo sapiens
gccgcgcggcgcgggggaggagaccttcatctgttcacgcggtagcgcggattgcggttcgcggcgcgcgccaccggggaaggagcggtgggccgaggggttggaggtggggccccaggaggacctcgggctgtgggccgggagagcggagtcggggagtggggcgggggagcgaggtggcgccggggagcctgggatatggcgcggccagacgatgaggagggggcggcggtggcgcccggacacccgctcgcgaaaggatacctcccgttgccgaggggcgcgcccgttgggaaggagagcgtggagctgcagaacgggcccaaagcgggcaccttcccggtgaatggggccccccgggacagcctcgctgccgcctcgggagttctgggcgggcctcagactccactggccccagaagaggagacccaggcccggctgctgcctgcgggcgcgggagctgagaccccgggggccgagagcagcccgctgccccttacggcgctctccccgcggcgcttcgtggtgctcctgatcttcagcctgtactcgctggtcaacgcctttcagtggatccagtacagcatcattagcaacgtcttcgagggcttctacggtgtcaccttgctgcacatcgactggctgtccatggtgtacatgctggcctacgtgcccctcatcttcccggccacctggctgctggacaccagaggcctgcggctcaccgccctgctgggctccggcctcaactgcctgggtgcctggatcaagtgcggcagtgtgcagcagcatctcttctgggtcaccatgttgggccagtgcttgtgctcggtggcccaggtgttcatcctgggcttgccctcccgcatcgcctcagtgtggtttgggcccaaagaggtgtccacagcttgtgccaccgccgtgctgggcaatcagcttggaactgcagttggctttttgctaccaccagttttagtacccaacacacagaatgacacaaatctcctggcttgtaatatcagcaccatgttttatggaacatcagctgttgccacacttttatttattttaacagcaattggtatcatgactggtgccttttattcagtctcaacgttattaaatcaaatgatattgacatattatgagggagaagaagtcaatgctggaaggattgggctaacgctagtagtagctggaatggtgggctctattctttgtggcttatggctggattatactaaaacatacaaacagactactctgatagtttatattttgtcttttattggaatggttatctttactttcacattggaccttagatatattatcatcgtgtttgttactggaggggtgcttggcttcttcatgactggttacctccctttgggttttgaatttgctgttgaaatcacttaccctgaatctgaaggtacttcatctggtcttcttaatgcttctgcacagatatttggaattttgttcacattggctcaaggaaagctcacatcagactatggtcctaaggcagggaacatttttctctgtgtctggatgtttataggcatcatattaacagcattaatcaagtctgatctgcgaagacacaacataaatataggaattacaaatgttgatgttaaagctataccagctgacagtcccacagaccaagaaccaaaaacggttatgttgtccaagcagtcagaatcagcaatttgaagagaaaggcaaagttactgtcctgtagtaattggggacaatgtgatcatccttggagagagatgtgagcaccaaggctgggtttgtatgtggtgggggaataaacacacttacttgaaaattaccatatgaactctaaatgcataattattattttgcttaattgttaaattaagggaaattttcttaaaattcttctgtttacatcatgttaacactactgtttatctaattagtatccggtttttagtctcatattgtatctgaaagtaagcttcttgacgtttactttttaaaagtcgatgtttttcttttttgtagaaaatggaagcttagaagactttttaaagtgataatatggggtgttcagtccccataagatataatagttcatgcagtttatatattaaagtatccagtggaactaaatgtacaatatattcctaattggctgcctttttcactgtgctgaccagctgttcaagccacttcagtttgagtacaacataccaacatgacactactcacccacaaaggacagcattgggatcaggctttcagatgacctctaagatttttcccatttattgtactcttgttacaaagtactttttaacacatgcagtcaatggctataaaaactattctgtgtacagattctacccagactttggtcttagaattatgttctaattaaggagcctggttacaggttcattctgtcttgagttcttttctgtgctgcctttctatcatggataaatgctaacgctgtattttttcactccaacttgagatagagtagttttgtacccattgccttttttttcttttaaactctctttttttttttttcctgatgtgtaactttctagtaagataatttcatcatgtatgttactggctatttcatgatttcatgtatcacatcgtatattttgccttgaagattcctgaaataaggaaatctataataacttcagatagcctacatgtccccatttagtggagacctcttgaatgctatttgaattctgcagtatcatttttatgaccattctcctttgaggaatactatgcccaggtacatgctctatcagtgtgccgggagagtggattcttttcttcactgcagagtcatcacactgttggaatagtctgctcttttacatgctcaggtagggaaaataggaccaaatatatttccacagtgcctaccactgtgtcatgtttacagtgagagtttaaatattgttgatgtcctgactctgtgagctcatagggagtatcttcatagtaatgacatttgatcagccataaaatttacattatgttcatatgcacccaaaaaagctagtcaggtaatgaatacccttgaagtgaatagcaattttgatttaggcagtgtgttaggccatccttgcattgctataaagaaatatttaggctgggcgtggtggctcacgcctgtaatcccagcactttgggaggctgaagcgtgtggatcacctgaggtcaggagttcaagaccagcctggccaacatggtaaaaccccatctctact

SEQ ID NO: 291184 - DNA, 1878 bp, Homo sapiens
gccgcgcggcgcgggggaggagaccttcatctgttcacgcggtagcgcggattgcggttcgcggcgcgcgccaccggggaaggagcggtgggccgaggggttggaggtggggccccaggaggacctcgggctgtgggccgggagagcggagtcggggagtggggcgggggagcgaggtggcgccggggagcctgggatatggcgcggccagacgatgaggagggggcggcggtggcgcccggacacccgctcgcgaaaggatacctcccgttgccgaggggcgcgcccgttgggaaggagagcgtggagctgcagaacgggcccaaagcgggcaccttcccggtgaatggggccccccgggacagcctcgctgccgcctcgggagttctgggcgggcctcagactccactggccccagaagaggagacccaggcccggctgctgcctgcgggcgcgggagctgagaccccgggggccgagagcagcccgctgccccttacggcgctctccccgcggcgcttcgtggtgctcctgatcttcagcctgtactcgctggtcaacgcctttcagtggatccagtacagcatcattagcaacgtcttcgagggcttctacggtgtcaccttgctgcacatcgactggctgtccatggtgtacatgctggcctacgtgcccctcatcttcccggccacctggctgctggacaccagaggcctgcggctcaccgccctgctgggctccggcctcaactgcctgggtgcctggatcaagtgcggcagtgtgcagcagcatctcttctgggtcaccatgttgggccagtgcttgtgctcggtggcccaggtgttcatcctgggcttgccctcccgcatcgcctcagtgtggtttgggcccaaagaggtgtccacagcttgtgccaccgccgtgctgggcaatcagcttggaactgcagttggctttttgctaccaccagttttagtacccaacacacagaatgacacaaatctcctggcttgtaatatcagcaccatgttttatggaacatcagctgttgccacacttttatttattttaacagcaattgccttcaaagaaaaacctcggtatccaccaagtcaggctcaagcagctcttcaagacagtccccctgaagagtactcctataagaaatcaataagaaacctgtttaaaaacattccttttgtccttctgttgatcacttatggtatcatgactggtgccttttattcagtctcaacgttattaaatcaaatgatattgacatattatgagggagaagaagtcaatgctggaaggattgggctaacgctagtagtagctggaatggtgggctctattctttgtggcttatggctggattatactaaaacatacaacttcttcatgactggttacctccctttgggttttgaatttgctgttgaaatcacttaccctgaatctgaaggtacttcatctggtcttcttaatgcttctgcacagatatttggaattttgttcacattggctcaaggaaagctcacatcagactatggtcctaaggcagggaacatttttctctgtgtctggatgtttataggcatcatattaacagcattaatcaagtctgatctgcgaagacacaacataaatataggaattacaaatgttgatgttaaagctataccagctgacagtcccacagaccaagaaccaaaaacggttatgttgtccaagcagtcagaatcagcaatttgaagagaaaggcaaagttactgtcctgtagtaattggggacaatgtgatcatccttggagagagatgtgagcaccaaggctgggtttgtatgtggtgggggaataaacacacttacttgaaaatt

SEQ ID NO: 291185 - DNA, 228 bp, Homo sapiens
caagaaggggtgaactttgaaaaacaaagattcattactgaacaggtaagagtgatgatttttgtattcctaggagaatcagacaaaatactaacagctttgttgtttttgttttagacagactactctgatagtttatattttgtcttttattggaatggttatctttactttcacattggaccttagatatattatcatcgtgtttgttactggaggggtgcttgg

SEQ ID NO: 291186 - DNA, 387 bp, Homo sapiens
tcaatgataatagttccttactttgacatagcaacttcaaaatattcacttatttggtcattagaataagcccgagaggcagaatgattgcatcagtatgtgattgtgactttctggtagttctttctgtaattctggatttattttcctagcttcttcatgactggttacctccctttgggttttgaatttgctgttgaaatcacttaccctgaatctgaaggtacttcatctggtcttcttaatgcttctgcacaggtaaacctctgatttctctaaacctgagatgattattataccagatattctagtgagtaatgagtttgaccatggttttatttgttgttgttgttgttttgttttttggagacagagtcttgctcagcc

SEQ ID NO: 291187 - DNA, 1989 bp, Homo sapiens
gccgcgcggcgcgggggaggagaccttcatctgttcacgcggtagcgcggattgcggttcgcggcgcgcgccaccggggaaggagcggtgggccgaggggttggaggtggggccccaggaggacctcgggctgtgggccgggagagcggagtcggggagtggggcgggggagcgaggtggcgccggggagcctgggatatggcgcggccagacgatgaggagggggcggcggtggcgcccggacacccgctcgcgaaaggatacctcccgttgccgaggggcgcgcccgttgggaaggagagcgtggagctgcagaacgggcccaaagcgggcaccttcccggtgaatggggccccccgggacagcctcgctgccgcctcgggagttctgggcgggcctcagactccactggccccagaagaggagacccaggcccggctgctgcctgcgggcgcgggagctgagaccccgggggccgagagcagcccgctgccccttacggcgctctccccgcggcgcttcgtggtgctcctgatcttcagcctgtactcgctggtcaacgcctttcagtggatccagtacagcatcattagcaacgtcttcgagggcttctacggtgtcaccttgctgcacatcgactggctgtccatggtgtacatgctggcctacgtgcccctcatcttcccggccacctggctgctggacaccagaggcctgcggctcaccgccctgctgggctccggcctcaactgcctgggtgcctggatcaagtgcggcagtgtgcagcagcatctcttctgggtcaccatgttgggccagtgcttgtgctcggtggcccaggtgttcatcctgggcttgccctcccgcatcgcctcagtgtggtttgggcccaaagaggtgtccacagcttgtgccaccgccgtgctgggcaatcagcttggaactgcagttggctttttgctaccaccagttttagtacccaacacacagaatgacacaaatctcctggcttgtaatatcagcaccatgttttatggaacatcagctgttgccacacttttatttattttaacagcaattgccttcaaagaaaaacctcggtatccaccaagtcaggctcaagcagctcttcaagacagtccccctgaagagtactcctataagaaatcaataagaaacctgtttaaaaacattccttttgtccttctgttgatcacttatggtatcatgactggtgccttttattcagtctcaacgttattaaatcaaatgatattgacatattatgagggagaagaagtcaatgctggaaggattgggctaacgctagtagtagctggaatggtgggctctattctttgtggcttatggctggattatactaaaacatacaaacagactactctgatagtttatattttgtcttttattggaatggttatctttactttcacattggaccttagatatattatcatcgtgtttgttactggaggggtgcttggcttcttcatgactggttacctccctttgggttttgaatttgctgttgaaatcacttaccctgaatctgaaggtacttcatctggtcttcttaatgcttctgcacagatatttggaattttgttcacattggctcaaggaaagctcacatcagactatggtcctaaggcagggaacatttttctctgtgtctggatgtttataggcatcatattaacagcattaatcaagtctgatctgcgaagacacaacataaatataggaattacaaatgttgatgttaaagctataccagctgacagtcccacagaccaagaaccaaaaacggttatgttgtccaagcagtcagaatcagcaatttgaagagaaaggcaaagttactgtcctgtagtaattggggacaatgtgatcatccttggagagagatgtgagcaccaaggctgggtttgtatgtggtgggggaataaacacacttacttgaaaatt

SEQ ID NO: 291188 - DNA, 3320 bp, Homo sapiens
gccgcgcggcgcgggggaggagaccttcatctgttcacgcggtagcgcggattgcggttcgcggcgcgcgccaccggggaaggagcggtgggccgaggggttggaggtggggccccaggaggacctcgggctgtgggccgggagagcggagtcggggagtggggcgggggagcgaggtggcgccggggagcctgggatatggcgcggccagacgatgaggagggggcggcggtggcgcccggacacccgctcgcgaaaggatacctcccgttgccgaggggcgcgcccgttgggaaggagagcgtggagctgcagaacgggcccaaagcgggcaccttcccggtgaatggggccccccgggacagcctcgctgccgcctcgggagttctgggcgggcctcagactccactggccccagaagaggagacccaggcccggctgctgcctgcgggcgcgggagctgagaccccgggggccgagagcagcccgctgccccttacggcgctctccccgcggcgcttcgtggtgctcctgatcttcagcctgtactcgctggtcaacgcctttcagtggatccagtacagcatcattagcaacgtcttcgagggcttctacggtgtcaccttgctgcacatcgactggctgtccatggtgtacatgctggcctacgtgcccctcatcttcccggccacctggctgctggacaccagaggcctgcggctcaccgccctgctgggctccggcctcaactgcctgggtgcctggatcaagtgcggcagtgtgcagcagcatctcttctgggtcaccatgttgggccagtgcttgtgctcggtggcccaggtgttcatcctgggcttgccctcccgcatcgcctcagtgtggtttgggcccaaagaggtgtccacagcttgtgccaccgccgtgctgggcaatcagcttggaactgcagttggctttttgctaccaccagttttagtacccaacacacagaatgacacaaatctcctggcttgtaatatcagcaccatgttttatggaacatcagctgttgccacacttttatttattttaacagcaattgccttcaaagaaaaacctcggtatccaccaagtcaggctcaagcagctcttcaagacagtccccctgaagagtactcctataagaaatcaataagaaacctgtttaaaaacattccttttgtccttctgttgatcacttatggtatcatgactggtgccttttattcagtctcaacgttattaaatcaaatgatattgacatattatgagggagaagaagtcaatgctggaaggattgggctaacgctagtagtagctggaatggtgggctctattctttgtggcttatggctggattatactaaaacatacaacttcttcatgactggttacctccctttgggttttgaatttgctgttgaaatcacttaccctgaatctgaaggtacttcatctggtcttcttaatgcttctgcacagatatttggaattttgttcacattggctcaaggaaagctcacatcagactatggtcctaaggcagggaacatttttctctgtgtctggatgtttataggcatcatattaacagcattaatcaagtctgatctgcgaagacacaacataaatataggaattacaaatgttgatgttaaagctataccagctgacagtcccacagaccaagaaccaaaaacggttatgttgtccaagcagtcagaatcagcaatttgaagagaaaggcaaagttactgtcctgtagtaattggggacaatgtgatcatccttggagagagatgtgagcaccaaggctgggtttgtatgtggtgggggaataaacacacttacttgaaaattaccatatgaactctaaatgcataattattattttgcttaattgttaaattaagggaaattttcttaaaattcttctgtttacatcatgttaacactactgtttatctaattagtatccggtttttagtctcatattgtatctgaaagtaagcttcttgacgtttactttttaaaagtcgatgtttttcttttttgtagaaaatggaagcttagaagactttttaaagtgataatatggggtgttcagtccccataagatataatagttcatgcagtttatatattaaagtatccagtggaactaaatgtacaatatattcctaattggctgcctttttcactgtgctgaccagctgttcaagccacttcagtttgagtacaacataccaacatgacactactcacccacaaaggacagcattgggatcaggctttcagatgacctctaagatttttcccatttattgtactcttgttacaaagtactttttaacacatgcagtcaatggctataaaaactattctgtgtacagattctacccagactttggtcttagaattatgttctaattaaggagcctggttacaggttcattctgtcttgagttcttttctgtgctgcctttctatcatggataaatgctaacgctgtattttttcactccaacttgagatagagtagttttgtacccattgccttttttttcttttaaactctctttttttttttttcctgatgtgtaactttctagtaagataatttcatcatgtatgttactggctatttcatgatttcatgtatcacatcgtatattttgccttgaagattcctgaaataaggaaatctataataacttcagatagcctacatgtccccatttagtggagacctcttgaatgctatttgaattctgcagtatcatttttatgaccattctcctttgaggaatactatgcccaggtacatgctctatcagtgtgccgggagagtggattcttttcttcactgcagagtcatcacactgttggaatagtctgctcttttacatgctcaggtagggaaaataggaccaaatatatttccacagtgcctaccactgtgtcatgtttacagtgagagtttaaatattgttgatgtcctgactctgtgagctcatagggagtatcttcatagtaatgacatttgatcagccataaaatttacattatgttcatatgcacccaaaaaagctagtcaggtaatgaatacccttgaagtgaatagcaattttgatttaggcagtgtgttaggccatccttgcattgctataaagaaatatttaggctgggcgtggtggctcacgcctgtaatcccagcactttgggaggctgaagcgtgtggatcacctgaggtcaggagttcaagaccagcctggccaacatggtaaaaccccatctctact

SEQ ID NO: 291189 - DNA, 446 bp, Homo sapiens
gctataatattcctttatattcatatcataaattttattaggtcaagaagctaactagtttgttcaaagtgatgatgaaaaggttagtgaaataaaagagagttatcaatagcagcttttaaagaagcttctctttgttcaaggaaacattttaatgtccaatgtaatgagaactttcttccttttctagtcttagagtgtttcttatggtgaagtccatattttcttgaaactctttatatgtattggtgatgggaattgctaaacagttattacacttgtttccaacaggaaaatccacatgcagacactcaattgaaggagtgggtttaaatccagctggaggaatggaactgcaaccagttgcaaaaataagaatgtcttccattgttgttgtagatttaccatctgaaaaaatttaccaataaaagagtaaaagaaacaaa

SEQ ID NO: 291190 - DNA, 567 bp, Homo sapiens
ggaataatcttaaaacctatctgacgctaaagttggacactgtggcatgcacctgtaatcccagctattcaggaagttgaggcatgaggatcacttgagcccaggagttcaacagcagcctgggtaacatagacttgtctctaaaaaagacttatctgagaagtacagatggagttttgctcttgttgcccaggctggagtgcaatggcgtgatctcggctcactgcaacctcatttaatcctgatgaatctgttgagatgtactttggagtcataaacacaatgccagaattttcatattgaggtgacacactaagatgaaatcgcgggaaatgttcaggaagaacttgcaatggcctcaatatactgatgctgttgcctgtgtactgtctggctgaaagcatagattaaggaaaatccacatgcagacactcaattgaaggagtgggtttaaatccagctggaggaatggaactgcaaccagttgcaaaaataagaatgtcttccattgttgttgtagatttaccatctgaaaaaatttaccaataaaagagtaaaagaaacaaa

SEQ ID NO: 291191 - DNA, 447 bp, Homo sapiens
ttttttaggattttatttttcctccatcatcattcactaccccaaagcaaaataaactaatcaactctagtaaaactgattaaccaaatgactatatgtgtagaactaggggtcagatcttgtaagactattccatcgacagctaattgacatgtatttgggagatttcccaaaacacaataagcatctgtccacagatgaaatcgcgggaaatgttcaggaagaacttgcaatggcctcaatatactgatgctgttgcctgtgtactgtctggctgaaagcatagattaaggaaaatccacatgcagacactcaattgaaggagtgggtttaaatccagctggaggaatggaactgcaaccagttgcaaaaataagaatgtcttccattgttgttgtagatttaccatctgaaaaaatttaccaataaaagagtaaaagaaacaaa

SEQ ID NO: 291192 - DNA, 486 bp, Homo sapiens
tgctaaaaacatgtagaagccttcagcagtcttgttttcttttcccaagttagagcaatcagtagagccagagagagttaatgttaacaaaataatctctggataatataggcaatacctatttatgcagacttgcagttcacaggcaaagaaaaggaaagtaaaataaaaatatcttttattttggcaagaatttactatctcaactctaaatgctattacagcaatcattaaacatctattgtttcaacagatgtactttggagtcataaacacaatgccagaattttcatattgaggtgacacactaaggtgagtcttcaacttccactatcaaattaaccaacaagagaaataaaatacaagggagaatctatttaaaactagggaacacatataaatacttcttgataacgatggaagtgaacagaactaagggatgtgaggaagaggaaaggaaactacccattggctccaccaacatct

SEQ ID NO: 291193 - DNA, 116 bp, Homo sapiens
tcaggtgggtggacttcaggcaagagcagagcagcctagaagtctgtccacccccaagggcctgagcttgggtattttagaacaggaaaagaaccacccttacttagcagtgtgca

SEQ ID NO: 291194 - DNA, 497 bp, Homo sapiens
gaatcaacacacatcattttgggaagaataaccaattcaaaaacaatcttcactatatacactgggacaacagcaagtggtgaatgagtctcttcccccttctctgtcccccacagggaaatatgtttgggagccctactctctgcccagtaattccacttctagaaagttatcctgagagaacaaccacaggtgagctcaaagactcatttataatcacgagaaactggacacaaacacaagtctacagtgagctggctaagcaaatcctaggatgggaatctggataatcagatagcaaacacctcagaggactagttattaaaatggatgaatgggcatgaaacagtaacgagtggggaaaaaaaagactggaaatacagatataaaaacattaacagtgactgtatctgattatggataatgtttttttcttctttgggcttttactattttctaaatttaaccatgtgtaaatatacctttcataatcataa

SEQ ID NO: 291195 - DNA, 475 bp, Homo sapiens
gaatcaacacacatcattttgggaagaataaccaattcaaaaacaatcttcactatatacactgggacaacagcaagtggtgaatgagtctcttcccccttctctgtcccccacagggaaatatgtttgggagccctactctctgcccagtaattccacttctagaaagttatcctgagagaacaaccacagtcaggttgtgaaggacccgtgaagatcctcactgtgaaagtgttaaccgcatgaaagaagacaggaagatctcgccagataagaccatgaaaggggaatgaaccagtacccagtgtccagctgtgctatgcagagaggcgtgattcttctccggccatctgctgtccgagtctcaacttgtttcttcaaaagattctggcaaagcagagttacataaatgaatgcaaaagttttggccaactatttccaaatattaaaaaataaagtctctttttttcctggt

SEQ ID NO: 291196 - DNA, 456 bp, Homo sapiens
gacatactgagataattagaatgccttatttcaaaagaaactatagcacttattttgttagtaggcttattgctttgcaagtccaagaattttcgtgatgtgtgcttttaatttttataacagagtccagttggcaactttgtgggaagcaatgtagtatagtggaaagagcacgggctttcaagtaagacctaggttcgaatcccggctccaacactcaccagctgtgtgaccttgagtgagtgagttactcaatttcctcatctataaaatggggatgataatatacctatttcatagggttgttgtgaggataaatgagataatgtatgtaaatcatctaagtacaatgcctggaatatagtaggcatttggtaattgttaattatttgttcagaatcaattaaaataattttcctaatgtaaatatagtaattctctttagacaaaaaagaa

SEQ ID NO: 291197 - DNA, 418 bp, Homo sapiens
gtcactggctagcaaggtagactcacacttcgccctacacacacccggagcttcacccagctctgggctgtgagaagaccctgtgctctcttgtccccatgtttcctaagagtgatgtacctgattcccttgggtttccctaacccatgactggtctgagagaagtggaaattcacacctctgttttttctcctccgactagcaccagcaggactttttgaccttcatcccagcatgctccccatcccacctccttcccatcacttgggagttcctgagtcccttcccctgctctgcaccagagcaaagaaggggtcaattgaagggatttccatcttttagaaacatacactgagcactgtgcaagaacagcagaaatagaaaccattgccccacccttaaaaagttcacacttttc

SEQ ID NO: 291198 - DNA, 814 bp, Homo sapiens
cctcactcaccaagggccgcgccggggttctgcactgtcactgcgctgcggttccccgccttagggattctcacacggttccacggctccaggcccggcggcaccgcagccatcatgcgaggcggggggacttacgaaaggcggagctacgcgagagcacgtccagcgaccggagtctggaacagttcctcgttctttctctggctctggatctgcgtccctgacagtcttaaagaggacagacctttcattcatgaggatgaccctcaacttggcccagtccatgtttcctcagactcaagccttgcattcctggcagaaagactgaagaaatgatgctgtgctcttctcagtgcttcgcgtcaggaggctctactctctcaaccggccccactattgacgcagcctcatcctgtcacctgggctggagtgcaatggcgtgatctcggctcactgcaaccttcatctcccgtgttcaaacgattctcctgcctcagcctcccaagtagctggaattacaagcacctgccaccatgcccagctaatttttgtatttttaggagagatggggtttcaccatgttggccaggctggtctcaaactcctgacctggtgatctgcccaccttggcctcccaaagttctgggattacaggcgtgagccactgtgcccggccgagactgttaagattttattgccctagtaccagcagttatgatgttctatagaacttatagctgagcccatgccagggattccccagctcactgaagctggaaggaagccaactggactgccgagttcactttaggaa

SEQ ID NO: 291199 - DNA, 734 bp, Homo sapiens
cctcactcaccaagggccgcgccggggttctgcactgtcactgcgctgcggttccccgccttagggattctcacacggttccacggctccaggcccggcggcaccgcagccatcatgcgaggcggggggacttacgaaaggcggagctacgcgagagcacgtccagcgaccggagtctggaacagttcctcgttctttctctggctctggatctgcgtccctgacagtcttaaagaggacagacctttcattcatgaggatgaccctcaacttggcccagtccatgtttcctcagactcaagccttgcattcctggcagaaagactgaagaaatgatgctgtgctcttctcagtgcttcgcgtcaggaggctctactctctcaaccggccccactattgggcatcttgagacaatgttctgcctacacaaaattctaaactgagaggagtggctcagaagctctactaacatggaatcacatgtgggttgcaggaggctggagactatcccagcagcacatggcacaaagcaagaaccagccccggacaggacgccattccatcacaggtgcactcacacccaccagcactcactcagactgggcccatttagacacaccgattcatccaacatgcatatctctggggtgtggaaggaaactggattacctggtgaaaacccacacagacatggggagaacatgccagctctacacaaacagtggcctggtggg

SEQ ID NO: 291200 - DNA, 3184 bp, Homo sapiens
  misc_feature (3)..(4): n is a, c, g, or t
  misc_feature (6)..(7): n is a, c, g, or t
ggnngnngcgcgccctggtgacagctcgcgcgtgctgatgatggcgattctttggatgggaagagaccttgaaaggacctctagtttatcctgcaactccagtcaatatcccacttaaatcattccaggtaatagagaagaggaaacctaaccaatgactgtggaataatatggaagaagatggaaaaaacttgtttaatgggttgagaaagtggcgacttctataagacatggatagatgcaaacatgtagggcggttacggctcgcccaggaccactccatcctgaaccctcagaagtggtgctgcttagagtgtgccaccaccgagtccgtgtgggcctgcctcaagtgctcccacgtggcctgcggccgctatattgaggaccacgccctgaaacactttgaggagacgggacacccgctagccatggaagtccgggatctctacgtgttctgttacctgtgcaaggactacgtgctcaatgataacccagagggggacctgaagctgctaagaagctccctcctggcggtccggggccagaaacaggacacgccggtgagacgtgggcggacgctgcggtccatggcttcgggtgaggacgtggtcctgccgcagcgcgctcctcagggacagccgcagatgctcacggctctgtggtaccggcgtcagcgcctgctggccaggacgctgcggctgtggttcgagaagagctcccggggccaggcgaagctggagcagcggcggcaggaggaggccctggagcgcaagaaggaggaggcgcggaggcggcggcgcgaggtgaaacggcggctgctggaggagctggccagcacccctccgcgcaagagtgcacggctgctcctgcacacgccccgcgacgcgggcccggctgcctcgcgccccgccgccctccctacctcacgcagagtgcccgccgccacactcaagctgcgtcgccagccggccatggccccaggcgtcacgggcctgcgcaacctgggcaacacctgctacatgaactccatcctccaggtgctcagccacctccagaagttccgagaatgtttcctcaaccttgacccttccaaaacggaacatctgtttcccaaagccaccaacgggaagactcagctttctggcaagccaaccaacagctcggccacggagctgtccttgagaaatgacagggccgaggcatgcgagcgggagggcttctgctggaacggcagggcctccattagtcggagtctggagctcatccagaacaaggagccgagttcaaagcacatttccctctgccgtgaactgcacaccctcttccgagtcatgtggtccgggaagtgggccctagtgtcgcccttcgccatgctccactcagtgtggagcctgatccctgccttccgcggctacgaccaacaggacgcgcaggaatttctctgcgagctgctgcacaaggtgcagcaggaactcgagtctgagggcaccacacgccggatcctcatccccttctcccagaggaagctcaccaaacaggtcttaaaggtggtgaataccatatttcatgggcagctgctcagtcaggtcacatgtatatcatgcaattacaaatccaataccattgagcccttttgggacctatccctggaattccctgaacgctatcactgcatagaaaaggggtttgtccctttgaatcaaacagagtgcttgctcactgagatgctggccaaattcacagagacagaggccctggaagggagaatctacgcttgtgaccagtgtaacagcaaacgacgaaaatccaatcccaaaccccttgttctgagtgaagctagaaagcagttaatgatctacagactacctcaggttctccggctgcaccttaaaagattcaggtggtctggccgtaatcatcgagagaagattggggtccatgtcgtctttgaccaggtattaaccatggaaccttactgctgcagggacatgctctcctctcttgacaaagagacctttgcctatgatctctccgcagtggtcatgcatcacgggaaagggtttggctcaggacactacacagcctattgctacaacacagagggaggtgcgtgcgctttactctgtggggtgggggacacggaaaggggttgatttgtccacattttattgttttccttttatttccatcccatggattacctagagggaaattacatacatcaaaaatccagtggaaagaattgtgaaaattgggttgggcgccgtggctcacacctgtaatcctagcgctttgggaggccgcggtgggtggatcacctgaggtcaggagttcgagaccagcctggccaacatggttaaaccccgtctctactaaaatagtacaaaaattagccgggcgtggtggtgggcactggtaatcccaggtactcaagaggctgaggcaggagaatcgcttgaacctgggaggcagaggttgcagtgagccaagattatgccactgcacttcagcctgggtgacagagcaagactcttatctcaaaaaaaataaaaagaattatgaaagttggattcaaattttgggtatattactaagtaacaacatatggttgttctaagaattaaaaggaactgacatgtaaaagtgcttagaacaggacctaggccctgtgcaatggctcacacctgtaattccaacactttgggaggcagaggcgggaggattgcttgaggccgagggttcaagactagcctgggcaacatagcgagactgcatctctacaaaaaatttaaaaattatccaggtgtaatggtgtgcacctgtgatcctagctacttgggaggctgaggtgggagaattgctcaagcccaggagtttgaagttgcaatgagctatgatttcaccactgcattctagcctgggcaacagagtgagatcctgactcaaataaataaataagaagagcagttgcctaccacatagtacttattcagtcagtgttagaggatattgtagtattatcaaaagtattggttattgataatattactgttttgtggtaatgctacttctgcacaccccagtttccttcttggttatgcagaaacagtagaacctgtgtaacctcaaggagatattgtatgaatctcactagccgcagcttataataaagccgagaacattt

SEQ ID NO: 291201 - DNA, 1555 bp, Homo sapiens
tcttctttctttctttttatatatatatatgtactccaatttaaaacttttaattaaaaagtaaactttaatgtcgaaaatgcaaacttggggaggacagaaagataacacacaaggctgtcacttcatacttggatggttgcacagcagtcgcgcagaggcactcctcacttcccagacggggcggcggccaggcagaggggctccttacttcccagatggggcggcggacgcccggccgggaacatattttcttaaagtttcttcgaagaggaactctgtgttagctgttaggatgacacaatagagaattttctttcctcttacagtggtggcccagcttgccgatctcaagcttaatactgagtcctacttcctgataatgtgtcagaaaccttaaacatgcttatacatataatttgtcaaaatcataaactctagatgtctttggctaatatattgtccttgtgtacagaatatataccgcttttaaagaagcatgccgcttacatataggtcataaacccacttagcacaaaagagtcaccacctcatgccatcttgttatatattttgcttacgcaaaaataattttagcttttgatattcgagtatttttgttaccatgaatttgtgtgttttttcctgagtttcagattgtatgcaaatataatgtgtaatttttaagacctaaaacaaatgcagaagtgctttttttcaggaagtaaacctttaatacttccatttgtagatcagtctacccataagtgactgactctttggttactcttagctgaaaagaaagatcacagttttttttttactcttacatcagttttaaggacttgtagggagtttaatgcattgtaatttactggtccttttttgaatttgtattacaattaatgaaattgcttttttcatgccatgtattagcccaatcttacagattgtttcccacttgtaggtaatagagaagaggaaacctaaccaatgactgtggaataatatggaagaagatggaaaaaacttgtttaatgggtaagaaataaaaactgtaataaaacattattaatgaaagctatttataataatagtattatgtgtggctgaggttggcatactatgagggtaattgatcagttactgttttgtctaactccattctgaactttcaccgcttgctttcatcttaaccttgtgaattttttagtaccacgaattaacttaagctaagaggggacacagccatatttgaagttaaaatgggacctaaagaccagcaaccatactgaaacaagtctagggtaggtcttgaaacttggtggtaagatagagatcgtatctgtcatgacctgtcaagagtaattatctaccccttctttttctccaaatatgtcagttgctatgatgtttgtcccaccacgaggatcccgttcatttgagcaagtgcagatgtgtgtctggtggtaatcaaatagaattctgctttgggaggttgaggtgggaggatggcttgaggcccggaattcttttatttatttatttagttttg

SEQ ID NO: 291202 - DNA, 2302 bp, Homo sapiens
  misc_feature (1)..(3): n is a, c, g, or t
  misc_feature (176)..(176): n is a, c, g, or t
  misc_feature (282)..(282): n is a, c, g, or t
  misc_feature (1014)..(1014): n is a, c, g, or t
  misc_feature (1306)..(1306): n is a, c, g, or t
  misc_feature (1924)..(1924): n is a, c, g, or t
  misc_feature (2002)..(2002): n is a, c, g, or t
  misc_feature (2164)..(2164): n is a, c, g, or t
  misc_feature (2183)..(2183): n is a, c, g, or t
  misc_feature (2188)..(2188): n is a, c, g, or t
  misc_feature (2244)..(2244): n is a, c, g, or t
nnncattgtgtacactcagatgcacaaagatactttttttttcaaagttgggtaaattttggattgacacttttgctggtgtttgtataaataacaaagattaggtttatgacttttgtagtagttaacaaagattagattttgatttgtggatttgagcaacaatggttaatgtntaatttagaaaactctttctgcattcagctactgtgttagtggcatagtatttagtttatggtttgtttcctggattgtattaagcaagtgttcaaggttactagntgtatttagcaatttaacagaggatcttggtaaaaattactatttttgccactacattttaaaaggattagtttgataatgttgactttcaagatgaagaataactttgatatgaggcacttgtttcagtgagatgtgtgtgcatattctttttatagatgtgtttgggctggcgttagtagtaggacgtactctgtatggtattgccatgtttataatgtaattgtaattgtttaatgctcaatatctttatataagtgattatagacttatttgatattggtaaagaaggaaatataaactgtaagatcagccaagggaaagagtgagtcctgccttttgtttctgtatgcaacggccttagtgtgctaaacactgagtctcattgtcaatggttatttctcagtcgctatttctaaaactgaaaatggatttttaaaaattgagataatactatttatcaataaggactccaatgataaatttaagctttattttcatttgttcatcaagtacagttctacccaatttaactttattttggttataatcttatttgctaagcaaaagcttttaagtttatatttttagatttattaggctgtacataattaaatgttttcctggttaaccgtagattctttggatgggaagagaccttgaaaggacctctagtttatcctgcaactccagtcaatatcccacttaaatcattccaggtagataaaaatntatcctattttttaaaacaaatcttcagcagtaatgtggtaacctctgtagataatctttgcaagcatttaataatttctctatcaggagagtctgccttctctccaaccagcacatgtttaatgctatatatgtgtttgtttcctcttgccccattctcaatttttgagtaaaaaatacctgtgtacttttgtatttataagaccttagttcttcataaacttaataatagtagccaacacacatataatgcttttgtgccagatacttctgtaagcactgcaaattgtancttgtttactcctcaatggcaatcctgtgaggtaggtactattactattctcattttacaggtgatgaaatagagggtccttgagattaaatgatttgcccaaggttatactcagacattcctacaactatttatttggtaattatcttatattacaaataatactatgttttgtaacccagtgatacatttaatctttattttagttcaaaagctagaattctaccaagtggtgggatgggattccagcctttgcattttgccagcagagtctgtgctctggttttgcctctggcttgcctgttgtgaagttctccctcaccaagttcttcttcagattcaacacttaacaagtcttgtttgccaatctttaaaaattatccctgtagtcctgttactaaccttttatccagttcctttctagatgaggaacctggggtaaacaccgtaacgattatgtataatgtaaagattacatcaaggttgttgcatgcttctattttttcattccaaaattgtatttacaaaacaaacccaaaccagtaaaaaatgccttattgcattgcagattccccatccacctttttagctagaaaactgccctggacttgttatatnctatgacacatttatagttgaaagattattgctgtttgaagaaaaatggattttttctgatttcagatttcagtgcanatatccataagcaaaatctgtttataccctcactaattttttagtattttctctttatgtgtgcctaagtgatataccaatttccccatatattattattatgattattatgattattattgaaaccctgtctctgctaaaaatacaaaaattagctgggcntgatggtgcatgcccgtantcccngctacttgggtggttgaggaacaagatttgcttgaacctgggaggcggaggttgcngtgagctgagattgtgccactccattccagcctggatgacagagtgacactgcatctc

SEQ ID NO: 291203 - DNA, 3103 bp, Homo sapiens
  misc_feature (3)..(4): n is a, c, g, or t
  misc_feature (6)..(7): n is a, c, g, or t
ggnngnngcgcgccctggtgacagctcgcgcgtgctgatgatggcgattctttggatgggaagagaccttgaaaggacctctagtttatcctgcaactccagtcaatatcccacttaaatcattccaggtaatagagaagaggaaacctaaccaatgactgtggaataatatggaagaagatggaaaaaacttgtttaatgggttgagaaagtggcgacttctataagacatggatagatgcaaacatgtagggcggttacggctcgcccaggaccactccatcctgaaccctcagaagtggtgctgcttagagtgtgccaccaccgagtccgtgtgggcctgcctcaagtgctcccacgtggcctgcggccgctatattgaggaccacgccctgaaacactttgaggagacgggacacccgctagccatggaagtccgggatctctacgtgttctgttacctgtgcaaggactacgtgctcaatgataacccagagggggacctgaagctgctaagaagctccctcctggcggtccggggccagaaacaggacacgccggtgagacgtgggcggacgctgcggtccatggcttcgggtgaggacgtggtcctgccgcagcgcgctcctcagggacagccgcagatgctcacggctctgtggtaccggcgtcagcgcctgctggccaggacgctgcggctgtggttcgagaagagctcccggggccaggcgaagctggagcagcggcggcaggaggaggccctggagcgcaagaaggaggaggcgcggaggcggcggcgcgaggtgaaacggcggctgctggaggagctggccagcacccctccgcgcaagagtgcacggctgctcctgcacacgccccgcgacgcgggcccggctgcctcgcgccccgccgccctccctacctcacgcagagtgcccgccgccacactcaagctgcgtcgccagccggccatggccccaggcgtcacgggcctgcgcaacctgggcaacacctgctacatgaactccatcctccaggtgctcagccacctccagaagttccgagaatgtttcctcaaccttgacccttccaaaacggaacatctgtttcccaaagccaccaacgggaagactcagctttctggcaagccaaccaacagctcggccacggagctgtccttgagaaatgacagggccgaggcatgcgagcgggagggcttctgctggaacggcagggcctccattagtcggagtctggagctcatccagaacaaggagccgagttcaaagcacatttccctctgccgtgaactgcacaccctcttccgagtcatgtggtccgggaagtgggccctagtgtcgcccttcgccatgctccactcagtgtggagcctgatccctgccttccgcggctacgaccaacaggacgcgcaggaatttctctgcgagctgctgcacaaggtgcagcaggaactcgagtctgagggcaccacacgccggatcctcatccccttctcccagaggaagctcaccaaacaggtcttaaaggtggtgaataccatatttcatgggcagctgctcagtcaggtcacatgtatatcatgcaattacaaatccaataccattgagcccttttgggacctatccctggaattccctgaacgctatcactgcatagaaaaggggtttgtccctttgaatcaaacagagtgcttgctcactgagatgctggccaaattcacagagacagaggccctggaagggagaatctacgcttgtgaccagtgtaacagtgagtgctgtgtggaggagggggcgtagtggggaagaataattggaatatcagtttaaggtgctgctttgtcctctttagtcaaaagtaacactaatgatattgaatggttctaaagcatcttttaaagatctttttctcccatttttctaaaaacaaaaaaacatggacttgttttaattatgtattaaaaaacaaaacaaggctgggcgttgtggctcacgcctgtaatcccagcattttgggaggccaaggcggacagatcacttgaggtcaggagtttgagaccagcctgaccaacatggtgaaaccctgtctctactaaaaatacaaaaattagctgggcatagtggcagatgcctgtaatcccagctactcgggaggctgaggcaggagaatcggttgaacccaggaagcggagggtgcagtgagccaagatcgcgccattgcactccagcctgggcaacagagcaagactccgtttcaaacaacaacaacaacaacaaatgaaacaaagacctaggagttgattgacctcctgattgacattagttgtcatcttggaagggattttaaagttgtggctcctgaaatggggactctgagaatgttagtacttagcttcttagtgctgtggggctgctgcttaaattcatgaatgtagagtctgacagttcttacttaatctaaacccagatggtatagcctttctgaagggtgcgatatcagaaaagcaagcttttgtactgaactggtagacttaatgtctgtcaaaagtgatgctaaagattggtacagtggaaccaagaaagcaagtcttaaggtgcattgctcagtggcagcttcatgaaatattttctgcattttgtttttattgttcacatgcctgaaaagttcacatttcagagagggtcatacggaagtatttctgtgttgtctgtaattttaaaatggaactcttacatatggttacagaggcatgttatcagggtccttccatcttgccacactaacacttaatgcttctgctaatccagtatggacagaggaaatgcagaacaaatatgtggatgcttatgtttggggtttgtggcatatatagatttggaaactaaaagtataaagttaatggactgtgcagagacctagaaatcaattttcagtcacataatagtttagattaccagttttgaagaaaaaaaaaatcttaggccaggtgcagtggctcatgcctgtaatcccaggactttgggagaccccaaggtgggcgccactgcactccagcctgggtgacagagcgagatgctgtctc

SEQ ID NO: 291204 - DNA, 3025 bp, Homo sapiens
  misc_feature (3)..(4): n is a, c, g, or t
  misc_feature (6)..(7): n is a, c, g, or t
ggnngnngcgcgccctggtgacagctcgcgcgtgctgatgatggcgattctttggatgggaagagaccttgaaaggacctctagtttatcctgcaactccagtcaatatcccacttaaatcattccaggtaatagagaagaggaaacctaaccaatgactgtggaataatatggaagaagatggaaaaaacttgtttaatgggttgagaaagtggcgacttctataagacatggatagatgcaaacatgtagggcggttacggctcgcccaggaccactccatcctgaaccctcagaagtggtgctgcttagagtgtgccaccaccgagtccgtgtgggcctgcctcaagtgctcccacgtggcctgcggccgctatattgaggaccacgccctgaaacactttgaggagacgggacacccgctagccatggaagtccgggatctctacgtgttctgttacctgtgcaaggactacgtgctcaatgataacccagagggggacctgaagctgctaagaagctccctcctggcggtccggggccagaaacaggacacgccggtgagacgtgggcggacgctgcggtccatggcttcgggtgaggacgtggtcctgccgcagcgcgctcctcagggacagccgcagatgctcacggctctgtggtaccggcgtcagcgcctgctggccaggacgctgcggctgtggttcgagaagagctcccggggccaggcgaagctggagcagcggcggcaggaggaggccctggagcgcaagagtgcacggctgctcctgcacacgccccgcgacgcgggcccggctgcctcgcgccccgccgccctccctacctcacgcagagtgcccgccgccacactcaagctgcgtcgccagccggccatggccccaggcgtcacgggcctgcgcaacctgggcaacacctgctacatgaactccatcctccaggtgctcagccacctccagaagttccgagaatgtttcctcaaccttgacccttccaaaacggaacatctgtttcccaaagccaccaacgggaagactcagctttctggcaagccaaccaacagctcggccacggagctgtccttgagaaatgacagggccgaggcatgcgagcgggagggcttctgctggaacggcagggcctccattagtcggagtctggagctcatccagaacaaggagccgagttcaaagcacatttccctctgccgtgaactgcacaccctcttccgagtcatgtggtccgggaagtgggccctagtgtcgcccttcgccatgctccactcagtgtggagcctgatccctgccttccgcggctacgaccaacaggacgcgcaggaatttctctgcgagctgctgcacaaggtgcagcaggaactcgagtctgagggcaccacacgccggatcctcatccccttctcccagaggaagctcaccaaacaggtcttaaaggtggtgaataccatatttcatgggcagctgctcagtcaggtcacatgtatatcatgcaattacaaatccaataccattgagcccttttgggacctatccctggaattccctgaacgctatcactgcatagaaaaggggtttgtccctttgaatcaaacagagtgcttgctcactgagatgctggccaaattcacagagacagaggccctggaagggagaatctacgcttgtgaccagtgtaacagtgagtgctgtgtggaggagggggcgtagtggggaagaataattggaatatcagtttaaggtgctgctttgtcctctttagtcaaaagtaacactaatgatattgaatggttctaaagcatcttttaaagatctttttctcccatttttctaaaaacaaaaaaacatggacttgttttaattatgtattaaaaaacaaaacaaggctgggcgttgtggctcacgcctgtaatcccagcattttgggaggccaaggcggacagatcacttgaggtcaggagtttgagaccagcctgaccaacatggtgaaaccctgtctctactaaaaatacaaaaattagctgggcatagtggcagatgcctgtaatcccagctactcgggaggctgaggcaggagaatcggttgaacccaggaagcggagggtgcagtgagccaagatcgcgccattgcactccagcctgggcaacagagcaagactccgtttcaaacaacaacaacaacaacaaatgaaacaaagacctaggagttgattgacctcctgattgacattagttgtcatcttggaagggattttaaagttgtggctcctgaaatggggactctgagaatgttagtacttagcttcttagtgctgtggggctgctgcttaaattcatgaatgtagagtctgacagttcttacttaatctaaacccagatggtatagcctttctgaagggtgcgatatcagaaaagcaagcttttgtactgaactggtagacttaatgtctgtcaaaagtgatgctaaagattggtacagtggaaccaagaaagcaagtcttaaggtgcattgctcagtggcagcttcatgaaatattttctgcattttgtttttattgttcacatgcctgaaaagttcacatttcagagagggtcatacggaagtatttctgtgttgtctgtaattttaaaatggaactcttacatatggttacagaggcatgttatcagggtccttccatcttgccacactaacacttaatgcttctgctaatccagtatggacagaggaaatgcagaacaaatatgtggatgcttatgtttggggtttgtggcatatatagatttggaaactaaaagtataaagttaatggactgtgcagagacctagaaatcaattttcagtcacataatagtttagattaccagttttgaagaaaaaaaaaatcttaggccaggtgcagtggctcatgcctgtaatcccaggactttgggagaccccaaggtgggcgccactgcactccagcctgggtgacagagcgagatgctgtctc

SEQ ID NO: 291205 - DNA, 716 bp, Homo sapiens
  misc_feature (3)..(4): n is a, c, g, or t
  misc_feature (6)..(7): n is a, c, g, or t
ggnngnngcgcgccctggtgacagctcgcgcgtgctgatgatggcgattctttggatgggaagagaccttgaaaggacctctagtttatcctgcaactccagtcaatatcccacttaaatcattccaggtaatagagaagaggaaacctaaccaatgactgtggaataatatggaagaagatggaaaaaacttgtttaatgggtaagaaataaaaactgtaataaaacattattaatgaaagctatttataataatagtattatgtgtggctgaggttggcatactatgagggtaattgatcagttactgttttgtctaactccattctgaactttcaccgcttgctttcatcttaaccttgtgaattttttagtaccacgaattaacttaagctaagaggggacacagccatatttgaagttaaaatgggacctaaagaccagcaaccatactgaaacaagtctagggtaggtcttgaaacttggtggtaagatagagatcgtatctgtcatgacctgtcaagagtaattatctaccccttctttttctccaaatatgtcagttgctatgatgtttgtcccaccacgaggatcccgttcatttgagcaagtgcagatgtgtgtctggtggtaatcaaatagaattctgctttgggaggttgaggtgggaggatggcttgaggcccggaattcttttatttatttatttagttttg

SEQ ID NO: 291206 - DNA, 669 bp, Homo sapiens
cggcttgggcggaggaggatgtcaccccagcgggtgggagctgggatcgaaccccgccgcggcctcccgcttccacccaaccccgacggggccatgggcagtggggaagggggacgcgcgcccagtgacgtcatcgaatcccgagtccggccttcgccgctgtcgtcacagaggggctgcgctgcgtcactgcattcctcccctgacgtcagcgcaagaagccagaaactggcccaccgagcgagagagaagtctggagcggagtcttcctttctcgcctttttaatttgagacggggtttcgccatgttggccagactggtctcgaactcctgacctcagctgatccacctgcctaggcctcacaaagtgctggaattataggtgtgagccaccgtgcccggcctgatctcattggatctttgcagcaatttgatgaattgggtgttctcgttatccccaggtgacaggcaactgaggcccagaagaaggttggtaatatgttaatgagttaagacatagcgccagggttcatgtgggtgagggtctgacaccagacagatgaagggtcgtcggctacagtgacttgagtacccgagctgggccagatttggacccgatggtgtgaggaacctccacccctctaatgctggcagaaaggagtttgggg

SEQ ID NO: 291207 - DNA, 618 bp, Homo sapiens
cggcttgggcggaggaggatgtcaccccagcgggtgggagctgggatcgaaccccgccgcggcctcccgcttccacccaaccccgacggggccatgggcagtggggaagggggacgcgcgcccagtgacgtcatcgaatcccgagtccggccttcgccgctgtcgtcacagaggggctgcgctgcgtcactgcattcctcccctgacgtcagcgcaagaagccagaaactggcccaccgagcgagagagaagtctggagcggagtcttcctttctcgcctttttaatttggtaagacatgtaaagtgtacgcaagagcggactacaactcccaatcggccttgcgtgccgagcatgcgcacggcctccagccagagagcgcggcaaacctttggtagattgacgtccctttagtcgaaccaggaggccggttttacatcggcaaaccaatcccgtcctcacgagtcctacccctttattcttaaccagctgcttccctgccggagtgacgggcccggctgcctttgagggttcagtttcttttgatggacattcatactgataaatcagatcgccgggaagtccagagggtgttgaaaagcgtgcatcggaactaata

SEQ ID NO: 291208 - DNA, 379 bp, Homo sapiens
ggctcactgcaacttccatctccacggctcaagggattctcctgacctcagctgatccacctgcctaggcctcacaaagtgctggaattataggtgtgagccaccgtgcccggcctgatctcattggatctttgcagcaatttgatgaattgggtgttctcgttatccccaggtgacaggcaactgaggcccagaagaaggttggtaatatgttaatgagttaagacatagcgccagggttcatgtgggtgagggtctgacaccagacagatgaagggtcgtcggctacagtgacttgagtacccgagctgggccagatttggacccgatggtgtgaggaacctccacccctctaatgctggcagaaaggagtttgggg

SEQ ID NO: 291209 - DNA, 2065 bp, Homo sapiens
tggcacgaggcaggatgtaccaaacgtggaagcggagacggggaggtctgggggtgccacgcaagtccctttcctcccgacacgagtgcagtaaagaaaaacggttatgagcgtaaagtgacagcctcggccgatgggaatagggggaagtccgacactgagcaacgaacgcattcccgcgcctccaaaacctaggccgggggcgctggaaacccttaccggcacccggccaccgcggcagacgcttgctcctgccacgcccccccccctcccccgcatcacgtgtctgcactcgctttcctcggattcccggatgtggttgccaaaacaaaggggatttggtgatggaggctttgttagaaggaatacaaaatcgagggcatggtgggggatttttgacatcttgtgaagcagaactacaggagctcatgaaacagattgacataatggtggctcataaaaaatctgaatgggaaggacgtacacatgctctagaaacttgcttgaaaatccgtgaacaggaacttaagagtcttaggagtcagttggatgtgacacataaggaggttggaatgttgcatcagcaggtagaagaacatgaaaaaatcaagcaagagatgaccatggaatataagcaggagttgaagaaactacatgaagaattatgcatactgaagagaagctatgaaaagcttcagaaaaagcaaatgagggaattcagaggaaataccaaaaatcacagggaagatcggtctgaaattgagaggttaactgcaaaaatagaggaattccgtcagaaatcgctggactgggagaagcaacgcttgatttatcagcaacaggtatcttcactggaggcacaaaggaaggctctggctgaacaatcagagataattcaggctcagcttgtcaatcggaaacagaaattagagtctgtggaactttctagccaatcagaaattcaacacttaagcagtaaactggagcgggctaatgacactatctgtgccaatgagttggaaatagagcgcctcaccatgagggtcaatgacttggttggaaccagtatgactgtcctacaggagcagcagcaaaaagaagaaaaattgagggaatctgaaaaactattagaggctctgcaggaagaaaagagagaattgaaggcagctcttcagtctcaagaaaatctcatacatgaggccagaatacaaaaggagaagttacaagaaaaagtaaaggcaactaacactcaacatgctgtagaagctataagtttggaatctgtgagtgcaacgtgtaaacagctgagccaagaactaatggaaaaatatgaagaactgaagaggatggaagcacataacaatgaatacaaagcagagattaagaagttgaaagaacagattttacagggtgaacaaagttacagttctgcactagaaggaatgaagatggaaatctcccatctaactcaggagttacatcagcgagatatcactattgcttccaccaaaggttcttcctcagacatggaaaagcgactcagagcagagatgcaaaaggcagaagacaaagcagtagagcataaggagattttggatcagctggagtcactcaaattagaaaatcgtcatctttctgaaatggtgatgaaattggaattgggtttacatgagtgttccttgcctgtatctccccttggttcaatagctaccagatttttggaagaggaggaactgaggtctcatcacattctagagcgcttggatgcccatattgaagaactaaaaagagagagtgaaaagacagtgagacaattcacagccttaaagtagcctcttaaaaaaatcacaatcttggaaataaaaataaacaccaaagagttactgtcatctgaagtagcagctctttaaaaacatgaagagataaaattataaaaatgatacatctaaagcagtggtgaagaaagctgaaaaactgatacttttgataggcattttctctgcactggtttgtttaaaggacttcttccagcaataagttgaaagaataaaccactttgctagac

SEQ ID NO: 291210 - DNA, 1892 bp, Homo sapiens
tggcacgaggcaggatgtaccaaacgtggaagcggagacggggaggtctgggggtgccacgcaagtccctttcctcccgacacgagtgcagtaaagaaaaacggttatgagcgtaaagtgacagcctcggccgatgggaatagggggaagtccgacactgagcaacgaacgcattcccgcgcctccaaaacctaggccgggggcgctggaaacccttaccggcacccggccaccgcggcagacgcttgctcctgccacgcccccccccctcccccgcatcacgtgtctgcactcgctttcctcggattcccggatgtggttgccaaaacaaaggggatttggtgatggaggctttgttagaaggaatacaaaatcgagggcatggtgggggatttttgacatcttgtgaagcagaactacaggagctcatgaaacagattgacataatggtggctcataaaaaatctgaatgggaaggacgtacacatgctctagaaacttgcttgaaaatccgtgaacaggaacttaagagtcttaggagtcagttggatgtgacacataaggaggttggaatgttgcatcagcaggtagaagaacatgaaaaaatcaagcaagagatgaccatggaatataagcaggagttgaagaaactacatgaagaattatgcatactgaagagaagctatgaaaagcttcagaaaaagcaaatgagggaattcagaggaaataccaaaaatcacagggaagatcggtctgaaattgagaggttaactgcaaaaatagaggaattccgtcagaaatcgctggactgggagaagcaacgcttgatttatcagcaacaggtatcttcactggaggcacaaaggaaggctctggctgaacaatcagagataattcaggctcagcttgtcaatcggaaacagaaattagagtctgtggaactttctagccaatcagaaattcaacacttaagcagtaaactggagcgggctaatgacactatctgtgccaatgagttggaaatagagcgcctcaccatgagggtcaatgacttggttggaaccagtatgactgtcctacaggagcagcagcaaaaagaagaaaaattgagggaatctgaaaaactattagaggctctgcaggaagaaaagagagaattgaaggcagctcttcagtctcaagaaaatctcatacatgaggccagaatacaaaaggagaagttacaagaaaaagtaaaggcaactaacactcaacatgctgtagaagctataagtttggaatctgtgagtgcaacgtgtaaacagctgagccaagaactaatggaaaaatatgaagaactgaagaggatggaagcacataacaatgaatacaaagcagagattaagaagttgaaagaacagattttacagggtgaacaaagttacagttctgcactagaaggaatgaagatggaaatctcccatctaactcaggagttacatcagcgagatatcactattgcttccaccaaaggttcttcctcagacatggaaaagcgactcagagcagagatgcaaaaggcagaagacaaagcagtagagcataaggagattttggatcagctggagtcactcaaattagaaaatcgtcatctttctgaaatggtgatgaaattggaattgggtttacatgagagatggggttttaccatgttgtccagtctggttttgaacttcgggattcaagcaatccgccagcctcagcgtcccaaagtgctggaattacaagtgtgagctaccaccactggcagttaagaattttaacaatttgtcaatgaaacaagaatctcaattagagtctttatatacaatctgtactgttggaattttcaaataaatattgtaaagaaaatt

SEQ ID NO: 291211 - DNA, 2098 bp, Homo sapiens
aacggcgggaaggctcaggggcgtgcttgcggcaaccctgtaaccgccggtgcgcaagttggaggggcaaggggctgccgtgtcctggtctggaggcggcccaggctgccttggtgattctggcttcgcggcctcatggcttgcggccggtttgcgcaacggcctgcgaaccaccaggcgtgtcaccgccggcttgggtccgccccgaagcccagtccctcggcctggcccgctatgccctgcacactggcggagtctggcgtggcgcagcccggcgtggggttcggccccgccaggtggtcagcccttcctcggagtccaggtggctgggggcgcttcggagagtggccagttgccaaaacaaaggggatttggtgatggaggctttgttagaaggaatacaaaatcgagggcatggtgggggatttttgacatcttgtgaagcagaactacaggagctcatgaaacagattgacataatggtggctcataaaaaatctgaatgggaaggacgtacacatgctctagaaacttgcttgaaaatccgtgaacaggaacttaagagtcttaggagtcagttggatgtgacacataaggaggttggaatgttgcatcagcaggtagaagaacatgaaaaaatcaagcaagagatgaccatggaatataagcaggagttgaagaaactacatgaagaattatgcatactgaagagaagctatgaaaagcttcagaaaaagcaaatgagggaattcagaggaaataccaaaaatcacagggaagatcggtctgaaattgagaggttaactgcaaaaatagaggaattccgtcagaaatcgctggactgggagaagcaacgcttgatttatcagcaacaggtatcttcactggaggcacaaaggaaggctctggctgaacaatcagagataattcaggctcagcttgtcaatcggaaacagaaattagagtctgtggaactttctagccaatcagaaattcaacacttaagcagtaaactggagcgggctaatgacactatctgtgccaatgagttggaaatagagcgcctcaccatgagggtcaatgacttggttggaaccagtatgactgtcctacaggagcagcagcaaaaagaagaaaaattgagggaatctgaaaaactattagaggctctgcaggaagaaaagagagaattgaaggcagctcttcagtctcaagaaaatctcatacatgaggccagaatacaaaaggagaagttacaagaaaaagtaaaggcaactaacactcaacatgctgtagaagctataagtttggaatctgtgagtgcaacgtgtaaacagctgagccaagaactaatggaaaaatatgaagaactgaagaggatggaagcacataacaatgaatacaaagcagagattaagaagttgaaagaacagattttacagggtgaacaaagttacagttctgcactagaaggaatgaagatggaaatctcccatctaactcaggagttacatcagcgagatatcactattgcttccaccaaaggttcttcctcagacatggaaaagcgactcagagcagagatgcaaaaggcagaagacaaagcagtagagcataaggagattttggatcagctggagtcactcaaattagaaaatcgtcatctttctgaaatggtgatgaaattggaattgggtttacatgagtgttccttgcctgtatctccccttggttcaatagctaccagatttttggaagaggaggaactgaggtctcatcacattctagagcgcttggatgcccatattgaagaactaaaaagagagagtgaaaagacagtgagacaattcacagccttaaagtagcctcttaaaaaaatcacaatcttggaaataaaaataaacaccaaagagttactgtcatctgaagtagcagctctttaaaaacatgaagagataaaattataaaaatgatacatctaaagcagtggtgaagaaagctgaaaaactgatacttttgataggcattttctctgcactggtttgtttaaaggacttcttccagcaataagttgaaagaataaaccactttgctagac

SEQ ID NO: 291212 - DNA, 1808 bp, Homo sapiens
ggctgcctttcggtggagagaggatgttgcatgcaggaagctctatgagcctgtcttcaggattgccaaaacaaaggggatttggtgatggaggctttgttagaaggaatacaaaatcgagggcatggtgggggatttttgacatcttgtgaagcagaactacaggagctcatgaaacagattgacataatggtggctcataaaaaatctgaatgggaaggacgtacacatgctctagaaacttgcttgaaaatccgtgaacaggaacttaagagtcttaggagtcagttggatgtgacacataaggaggttggaatgttgcatcagcaggtagaagaacatgaaaaaatcaagcaagagatgaccatggaatataagcaggagttgaagaaactacatgaagaattatgcatactgaagagaagctatgaaaagcttcagaaaaagcaaatgagggaattcagaggaaataccaaaaatcacagggaagatcggtctgaaattgagaggttaactgcaaaaatagaggaattccgtcagaaatcgctggactgggagaagcaacgcttgatttatcagcaacaggtatcttcactggaggcacaaaggaaggctctggctgaacaatcagagataattcaggctcagcttgtcaatcggaaacagaaattagagtctgtggaactttctagccaatcagaaattcaacacttaagcagtaaactggagcgggctaatgacactatctgtgccaatgagttggaaatagagcgcctcaccatgagggtcaatgacttggttggaaccagtatgactgtcctacaggagcagcagcaaaaagaagaaaaattgagggaatctgaaaaactattagaggctctgcaggaagaaaagagagaattgaaggcagctcttcagtctcaagaaaatctcatacatgaggccagaatacaaaaggagaagttacaagaaaaagtaaaggcaactaacactcaacatgctgtagaagctataagtttggaatctgtgagtgcaacgtgtaaacagctgagccaagaactaatggaaaaatatgaagaactgaagaggatggaagcacataacaatgaatacaaagcagagattaagaagttgaaagaacagattttacagggtgaacaaagttacagttctgcactagaaggaatgaagatggaaatctcccatctaactcaggagttacatcagcgagatatcactattgcttccaccaaaggttcttcctcagacatggaaaagcgactcagagcagagatgcaaaaggcagaagacaaagcagtagagcataaggagattttggatcagctggagtcactcaaattagaaaatcgtcatctttctgaaatggtgatgaaattggaattgggtttacatgagtgttccttgcctgtatctccccttggttcaatagctaccagatttttggaagaggaggaactgaggtctcatcacattctagagcgcttggatgcccatattgaagaactaaaaagagagagtgaaaagacagtgagacaattcacagccttaaagtagcctcttaaaaaaatcacaatcttggaaataaaaataaacaccaaagagttactgtcatctgaagtagcagctctttaaaaacatgaagagataaaattataaaaatgatacatctaaagcagtggtgaagaaagctgaaaaactgatacttttgataggcattttctctgcactggtttgtttaaaggacttcttccagcaataagttgaaagaataaaccactttgctagac

SEQ ID NO: 291213 - DNA, 2011 bp, Homo sapiens
tggcacgaggcaggatgtaccaaacgtggaagcggagacggggaggtctgggggtgccacgcaagtccctttcctcccgacacgagtgcagtaaagaaaaacggttatgagcgtaaagtgacagcctcggccgatgggaatagggggaagtccgacactgagcaacgaacgcattcccgcgcctccaaaacctaggccgggggcgctggaaacccttaccggcacccggccaccgcggcagacgcttgctcctgccacgcccccccccctcccccgcatcacgtgtctgcactcgctttcctcggattcccggatgtggttgccaaaacaaaggggatttggtgatggaggctttgttagaaggaatacaaaatcgagggcatggtgggggatttttgacatcttgtgaagcagaactacaggagctcatgaaacagattgacataatggtggctcataaaaaatctgaatgggaaggacgtacacatgctctagaaacttgcttgaaaatccgtgaacaggaacttaagagtcttaggagtcagttggatgtgacacataaggaggttggaatgttgcatcagcaggtagaagaacatgaaaaaatcaagcaagagatgaccatggaatataagcaggagttgaagaaactacatgaagaattatgcatactgaagagaagctatgaaaagcttcagaaaaagcaaatgagggaattcagaggaaataccaaaaatcacagggaagatcggtctgaaattgagaggttaactgcatatcagcaacaggtatcttcactggaggcacaaaggaaggctctggctgaacaatcagagataattcaggctcagcttgtcaatcggaaacagaaattagagtctgtggaactttctagccaatcagaaattcaacacttaagcagtaaactggagcgggctaatgacactatctgtgccaatgagttggaaatagagcgcctcaccatgagggtcaatgacttggttggaaccagtatgactgtcctacaggagcagcagcaaaaagaagaaaaattgagggaatctgaaaaactattagaggctctgcaggaagaaaagagagaattgaaggcagctcttcagtctcaagaaaatctcatacatgaggccagaatacaaaaggagaagttacaagaaaaagtaaaggcaactaacactcaacatgctgtagaagctataagtttggaatctgtgagtgcaacgtgtaaacagctgagccaagaactaatggaaaaatatgaagaactgaagaggatggaagcacataacaatgaatacaaagcagagattaagaagttgaaagaacagattttacagggtgaacaaagttacagttctgcactagaaggaatgaagatggaaatctcccatctaactcaggagttacatcagcgagatatcactattgcttccaccaaaggttcttcctcagacatggaaaagcgactcagagcagagatgcaaaaggcagaagacaaagcagtagagcataaggagattttggatcagctggagtcactcaaattagaaaatcgtcatctttctgaaatggtgatgaaattggaattgggtttacatgagtgttccttgcctgtatctccccttggttcaatagctaccagatttttggaagaggaggaactgaggtctcatcacattctagagcgcttggatgcccatattgaagaactaaaaagagagagtgaaaagacagtgagacaattcacagccttaaagtagcctcttaaaaaaatcacaatcttggaaataaaaataaacaccaaagagttactgtcatctgaagtagcagctctttaaaaacatgaagagataaaattataaaaatgatacatctaaagcagtggtgaagaaagctgaaaaactgatacttttgataggcattttctctgcactggtttgtttaaaggacttcttccagcaataagttgaaagaataaaccactttgctagac

SEQ ID NO: 291214 - DNA, 1839 bp, Homo sapiens
cagcaatcctattctttgcttctggtaatttattaatttacattaatgtcatttaattatttacttcaggtagatttacatctgctatatttttacatgaaaaagatgaaaagccacttgaacatatcttctgtttttttaatgatctgttcttctttataggggatttttgacatcttgtgaagcagaactacaggagctcatgaaacagattgacataatggtggctcataaaaaatctgaatgggaaggacgtacacatgctctagaaacttgcttgaaaatccgtgaacaggaacttaagagtcttaggagtcagttggatgtgacacataaggaggttggaatgttgcatcagcaggtagaagaacatgaaaaaatcaagcaagagatgaccatggaatataagcaggagttgaagaaactacatgaagaattatgcatactgaagagaagctatgaaaagcttcagaaaaagcaaatgagggaattcagaggaaataccaaaaatcacagggaagatcggtctgaaattgagaggttaactgcaaaaatagaggaattccgtcagaaatcgctggactgggagaagcaacgcttgatttatcagcaacaggtatcttcactggaggcacaaaggaaggctctggctgaacaatcagagataattcaggctcagcttgtcaatcggaaacagaaattagagtctgtggaactttctagccaatcagaaattcaacacttaagcagtaaactggagcgggctaatgacactatctgtgccaatgagttggaaatagagcgcctcaccatgagggtcaatgacttggttggaaccagtatgactgtcctacaggagcagcagcaaaaagaagaaaaattgagggaatctgaaaaactattagaggctctgcaggaagaaaagagagaattgaaggcagctcttcagtctcaagaaaatctcatacatgaggccagaatacaaaaggagaagttacaagaaaaagtaaaggcaactaacactcaacatgctgtagaagctataagtttggaatctgtgagtgcaacgtgtaaacagctgagccaagaactaatggaaaaatatgaagaactgaagaggatggaagcacataacaatgaatacaaagcagagattaagaagttgaaagaacagattttacagggtgaacaaagttacagttctgcactagaaggaatgaagatggaaatctcccatctaactcaggagttacatcagcgagatatcactattgcttccaccaaaggttcttcctcagacatggaaaagcgactcagagcagagatgcaaaaggcagaagacaaagcagtagagcataaggagattttggatcagctggagtcactcaaattagaaaatcgtcatctttctgaaatggtgatgaaattggaattgggtttacatgagtgttccttgcctgtatctccccttggttcaatagctaccagatttttggaagaggaggaactgaggtctcatcacattctagagcgcttggatgcccatattgaagaactaaaaagagagagtgaaaagacagtgagacaattcacagccttaaagtagcctcttaaaaaaatcacaatcttggaaataaaaataaacaccaaagagttactgtcatctgaagtagcagctctttaaaaacatgaagagataaaattataaaaatgatacatctaaagcagtggtgaagaaagctgaaaaactgatacttttgataggcattttctctgcactggtttgtttaaaggacttcttccagcaataagttgaaagaataaaccactttgctagac

SEQ ID NO: 291215 - DNA, 2353 bp, Homo sapiens
tggcacgaggcaggatgtaccaaacgtggaagcggagacggggaggtctgggggtgccacgcaagtccctttcctcccgacacgagtgcagtaaagaaaaacggttatgagcgtaaagtgacagcctcggccgatgggaatagggggaagtccgacactgagcaacgaacgcattcccgcgcctccaaaacctaggccgggggcgctggaaacccttaccggcacccggccaccgcggcagacgcttgctcctgccacgcccccccccctcccccgcatcacgtgtctgcactcgctttcctcggattcccggatgtgggtgagttcatttgctcgcgtgcaggggaagtctggagaaggcattgtttcaattattaaaagtgtgggggcagtgggcggaacaaacgcgccgactacagaggctggacgtaagcttagcggtggcgcgcgtgcgcagcgccggcccgagttgccaaaacaaaggggatttggtgatggaggctttgttagaaggaatacaaaatcgagggcatggtgggggatttttgacatcttgtgaagcagaactacaggagctcatgaaacagattgacataatggtggctcataaaaaatctgaatgggaaggacgtacacatgctctagaaacttgcttgaaaatccgtgaacaggaacttaagagtcttaggagtcagttggatgtgacacataaggaggttggaatgttgcatcagcaggtagaagaacatgaaaaaatcaagcaagagatgaccatggaatataagcaggagttgaagaaactacatgaagaattatgcatactgaagagaagctatgaaaagcttcagaaaaagcaaatgagggaattcagaggaaataccaaaaatcacagggaagatcggtctgaaattgagaggttaactgcaaaaatagaggaattccgtcagaaatcgctggactgggagaagcaacgcttgatttatcagcaacaggtatcttcactggaggcacaaaggaaggctctggctgaacaatcagagataattcaggctcagcttgtcaatcggaaacagaaattagagtctgtggaactttctagccaatcagaaattcaacacttaagcagtaaactggagcgggctaatgacactatctgtgccaatgagttggaaatagagcgcctcaccatgagggtcaatgacttggttggaaccagtatgactgtcctacaggagcagcagcaaaaagaagaaaaattgagggaatctgaaaaactattagaggctctgcaggaagaaaagagagaattgaaggcagctcttcagtctcaagaaaatctcatacatgaggccagaatacaaaaggagaagttacaagaaaaagtaaaggcaactaacactcaacatgctgtagaagctataaggccacgggaagaatctctggcagaaaagaagtacacctctcaagggcagggggacttagacagtgtgctctcccagttgaattttacccatactagtgaggaccttctgcaggcagaggtgacttgtcttgaaggcagtttggaatctgtgagtgcaacgtgtaaacagctgagccaagaactaatggaaaaatatgaagaactgaagaggatggaagcacataacaatgaatacaaagcagagattaagaagttgaaagaacagattttacagggtgaacaaagttacagttctgcactagaaggaatgaagatggaaatctcccatctaactcaggagttacatcagcgagatatcactattgcttccaccaaaggttcttcctcagacatggaaaagcgactcagagcagagatgcaaaaggcagaagacaaagcagtagagcataaggagattttggatcagctggagtcactcaaattagaaaatcgtcatctttctgaaatggtgatgaaattggaattgggtttacatgagtgttccttgcctgtatctccccttggttcaatagctaccagatttttggaagaggaggaactgaggtctcatcacattctagagcgcttggatgcccatattgaagaactaaaaagagagagtgaaaagacagtgagacaattcacagccttaaagtagcctcttaaaaaaatcacaatcttggaaataaaaataaacaccaaagagttactgtcatctgaagtagcagctctttaaaaacatgaagagataaaattataaaaatgatacatctaaagcagtggtgaagaaagctgaaaaactgatacttttgataggcattttctctgcactggtttgtttaaaggacttcttccagcaataagttgaaagaataaaccactttgctagac

SEQ ID NO: 291216 - DNA, 2287 bp, Homo sapiens
tggcacgaggcaggatgtaccaaacgtggaagcggagacggggaggtctgggggtgccacgcaagtccctttcctcccgacacgagtgcagtaaagaaaaacggttatgagcgtaaagtgacagcctcggccgatgggaatagggggaagtccgacactgagcaacgaacgcattcccgcgcctccaaaacctaggccgggggcgctggaaacccttaccggcacccggccaccgcggcagacgcttgctcctgccacgcccccccccctcccccgcatcacgtgtctgcactcgctttcctcggattcccggatgtgggtgagttcatttgctcgcgtgcaggggaagtctggagaaggcattgtttcaattattaaaagtgtgggggcagtgggcggaacaaacgcgccgactacagaggctggacgtaagcttagcggtggcgcgcgtgcgcagcgccggcccgaggggcccccaaacccggggccgcagagcagtaccagtccgtggcctgttaggaaccaggctacagagcaggagttgccaaaacaaaggggatttggtgatggaggctttgttagaaggaatacaaaatcgagggcatggtgggggatttttgacatcttgtgaagcagaactacaggagctcatgaaacagattgacataatggtggctcataaaaaatctgaatgggaaggacgtacacatgctctagaaacttgcttgaaaatccgtgaacaggaacttaagagtcttaggagtcagttggatgtgacacataaggaggttggaatgttgcatcagcaggtagaagaacatgaaaaaatcaagcaagagatgaccatggaatataagcaggagttgaagaaactacatgaagaattatgcatactgaagagaagctatgaaaagcttcagaaaaagcaaatgagggaattcagaggaaataccaaaaatcacagggaagatcggtctgaaattgagaggttaactgcaaaaatagaggaattccgtcagaaatcgctggactgggagaagcaacgcttgatttatcagcaacaggtatcttcactggaggcacaaaggaaggctctggctgaacaatcagagataattcaggctcagcttgtcaatcggaaacagaaattagagtctgtggaactttctagccaatcagaaattcaacacttaagcagtaaactggagcgggctaatgacactatctgtgccaatgagttggaaatagagcgcctcaccatgagggtcaatgacttggttggaaccagtatgactgtcctacaggagcagcagcaaaaagaagaaaaattgagggaatctgaaaaactattagaggctctgcaggaagaaaagagagaattgaaggcagctcttcagtctcaagaaaatctcatacatgaggccagaatacaaaaggagaagttacaagaaaaagtaaaggcaactaacactcaacatgctgtagaagctataagtttggaatctgtgagtgcaacgtgtaaacagctgagccaagaactaatggaaaaatatgaagaactgaagaggatggaagcacataacaatgaatacaaagcagagattaagaagttgaaagaacagattttacagggtgaacaaagttacagttctgcactagaaggaatgaagatggaaatctcccatctaactcaggagttacatcagcgagatatcactattgcttccaccaaaggttcttcctcagacatggaaaagcgactcagagcagagatgcaaaaggcagaagacaaagcagtagagcataaggagattttggatcagctggagtcactcaaattagaaaatcgtcatctttctgaaatggtgatgaaattggaattgggtttacatgagtgttccttgcctgtatctccccttggttcaatagctaccagatttttggaagaggaggaactgaggtctcatcacattctagagcgcttggatgcccatattgaagaactaaaaagagagagtgaaaagacagtgagacaattcacagccttaaagtagcctcttaaaaaaatcacaatcttggaaataaaaataaacaccaaagagttactgtcatctgaagtagcagctctttaaaaacatgaagagataaaattataaaaatgatacatctaaagcagtggtgaagaaagctgaaaaactgatacttttgataggcattttctctgcactggtttgtttaaaggacttcttccagcaataagttgaaagaataaaccactttgctagac

SEQ ID NO: 291217 - DNA, 2065 bp, Homo sapiens
aggctagtgcgaggcgggtgttgaatcggccgaggcaggggctgccgtgtcctggtctggaggcggcccaggctgccttggtgattctggcttcgcggcctcatggcttgcggccggtttgcgcaacggcctgcgaaccaccaggcgtgtcaccgccggcttgggtccgccccgaagcccagtccctcggcctggcccgctatgccctgcacactggcggagtctggcgtggcgcagcccggcgtggggttcggccccgccaggtggtcagcccttcctcggagtccaggtggctgggggcgcttcggagagtggccagttgccaaaacaaaggggatttggtgatggaggctttgttagaaggaatacaaaatcgagggcatggtgggggatttttgacatcttgtgaagcagaactacaggagctcatgaaacagattgacataatggtggctcataaaaaatctgaatgggaaggacgtacacatgctctagaaacttgcttgaaaatccgtgaacaggaacttaagagtcttaggagtcagttggatgtgacacataaggaggttggaatgttgcatcagcaggtagaagaacatgaaaaaatcaagcaagagatgaccatggaatataagcaggagttgaagaaactacatgaagaattatgcatactgaagagaagctatgaaaagcttcagaaaaagcaaatgagggaattcagaggaaataccaaaaatcacagggaagatcggtctgaaattgagaggttaactgcaaaaatagaggaattccgtcagaaatcgctggactgggagaagcaacgcttgatttatcagcaacaggtatcttcactggaggcacaaaggaaggctctggctgaacaatcagagataattcaggctcagcttgtcaatcggaaacagaaattagagtctgtggaactttctagccaatcagaaattcaacacttaagcagtaaactggagcgggctaatgacactatctgtgccaatgagttggaaatagagcgcctcaccatgagggtcaatgacttggttggaaccagtatgactgtcctacaggagcagcagcaaaaagaagaaaaattgagggaatctgaaaaactattagaggctctgcaggaagaaaagagagaattgaaggcagctcttcagtctcaagaaaatctcatacatgaggccagaatacaaaaggagaagttacaagaaaaagtaaaggcaactaacactcaacatgctgtagaagctataagtttggaatctgtgagtgcaacgtgtaaacagctgagccaagaactaatggaaaaatatgaagaactgaagaggatggaagcacataacaatgaatacaaagcagagattaagaagttgaaagaacagattttacagggtgaacaaagttacagttctgcactagaaggaatgaagatggaaatctcccatctaactcaggagttacatcagcgagatatcactattgcttccaccaaaggttcttcctcagacatggaaaagcgactcagagcagagatgcaaaaggcagaagacaaagcagtagagcataaggagattttggatcagctggagtcactcaaattagaaaatcgtcatctttctgaaatggtgatgaaattggaattgggtttacatgagtgttccttgcctgtatctccccttggttcaatagctaccagatttttggaagaggaggaactgaggtctcatcacattctagagcgcttggatgcccatattgaagaactaaaaagagagagtgaaaagacagtgagacaattcacagccttaaagtagcctcttaaaaaaatcacaatcttggaaataaaaataaacaccaaagagttactgtcatctgaagtagcagctctttaaaaacatgaagagataaaattataaaaatgatacatctaaagcagtggtgaagaaagctgaaaaactgatacttttgataggcattttctctgcactggtttgtttaaaggacttcttccagcaataagttgaaagaataaaccactttgctagac

SEQ ID NO: 291218 - DNA, 1913 bp, Homo sapiens
aaaggctcagggttgctcccgcgtttcggttcagtgacgtcgtaaattggaatgaggcatccagtttagcaacagcagagatgacgactctgcgattctgagagtccctggcgagcccgggctagcgaaaagtgggggcagaacgaactacatctcccatcgtgccaggaggcggtcccgcccgtttccccctgggagttgtagtctaaccccctcggatccaacagcaacctcagtgcgtgaactctgttatccagaaggcctcgccctgccgccgccgaagctggaattcgtcggctagtagttctcgccggcaactagaggaacctgttggcgtggcccagaaggcttagcgggattgcacgagccctcagattcatcgctaccccgaggctaagcgccatgcctcatattgacaacgatgtgaaactggacttcaaggatgtccttttgaggcccaaacgcagtacccttaagtctcgaagtgaggtggatctcacaagatccttttcatttcggaactcaaagcagacatactctggggttcccatcattgctgccaatatggatactgtgggcacctttgagatggccaaggttctctgtaagttctctctcttcactgctgtccataagcactatagcctcgttcagtggcaagagtttgctggccagaatcctgactgtcttgagcatctggctgccagctcaggcacaggctcttctgactttgagcagctggaacagatcctggaagctattccccaggtgaagtatatatgcctggatgtggcaaatggctactctgaacactttgttgaatttgtaaaagatgtacggaagcgcttcccccagcacaccatcatggcagggaatgtggtaacaggagagatggtagaagagctcatcctttctggggctgacatcatcaaagtgggaattgggccaggctctgtgtgtactactcggaagaaaactggagtggggtatccacagctcagcgcagtgatggagtgtgcagatgctgctcatggcctcaaaggccacatcatttcagatggaggttgcagctgtcctggggatgtggccaaggcttttggggcaggagctgacttcgtgatgctgggtggcatgctggctgggcacagtgagtcaggtggtgagctcatcgagagggatggcaagaagtacaagctcttctatggaatgagttctgaaatggccatgaagaagtatgctgggggcgtggctgagtacagagcctcagagggaaagacagtggaagttccttttaaaggagatgtggaacataccatccgagacatcctaggagggatccgctctacgtgtacctatgtgggagcagctaagctcaaagagttgagcaggagaactaccttcatccgagtcacccagcaggtgaatccaatcttcagtgaggcgtgctagacctgagcagttctaccctcccaaggcaccagtactctaccatggggcatcccaagtggggtcctcacccatcccagctactgcagctctgtattactttgtcatttcctgttgtctcactcctgagggctcctgcagtaactctgtacttctctatctgcacacacaaaatgcccaaggcactcactggggaggaagcaaggaagcaaacagtctgagaaaatgatgcaagaaaatcaaatgggaatctggggacccaacacaacatcctgaagattattaaaaggaaaagatgctgattggtacataaatcttttacatggccttggtctagaggaggcaggcttttagaatcatgttttgttaatccgcttcactaaattggaccttcacatatctaaaaagctctgaagtgtttgtatatttgaaatacctcaataaagagagagctcattgactgtaaa

SEQ ID NO: 291219 - DNA, 1872 bp, Homo sapiens
cccgtcgccaacattccttcgttcccctaaatcagcctcttgccccattgctctttgcaggggtagaagaaggaagtgtagcggggtaaggaatgcaccgtcagggtctctcacaaccctttcccagctctcctccccaacaaacagtacctgggatggagccctagggtaatcgcagccacgggatgggtcgaggtgacaggcttcagggaccacacttcggcctttgcccgaccttccacaacttaagcgaagagaggccaccagccgtaacagggcgttaaagcccaggggaagattggtccttatgacttcctgccttccagccctcagattcatcgctaccccgaggctaagcgccatgcctcatattgacaacgatgtgaaactggacttcaaggatgtccttttgaggcccaaacgcagtacccttaagtctcgaagtgaggtggatctcacaagatccttttcatttcggaactcaaagcagacatactctggggttcccatcattgctgccaatatggatactgtgggcacctttgagatggccaaggttctctgtaagttctctctcttcactgctgtccataagcactatagcctcgttcagtggcaagagtttgctggccagaatcctgactgtcttgagcatctggctgccagctcaggcacaggctcttctgactttgagcagctggaacagatcctggaagctattccccaggtgaagtatatatgcctggatgtggcaaatggctactctgaacactttgttgaatttgtaaaagatgtacggaagcgcttcccccagcacaccatcatggcagggaatgtggtaacaggagagatggtagaagagctcatcctttctggggctgacatcatcaaagtgggaattgggccaggctctgtgtgtactactcggaagaaaactggagtggggtatccacagctcagcgcagtgatggagtgtgcagatgctgctcatggcctcaaaggccacatcatttcagatggaggttgcagctgtcctggggatgtggccaaggcttttggggcaggagctgacttcgtgatgctgggtggcatgctggctgggcacagtgagtcaggtggtgagctcatcgagagggatggcaagaagtacaagctcttctatggaatgagttctgaaatggccatgaagaagtatgctgggggcgtggctgagtacagagcctcagagggaaagacagtggaagttccttttaaaggagatgtggaacataccatccgagacatcctaggagggatccgctctacgtgtacctatgtgggagcagctaagctcaaagagttgagcaggagaactaccttcatccgagtcacccagcaggtgaatccaatcttcagtgaggcgtgctagacctgagcagttctaccctcccaaggcaccagtactctaccatggggcatcccaagtggggtcctcacccatcccagctactgcagctctgtattactttgtcatttcctgttgtctcactcctgagggctcctgcagtaactctgtacttctctatctgcacacacaaaatgcccaaggcactcactggggaggaagcaaggaagcaaacagtctgagaaaatgatgcaagaaaatcaaatgggaatctggggacccaacacaacatcctgaagattattaaaaggaaaagatgctgattggtacataaatcttttacatggccttggtctagaggaggcaggcttttagaatcatgttttgttaatccgcttcactaaattggaccttcacatatctaaaaagctctgaagtgtttgtatatttgaaatacctcaataaagagagagctcattgactgtaaa

SEQ ID NO: 291220 - DNA, 1606 bp, Homo sapiens
aaggctggtacgcccgggggtttggatctttgcaggggtagaagaaggaagtgtagcgggccctcagattcatcgctaccccgaggctaagcgccatgcctcatattgacaacgatgtgaaactggacttcaaggatgtccttttgaggcccaaacgcagtacccttaagtctcgaagtgaggtggatctcacaagatccttttcatttcggaactcaaagcagacatactctggggttcccatcattgctgccaatatggatactgtgggcacctttgagatggccaaggttctctgtaagttctctctcttcactgctgtccataagcactatagcctcgttcagtggcaagagtttgctggccagaatcctgactgtcttgagcatctggctgccagctcaggcacaggctcttctgactttgagcagctggaacagatcctggaagctattccccaggtgaagtatatatgcctggatgtggcaaatggctactctgaacactttgttgaatttgtaaaagatgtacggaagcgcttcccccagcacaccatcatggcagggaatgtggtaacaggagagatggtagaagagctcatcctttctggggctgacatcatcaaagtgggaattgggccaggctctgtgtgtactactcggaagaaaactggagtggggtatccacagctcagcgcagtgatggagtgtgcagatgctgctcatggcctcaaaggccacatcatttcagatggaggttgcagctgtcctggggatgtggccaaggcttttggggcaggagctgacttcgtgatgctgggtggcatgctggctgggcacagtgagtcaggtggtgagctcatcgagagggatggcaagaagtacaagctcttctatggaatgagttctgaaatggccatgaagaagtatgctgggggcgtggctgagtacagagcctcagagggaaagacagtggaagttccttttaaaggagatgtggaacataccatccgagacatcctaggagggatccgctctacgtgtacctatgtgggagcagctaagctcaaagagttgagcaggagaactaccttcatccgagtcacccagcaggtgaatccaatcttcagtgaggcgtgctagacctgagcagttctaccctcccaaggcaccagtactctaccatggggcatcccaagtggggtcctcacccatcccagctactgcagctctgtattactttgtcatttcctgttgtctcactcctgagggctcctgcagtaactctgtacttctctatctgcacacacaaaatgcccaaggcactcactggggaggaagcaaggaagcaaacagtctgagaaaatgatgcaagaaaatcaaatgggaatctggggacccaacacaacatcctgaagattattaaaaggaaaagatgctgattggtacataaatcttttacatggccttggtctagaggaggcaggcttttagaatcatgttttgttaatccgcttcactaaattggaccttcacatatctaaaaagctctgaagtgtttgtatatttgaaatacctcaataaagagagagctcattgactgtaaa

SEQ ID NO: 291221 - DNA, 1253 bp, Homo sapiens
  misc_feature (1115)..(1115): n is a, c, g, or t
  misc_feature (1124)..(1124): n is a, c, g, or t
  misc_feature (1126)..(1126): n is a, c, g, or t
  misc_feature (1139)..(1139): n is a, c, g, or t
  misc_feature (1253)..(1253): n is a, c, g, or t
aaaggctcagggttgctcccgcgtttcggttcagtgacgtcgtaaattggaatgaggcatccagtttagcaacagcagagatgacgactctgcgattctgagagtccctggcgagcccgggctagcgaaaagtgggggcagaacgaactacatctcccatcgtgccaggaggcggtcccgcccgtttccccctgggagttgtagtctaaccccctcggatccaacagcaacctcagtgcgtgaactctgttatccagaaggcctcgccctgccgccgccgaagctggaattcgtcggctagtagttctcgccggcaactagaggaacctgttggcgtggcccagaaggcttagcgggattgcacgagccctcagattcatcgctaccccgaggctaagcgccatgcctcatattgacaacgatgtgaaactggacttcaaggatgtccttttgaggcccaaacgcagtacccttaagtctcgaagtgaggtggatctcacaagatccttttcatttcggaactcaaagcagacatactctggggttcccatcattgctgccaatatggatactgtgggcacctttgagatggccaaggttctctgtaagttctctctcttcactgctgtccataagcactatagcctcgttcagtggcaagagtttgctggccagaatcctgactgtcttgagcatctggctgccagctcaggcacaggctcttctgactttgagcagctggaacagatcctggaagctattccccaggtgaagtatatatgcctggatgtggcaaatggctactctgaacacttttaaaggagatgtggaacataccatccgagacatcctaggagggatccgctctacgtgtacctatgtgggagcagctaagctcaaagagttgagcaggagaactaccttcatccgagtcacccagcaggtgaatccaatcttcagtgaggcgtgctagacctgagcagttctaccctcccaaggcaccagtactctaccatggggcatcccaagtggggtcctcacccatcccagctactgcagctctgtattactttgtcatttcctgttgtctcactcctgagggccgcgaaacctgnttttttggnanaatgccaggcccnggggaaaaggaacatccgacaatcaaactgggtctggccacctcaataggacgtgtcatttcgcacagacaacacagctcaacttgtacacaactcggacttgtatatgttcgn

SEQ ID NO: 291222 - DNA, 881 bp, Homo sapiens
aaaggctcagggttgctcccgcgtttcggttcagtgacgtcgtaaattggaatgaggcatccagtttagcaacagcagagatgacgactctgcgattctgagagtccctggcgagcccgggctagcgaaaagtgggggcagaacgaactacatctcccatcgtgccaggaggcggtcccgcccgtttccccctgggagttgtagtctaaccccctcggatccaacagcaacctcagtgcgtgaactctgttatccagaaggcctcgccctgccgccgccgaagctggaattcgtcggctagtagttctcgccggcaactagaggaacctgttggcgtggcccagaaggcttagcgggattgcacgagccctcagattcatcgctaccccgaggctaagcgccatgcctcatattgacaacgatgtgaaactggacttcaaggatgtccttttgaggcccaaacgcagtacccttaagtctcgaagtgaggtggatctcacaagatccttttcatttcggaactcaaagcagacatactctggggttcccatcattgcagacaaatgacttgaaagaagtggtcaataaattgattccagacagcattggaaaagacatagaaaaggcttgccaatctatttatcctctccatgatgtcttcgttagaaaagtaaaaatgctgaagaagcccaagtttgaattgggaaagctcatggagcttcatggtgaaggcagtagttctggaaaagccactggggacgagacaggtgctaaagttgaacgagctgatggatatgaaccaccagtccaagaatctgtttaaagttcagacttcaaatagtggcaaataaaagtgctatttgtgatgcaaaaacccaaaa

SEQ ID NO: 291223 - DNA, 688 bp, Homo sapiens
aaaggctcagggttgctcccgcgtttcggttcagtgacgtcgtaaattggaatgaggcatccagtttagcaacagcagagatgacgactctgcgattctgagagtccctggcgagcccgggctagcgaaaagtgggggcagaacgaactacatctcccatcgtgccaggaggcggtcccgcccgtttccccctgggagttgtagtctaaccccctcggatccaacagcaacctcagtgcgtgaactctgttatccagaaggcctcgccctgccgccgccgaagctggaattcgtcggctagtagttctcgccggcaactagaggaacctgttggcgtggcccagaaggcttagcgggattgcacgagccctcagattcatcgctaccccgaggctaagcgccatgcctcatattgacaacgatgtgaaactggacttcaaggatgtccttttgaggcccaaacgcagtacccttaagtctcgaagtgaggtggatctcacaagatccttttcatttcggaactcaaagcagacatactctggggttcccatcattgctgccaatatggatactgtgggcacctttgagatggccaaggttctctgtaagaggtagggctttcctcatgccccatccctattggtgtccagttagcccagctgactgcagaggtgtttgcatccccacc

SEQ ID NO: 291224 - DNA, 1972 bp, Homo sapiens
aaaggctcagggttgctcccgcgtttcggttcagtgacgtcgtaaattggaatgaggcatccagtttagcaacagcagagatgacgactctgcgattctgagagtccctggcgagcccgggctagcgaaaagtgggggcagaacgaactacatctcccatcgtgccaggaggcggtcccgcccgtttccccctgggagttgtagtctaaccccctcggatccaacagcaacctcagtgcgtgaactctgttatccagaaggcctcgccctgccgccgccgaagctggaattcgtcggctagtagttctcgccggcaactagaggaacctgttggcgtggcccagaaggcttagcgggattgcacgaggttagttgctaagcaaggtggtctttggtcaactgccgcctggaccaaggcaacaggaaccctcagattcatcgctaccccgaggctaagcgccatgcctcatattgacaacgatgtgaaactggacttcaaggatgtccttttgaggcccaaacgcagtacccttaagtctcgaagtgaggtggatctcacaagatccttttcatttcggaactcaaagcagacatactctggggttcccatcattgctgccaatatggatactgtgggcacctttgagatggccaaggttctctgtaagttctctctcttcactgctgtccataagcactatagcctcgttcagtggcaagagtttgctggccagaatcctgactgtcttgagcatctggctgccagctcaggcacaggctcttctgactttgagcagctggaacagatcctggaagctattccccaggtgaagtatatatgcctggatgtggcaaatggctactctgaacactttgttgaatttgtaaaagatgtacggaagcgcttcccccagcacaccatcatggcagggaatgtggtaacaggagagatggtagaagagctcatcctttctggggctgacatcatcaaagtgggaattgggccaggctctgtgtgtactactcggaagaaaactggagtggggtatccacagctcagcgcagtgatggagtgtgcagatgctgctcatggcctcaaaggccacatcatttcagatggaggttgcagctgtcctggggatgtggccaaggcttttggggcaggagctgacttcgtgatgctgggtggcatgctggctgggcacagtgagtcaggtggtgagctcatcgagagggatggcaagaagtacaagctcttctatggaatgagttctgaaatggccatgaagaagtatgctgggggcgtggctgagtacagagcctcagagggaaagacagtggaagttccttttaaaggagatgtggaacataccatccgagacatcctaggagggatccgctctacgtgtacctatgtgggagcagctaagctcaaagagttgagcaggagaactaccttcatccgagtcacccagcaggtgaatccaatcttcagtgaggcgtgctagacctgagcagttctaccctcccaaggcaccagtactctaccatggggcatcccaagtggggtcctcacccatcccagctactgcagctctgtattactttgtcatttcctgttgtctcactcctgagggctcctgcagtaactctgtacttctctatctgcacacacaaaatgcccaaggcactcactggggaggaagcaaggaagcaaacagtctgagaaaatgatgcaagaaaatcaaatgggaatctggggacccaacacaacatcctgaagattattaaaaggaaaagatgctgattggtacataaatcttttacatggccttggtctagaggaggcaggcttttagaatcatgttttgttaatccgcttcactaaattggaccttcacatatctaaaaagctctgaagtgtttgtatatttgaaatacctcaataaagagagagctcattgactgtaaa

SEQ ID NO: 291225 - DNA, 1631 bp, Homo sapiens
cccgtcgccaacattccttcgttcccctaaatcagcctcttgccccattgctctttgcaggggtagaagaaggaagtgtagcgggccctcagattcatcgctaccccgaggctaagcgccatgcctcatattgacaacgatgtgaaactggacttcaaggatgtccttttgaggcccaaacgcagtacccttaagtctcgaagtgaggtggatctcacaagatccttttcatttcggaactcaaagcagacatactctggggttcccatcattgctgccaatatggatactgtgggcacctttgagatggccaaggttctctgtaagttctctctcttcactgctgtccataagcactatagcctcgttcagtggcaagagtttgctggccagaatcctgactgtcttgagcatctggctgccagctcaggcacaggctcttctgactttgagcagctggaacagatcctggaagctattccccaggtgaagtatatatgcctggatgtggcaaatggctactctgaacactttgttgaatttgtaaaagatgtacggaagcgcttcccccagcacaccatcatggcagggaatgtggtaacaggagagatggtagaagagctcatcctttctggggctgacatcatcaaagtgggaattgggccaggctctgtgtgtactactcggaagaaaactggagtggggtatccacagctcagcgcagtgatggagtgtgcagatgctgctcatggcctcaaaggccacatcatttcagatggaggttgcagctgtcctggggatgtggccaaggcttttggggcaggagctgacttcgtgatgctgggtggcatgctggctgggcacagtgagtcaggtggtgagctcatcgagagggatggcaagaagtacaagctcttctatggaatgagttctgaaatggccatgaagaagtatgctgggggcgtggctgagtacagagcctcagagggaaagacagtggaagttccttttaaaggagatgtggaacataccatccgagacatcctaggagggatccgctctacgtgtacctatgtgggagcagctaagctcaaagagttgagcaggagaactaccttcatccgagtcacccagcaggtgaatccaatcttcagtgaggcgtgctagacctgagcagttctaccctcccaaggcaccagtactctaccatggggcatcccaagtggggtcctcacccatcccagctactgcagctctgtattactttgtcatttcctgttgtctcactcctgagggctcctgcagtaactctgtacttctctatctgcacacacaaaatgcccaaggcactcactggggaggaagcaaggaagcaaacagtctgagaaaatgatgcaagaaaatcaaatgggaatctggggacccaacacaacatcctgaagattattaaaaggaaaagatgctgattggtacataaatcttttacatggccttggtctagaggaggcaggcttttagaatcatgttttgttaatccgcttcactaaattggaccttcacatatctaaaaagctctgaagtgtttgtatatttgaaatacctcaataaagagagagctcattgactgtaaa

SEQ ID NO: 291226 - DNA, 1939 bp, Homo sapiens
aaaggctcagggttgctcccgcgtttcggttcagtgacgtcgtaaattggaatgaggcatccagtttagcaacagcagagatgacgactctgcgattctgagagtccctggcgagcccgggctagcgaaaagtgggggcagaacgaactacatctcccatcgtgccaggaggcggtcccgcccgtttccccctgggagttgtagtctaaccccctcggatccaacagcaacctcagtgcgtgaactctgttatccagaaggcctcgccctgccgccgccgaagctggaattcgtcggctagtagttctcgccggcaactagaggaacctgttggcgtggcccagaaggcttagcgggattgcacgagccctcagattcatcgctaccccgaggctaagcgccatgcctcatattgacaacgatgtgaaactggacttcaaggatgtccttttgaggcccaaacgcagtacccttaagtctcgaagtgaggtggatctcacaagatccttttcatttcggaactcaaagcagacatactctggggttcccatcattgctgccaatatggatactgtgggcacctttgagatggccaaggttctctgtaagttctctctcttcactgctgtccataagcactatagcctcgttcagtggcaagagtttgctggccagaatcctgactgtcttgagcatctggctgccagctcaggcacaggctcttctgactttgagcagctggaacagatcctggaagctattccccaggtgaagtatatatgcctggatgtggcaaatggctactctgaacactttgttgaatttgtaaaagatgtacggaagcgcttcccccagcacaccatcatggcagggaatgtggtaacaggagagatggtagaagagctcatcctttctggggctgacatcatcaaagtgggaattgggccaggctctgtgtgtactactcggaagaaaactggagtggggtatccacagctcagcgcagtgatggagtgtgcagatgctgctcatggcctcaaaggccacatcatttcagatggaggttgcagctgtcctggggatgtggccaaggcttttggggcaggagctgacttcgtgatgctgggtggcatgctggctgggcacagtgagtcaggtggtgagctcatcgagagggatggcaagaagtacaagctcttctatggaatgagttctgaaatggccatgaagaagtatgctgggggcgtggctgagtacagagcctcagagggaaagacagtggaagttccttttaaaggagatgtggaacataccatccgagacatcctaggagggatccgctctacgtgtacctatgtgggagcagctaagctcaaagagttgagcaggagaactaccttcatccgagtcacccagcaggtgaatccaatcttcagtgaggcgtgctagacctgagcagttctaccctcccaaggcaccagtactctaccatggggcatcccaagtggggtcctcacccatcccagctactgcagctctgtattactttgtcatttcctgttgtctcactcctgagggctcctgcagtaactctgtacttctctatctgcacacacaaaatgcccaaggcactcactggggaggaagcaaggaagcaaacagtctgagaaaatgatgcaagaaaatcaaatgggaatctggggacccaacacaacatcctgaagattattaaaaggaaaagatgctgattggtacataaatcttttacatggccttggtctagaggaggcaggcttttagaatcatgttttgttaatccgcttcactaaattggaccttcacatatctaaaaagctctgaagtgtttgtatatttgaaatacctcaataaagagagagctcattgactgtaaaaaaaaaaaccacacagggcggccgct

SEQ ID NO: 291227 - DNA, 2596 bp, Homo sapiens
aaaggctcagggttgctcccgcgtttcggttcagtgacgtcgtaaattggaatgaggcatccagtttagcaacagcagagatgacgactctgcgattctgagagtccctggcgagcccgggctagcgaaaagtgggggcagaacgaactacatctcccatcgtgccaggaggcggtcccgcccgtttccccctgggagttgtagtctaaccccctcggatccaacagcaacctcagtgcgtgaactctgttatccagaaggcctcgccctgccgccgccgaagctggaattcgtcggctagtagttctcgccggcaactagaggaacctgttggcgtggcccagaaggcttagcgggattgcacgagccctcagattcatcgctaccccgaggctaagcgccatgcctcatattgacaacgatgtgaaactggacttcaaggatgtccttttgaggcccaaacgcagtacccttaagtctcgaagtgaggtggatctcacaagatccttttcatttcggaactcaaagcagacatactctggggttcccatcattgctgccaatatggatactgtgggcacctttgagatggccaaggttctctgtaagttctctctcttcactgctgtccataagcactatagcctcgttcagtggcaagagtttgctggccagaatcctgactgtcttgagcatctggctgccagctcaggcacaggctcttctgactttgagcagctggaacagatcctggaagctattccccaggtgaagtatatatgcctggatgtggcaaatggctactctgaacactttgttgaatttgtaaaagatgtacggaagcgcttcccccagcacaccatcatggcagggaatgtggtaacaggagagatggtagaagagctcatcctttctggggctgacatcatcaaagtgggaattgggccaggctctgtgtgtactactcggaagaaaactggagtggggtatccacagctcagcgcagtgatggagtgtgcagatgctgctcatggcctcaaaggccacatcatttcagatggaggttgcagctgtcctggggatgtggccaaggcttttggtaaggagcttgagggcacagaaggatgattctatacaagaggatgaatcacctctgagggtctagggtcaggctaagagaggctcaggaagtcattcagattctttcataatatgaattagtgactccgaagtctatggtatcatctggggcagccagcaggggacatctgagactccaagtgtgggccagggccatctgaccatctcctagattgctgcacagtgcagactcctgagccccagccatacctaaaaataggctctgaggaatgggacagcacatctgcatttttcattttgcacagcttcccaggagatcattactcccattaaagttggggatctttgctcttgggacacatgaaatgagtcttatttagctgggcacagtaaaatcaaatgaccagacgatgatggtaaaaacagcaaaaggagaaagcaaaagccaggcagggactctccagaggctcttttttaaatcttggggaaatcatacccactgaggaatagaggccagggcagatcaggcctgcgtggattgtgggtcagctagggaagcagaaggaggaagacgctggaatcattgtcaggactgagaatatggtgtgagttgcttttgagggtggccatgtgagcaccttggccagattaatctctttcccccctccatgatggtggcaggggcaggagctgacttcgtgatgctgggtggcatgctggctgggcacagtgagtcaggtggtgagctcatcgagagggatggcaagaagtacaagctcttctatggaatgagttctgaaatggccatgaagaagtatgctgggggcgtggctgagtacagagcctcagagggaaagacagtggaagttccttttaaaggagatgtggaacataccatccgagacatcctaggagggatccgctctacgtgtacctatgtgggagcagctaagctcaaagagttgagcaggagaactaccttcatccgagtcacccagcaggtgaatccaatcttcagtgaggcgtgctagacctgagcagttctaccctcccaaggcaccagtactctaccatggggcatcccaagtggggtcctcacccatcccagctactgcagctctgtattactttgtcatttcctgttgtctcactcctgagggctcctgcagtaactctgtacttctctatctgcacacacaaaatgcccaaggcactcactggggaggaagcaaggaagcaaacagtctgagaaaatgatgcaagaaaatcaaatgggaatctggggacccaacacaacatcctgaagattattaaaaggaaaagatgctgattggtacataaatcttttacatggccttggtctagaggaggcaggcttttagaatcatgttttgttaatccgcttcactaaattggaccttcacatatctaaaaagctctgaagtgtttgtatatttgaaatacctcaataaagagagagctcattgactgtaaa

SEQ ID NO: 291228 - DNA, 2535 bp, Homo sapiens
aaaggctcagggttgctcccgcgtttcggttcagtgacgtcgtaaattggaatgaggcatccagtttagcaacagcagagatgacgactctgcgattctgagagtccctggcgagcccgggctagcgaaaagtgggggcagaacgaactacatctcccatcgtgccaggaggcggtcccgcccgtttccccctgggagttgtagtctaaccccctcggatccaacagcaacctcagtgcgtgaactctgttatccagaaggcctcgccctgccgccgccgaagctggaattcgtcggctagtagttctcgccggcaactagaggaacctgttggcgtggcccagaaggcttagcgggattgcacgagccctcagattcatcgctaccccgaggctaagcgccatgcctcatattgacaacgatgtgaaactggacttcaaggatgtccttttgaggcccaaacgcagtacccttaagtctcgaagtgaggtggatctcacaagatccttttcatttcggaactcaaagcagacatactctggggttcccatcattgctgccaatatggatactgtgggcacctttgagatggccaaggttctctgtaagttctctctcttcactgctgtccataagcactatagcctcgttcagtggcaagagtttgctggccagaatcctgactgtcttgagcatctggctgccagctcaggcacaggctcttctgactttgagcagctggaacagatcctggaagctattccccaggtgaagtatatatgcctggatgtggcaaatggctactctgaacactttgttgaatttgtaaaagatgtacggaagcgcttcccccagcacaccatcatggcagggaatgtggtaacaggagagatggtagaagagctcatcctttctggggctgacatcatcaaagtgggaattgggccaggctctgtgtgtactactcggaagaaaactggagtggggtatccacagctcagcgcagtgatggagtgtgcagatgctgctcatggcctcaaaggccacatcatttcagatggaggttgcagctgtcctggggatgtggccaaggcttttggtaaggagcttgagggcacagaaggatgattctatacaagaggatgaatcacctctgagggtctagggtcaggctaagagaggctcaggaagtcattcagattctttcataatatgaattagtgactccgaagtctatggtatcatctggggcagccagcaggggacatctgagactccaagtgtgggccagggccatctgaccatctcctagattgctgcacagtgcagactcctgagccccagccatacctaaaaataggctctgaggaatgggacagcacatctgcatttttcattttgcacagcttcccaggagatcattactcccattaaagttggggatctttgctcttgggacacatgaaatgagtcttatttagctgggcacagtaaaatcaaatgaccagacgatgatggtaaaaacagcaaaaggagccactgaggaatagaggccagggcagatcaggcctgcgtggattgtgggtcagctagggaagcagaaggaggaagacgctggaatcattgtcaggactgagaatatggtgtgagttgcttttgagggtggccatgtgagcaccttggccagattaatctctttcccccctccatgatggtggcaggggcaggagctgacttcgtgatgctgggtggcatgctggctgggcacagtgagtcaggtggtgagctcatcgagagggatggcaagaagtacaagctcttctatggaatgagttctgaaatggccatgaagaagtatgctgggggcgtggctgagtacagagcctcagagggaaagacagtggaagttccttttaaaggagatgtggaacataccatccgagacatcctaggagggatccgctctacgtgtacctatgtgggagcagctaagctcaaagagttgagcaggagaactaccttcatccgagtcacccagcaggtgaatccaatcttcagtgaggcgtgctagacctgagcagttctaccctcccaaggcaccagtactctaccatggggcatcccaagtggggtcctcacccatcccagctactgcagctctgtattactttgtcatttcctgttgtctcactcctgagggctcctgcagtaactctgtacttctctatctgcacacacaaaatgcccaaggcactcactggggaggaagcaaggaagcaaacagtctgagaaaatgatgcaagaaaatcaaatgggaatctggggacccaacacaacatcctgaagattattaaaaggaaaagatgctgattggtacataaatcttttacatggccttggtctagaggaggcaggcttttagaatcatgttttgttaatccgcttcactaaattggaccttcacatatctaaaaagctctgaagtgtttgtatatttgaaatacctcaataaagagagagctcattgactgtaaa

SEQ ID NO: 291229 - DNA, 2779 bp, Homo sapiens
aaaggctcagggttgctcccgcgtttcggttcagtgacgtcgtaaattggaatgaggcatccagtttagcaacagcagagatgacgactctgcgattctgagagtccctggcgagcccgggctagcgaaaagtgggggcagaacgaactacatctcccatcgtgccaggaggcggtcccgcccgtttccccctgggagttgtagtctaaccccctcggatccaacagcaacctcagtgcgtgaactctgttatccagaaggcctcgccctgccgccgccgaagctggaattcgtcggctagtagttctcgccggcaactagaggaacctgttggcgtggcccagaaggcttagcgggattgcacgagccctcagattcatcgctaccccgaggctaagcgccatgcctcatattgacaacgatgtgaaactggacttcaaggatgtccttttgaggcccaaacgcagtacccttaagtctcgaagtgaggtggatctcacaagatccttttcatttcggaactcaaagcagacatactctggggttcccatcattgctgccaatatggatactgtgggcacctttgagatggccaaggttctctgtaagttctctctcttcactgctgtccataagcactatagcctcgttcagtggcaagagtttgctggccagaatcctgactgtcttgagcatctggctgccagctcaggcacaggctcttctgactttgagcagctggaacagatcctggaagctattccccaggtgaagtatatatgcctggatgtggcaaatggctactctgaacactttgttgaatttgtaaaagatgtacggaagcgcttcccccagcacaccatcatggcagggaatgtggtaacaggagagatggtagaagagctcatcctttctggggctgacatcatcaaagtgggaattgggccaggctctgtgtgtactactcggaagaaaactggagtggggtatccacagctcagcgcagtgatggagtgtgcagatgctgctcatggcctcaaaggccacatcatttcagatggaggttgcagctgtcctggggatgtggccaaggcttttggtaaggagcttgagggcacagaaggatgattctatacaagaggatgaatcacctctgagggtctagggtcaggctaagagaggctcaggaagtcattcagattctttcataatatgaattagtgactccgaagtctatggtatcatctggggcagccagcaggggacatctgagactccaagtgtgggccagggccatctgaccatctcctagattgctgcacagtgcagactcctgagccccagccatacctaaaaataggctctgaggaatgggacagcacatctgcatttttcattttgcacagcttcccaggagatcattactcccattaaagttggggatctttgctcttgggacacatgaaatgagtcttatttagctgggcacagtaaaatcaaatgaccagacgatgatggtaaaaacagcaaaaggagaaagcaaaagccaggcagggactctccagaggctcttttttaaatcttggggaaatcatacccactgaggaatagaggccagggcagatcaggcctgcgtggattgtgggtcagctagggaagcagaaggaggaagacgctggaatcattgtcaggactgagaatatggtgtgagttgcttttgagggtggccatgtgagcaccttggccagattaatctctttcccccctccatgatggtggcaggggcaggagctgacttcgtgatgctgggtggcatgctggctgggcacagtgagtcaggtggtgagctcatcgagagggatggcaagaagtacaagctcttctatggaatgagttctgaaatggccatgaagaagtatgctgggggcgtggctgagtacaggtatgtgtggaggcccaggagcttagtaatagtatggaggcagaactcatggctgctgagagggggatggtacagttctcagagaagcatggtgaaccggggctcaatgctagggtctgtggaaaagtccctgggcttaaggaatccagaaggagaagataataaagtttttcctactttaagagcctcagagggaaagacagtggaagttccttttaaaggagatgtggaacataccatccgagacatcctaggagggatccgctctacgtgtacctatgtgggagcagctaagctcaaagagttgagcaggagaactaccttcatccgagtcacccagcaggtgaatccaatcttcagtgaggcgtgctagacctgagcagttctaccctcccaaggcaccagtactctaccatggggcatcccaagtggggtcctcacccatcccagctactgcagctctgtattactttgtcatttcctgttgtctcactcctgagggctcctgcagtaactctgtacttctctatctgcacacacaaaatgcccaaggcactcactggggaggaagcaaggaagcaaacagtctgagaaaatgatgcaagaaaatcaaatgggaatctggggacccaacacaacatcctgaagattattaaaaggaaaagatgctgattggtacataaatcttttacatggccttggtctagaggaggcaggcttttagaatcatgttttgttaatccgcttcactaaattggaccttcacatatctaaaaagctctgaagtgtttgtatatttgaaatacctcaataaagagagagctcattgactgtaaa

SEQ ID NO: 291230 - DNA, 2007 bp, Homo sapiens
cccgtcgccaacattccttcgttcccctaaatcagcctcttgccccattgctctttgcaggggtagaagaaggaagtgtagcggggtaaggaatgcaccgtcagggtctctcacaaccctttcccagctctcctccccaacaaacagtacctgggatggagccctagggtaatcgcagccacgggatgggtcgaggtgacaggcttcagggaccacacttcggcctttgcccgaccttccacaacttaagcgaagagaggccaccagccgtaacagggcgttaaagcccaggggaagattggtccttatgacttcctgccttccagccctcagattcatcgctaccccgaggctaagcgccatgcctcatattgacaacgatgtgaaactggacttcaaggatgtccttttgaggcccaaacgcagtacccttaagtctcgaagtgaggtggatctcacaagatccttttcatttcggaactcaaagcagacatactctggggttcccatcattgctgccaatatggatactgtgggcacctttgagatggccaaggttctctgtaagtcctaggttcctgggagtttctgggatgtgccccaaatgggatgtgtttttcttatatacaagttgttcactttgaaatggaagatgctgctcctgtcagtactattacctgcctctatacttgttgctgagaagttctctctcttcactgctgtccataagcactatagcctcgttcagtggcaagagtttgctggccagaatcctgactgtcttgagcatctggctgccagctcaggcacaggctcttctgactttgagcagctggaacagatcctggaagctattccccaggtgaagtatatatgcctggatgtggcaaatggctactctgaacactttgttgaatttgtaaaagatgtacggaagcgcttcccccagcacaccatcatggcagggaatgtggtaacaggagagatggtagaagagctcatcctttctggggctgacatcatcaaagtgggaattgggccaggctctgtgtgtactactcggaagaaaactggagtggggtatccacagctcagcgcagtgatggagtgtgcagatgctgctcatggcctcaaaggccacatcatttcagatggaggttgcagctgtcctggggatgtggccaaggcttttggggcaggagctgacttcgtgatgctgggtggcatgctggctgggcacagtgagtcaggtggtgagctcatcgagagggatggcaagaagtacaagctcttctatggaatgagttctgaaatggccatgaagaagtatgctgggggcgtggctgagtacagagcctcagagggaaagacagtggaagttccttttaaaggagatgtggaacataccatccgagacatcctaggagggatccgctctacgtgtacctatgtgggagcagctaagctcaaagagttgagcaggagaactaccttcatccgagtcacccagcaggtgaatccaatcttcagtgaggcgtgctagacctgagcagttctaccctcccaaggcaccagtactctaccatggggcatcccaagtggggtcctcacccatcccagctactgcagctctgtattactttgtcatttcctgttgtctcactcctgagggctcctgcagtaactctgtacttctctatctgcacacacaaaatgcccaaggcactcactggggaggaagcaaggaagcaaacagtctgagaaaatgatgcaagaaaatcaaatgggaatctggggacccaacacaacatcctgaagattattaaaaggaaaagatgctgattggtacataaatcttttacatggccttggtctagaggaggcaggcttttagaatcatgttttgttaatccgcttcactaaattggaccttcacatatctaaaaagctctgaagtgtttgtatatttgaaatacctcaataaagagagagctcattgactgtaaa

SEQ ID NO: 291231 - DNA, 2048 bp, Homo sapiens
aaaggctcagggttgctcccgcgtttcggttcagtgacgtcgtaaattggaatgaggcatccagtttagcaacagcagagatgacgactctgcgattctgagagtccctggcgagcccgggctagcgaaaagtgggggcagaacgaactacatctcccatcgtgccaggaggcggtcccgcccgtttccccctgggagttgtagtctaaccccctcggatccaacagcaacctcagtgcgtgaactctgttatccagaaggcctcgccctgccgccgccgaagctggaattcgtcggctagtagttctcgccggcaactagaggaacctgttggcgtggcccagaaggcttagcgggattgcacgagccctcagattcatcgctaccccgaggctaagcgccatgcctcatattgacaacgatgtgaaactggacttcaaggatgtccttttgaggcccaaacgcagtacccttaagtctcgaagtgaggtggatctcacaagatccttttcatttcggaactcaaagcagacatactctggggttcccatcattgctgccaatatggatactgtgggcacctttgagatggccaaggttctctgtaagtcctaggttcctgggagtttctgggatgtgccccaaatgggatgtgtttttcttatatacaagttgttcactttgaaatggaagatgctgctcctgtcagtactattacctgcctctatacttgttgctgagaagttctctctcttcactgctgtccataagcactatagcctcgttcagtggcaagagtttgctggccagaatcctgactgtcttgagcatctggctgccagctcaggcacaggctcttctgactttgagcagctggaacagatcctggaagctattccccaggtgaagtatatatgcctggatgtggcaaatggctactctgaacactttgttgaatttgtaaaagatgtacggaagcgcttcccccagcacaccatcatggcagggaatgtggtaacaggagagatggtagaagagctcatcctttctggggctgacatcatcaaagtgggaattgggccaggctctgtgtgtactactcggaagaaaactggagtggggtatccacagctcagcgcagtgatggagtgtgcagatgctgctcatggcctcaaaggccacatcatttcagatggaggttgcagctgtcctggggatgtggccaaggcttttggggcaggagctgacttcgtgatgctgggtggcatgctggctgggcacagtgagtcaggtggtgagctcatcgagagggatggcaagaagtacaagctcttctatggaatgagttctgaaatggccatgaagaagtatgctgggggcgtggctgagtacagagcctcagagggaaagacagtggaagttccttttaaaggagatgtggaacataccatccgagacatcctaggagggatccgctctacgtgtacctatgtgggagcagctaagctcaaagagttgagcaggagaactaccttcatccgagtcacccagcaggtgaatccaatcttcagtgaggcgtgctagacctgagcagttctaccctcccaaggcaccagtactctaccatggggcatcccaagtggggtcctcacccatcccagctactgcagctctgtattactttgtcatttcctgttgtctcactcctgagggctcctgcagtaactctgtacttctctatctgcacacacaaaatgcccaaggcactcactggggaggaagcaaggaagcaaacagtctgagaaaatgatgcaagaaaatcaaatgggaatctggggacccaacacaacatcctgaagattattaaaaggaaaagatgctgattggtacataaatcttttacatggccttggtctagaggaggcaggcttttagaatcatgttttgttaatccgcttcactaaattggaccttcacatatctaaaaagctctgaagtgtttgtatatttgaaatacctcaataaagagagagctcattgactgtaaa

SEQ ID NO: 291232 - DNA, 2001 bp, Homo sapiens
aaaggctcagggttgctcccgcgtttcggttcagtgacgtcgtaaattggaatgaggcatccagtttagcaacagcagagatgacgactctgcgattctgagagtccctggcgagcccgggctagcgaaaagtgggggcagaacgaactacatctcccatcgtgccaggaggcggtcccgcccgtttccccctgggagttgtagtctaaccccctcggatccaacagcaacctcagtgcgtgaactctgttatccagaaggcctcgccctgccgccgccgaagctggaattcgtcggctagtagttctcgccggcaactagaggaacctgttggcgtggcccagaaggcttagcgggattgcacgaggttagttgctaagcaaggtggtctttggtcaactgccgcctggaccaaggcaacaggaaccctcagattcatcgctaccccgaggctaagcgccatgcctcatattgacaacgatgtgaaactggacttcaaggatgtccttttgaggcccaaacgcagtacccttaagtctcgaagtgaggtggatctcacaagatccttttcatttcggaactcaaagcagacatactctggggttcccatcattgctgccaatatggatactgtgggcacctttgagatggccaaggttctctgtaagttctctctcttcactgctgtccataagcactatagcctcgttcagtggcaagagtttgctggccagaatcctgactgtcttgagcatctggctgccagctcaggcacaggctcttctgactttgagcagctggaacagatcctggaagctattccccaggtgaagtatatatgcctggatgtggcaaatggctactctgaacactttgttgaatttgtaaaagatgtacggaagcgcttcccccagcacaccatcatggatgctgtatttcaattgctctgtctcaggcagggaatgtggtaacaggagagatggtagaagagctcatcctttctggggctgacatcatcaaagtgggaattgggccaggctctgtgtgtactactcggaagaaaactggagtggggtatccacagctcagcgcagtgatggagtgtgcagatgctgctcatggcctcaaaggccacatcatttcagatggaggttgcagctgtcctggggatgtggccaaggcttttggggcaggagctgacttcgtgatgctgggtggcatgctggctgggcacagtgagtcaggtggtgagctcatcgagagggatggcaagaagtacaagctcttctatggaatgagttctgaaatggccatgaagaagtatgctgggggcgtggctgagtacagagcctcagagggaaagacagtggaagttccttttaaaggagatgtggaacataccatccgagacatcctaggagggatccgctctacgtgtacctatgtgggagcagctaagctcaaagagttgagcaggagaactaccttcatccgagtcacccagcaggtgaatccaatcttcagtgaggcgtgctagacctgagcagttctaccctcccaaggcaccagtactctaccatggggcatcccaagtggggtcctcacccatcccagctactgcagctctgtattactttgtcatttcctgttgtctcactcctgagggctcctgcagtaactctgtacttctctatctgcacacacaaaatgcccaaggcactcactggggaggaagcaaggaagcaaacagtctgagaaaatgatgcaagaaaatcaaatgggaatctggggacccaacacaacatcctgaagattattaaaaggaaaagatgctgattggtacataaatcttttacatggccttggtctagaggaggcaggcttttagaatcatgttttgttaatccgcttcactaaattggaccttcacatatctaaaaagctctgaagtgtttgtatatttgaaatacctcaataaagagagagctcattgactgtaaa

SEQ ID NO: 291233 - DNA, 1766 bp, Homo sapiens
cccgtcgccaacattccttcgttcccctaaatcagcctcttgccccattgctctttgcaggggtagaagaaggaagtgtagcgggccctcagattcatcgctaccccgaggctaagcgccatgcctcatattgacaacgatgtgaaactggacttcaaggatgtccttttgaggcccaaacgcagtacccttaagtctcgaagtgaggtggatctcacaagatccttttcatttcggaactcaaagcagacatactctggggttcccatcattgctgccaatatggatactgtgggcacctttgagatggccaaggttctctgtaagtcctaggttcctgggagtttctgggatgtgccccaaatgggatgtgtttttcttatatacaagttgttcactttgaaatggaagatgctgctcctgtcagtactattacctgcctctatacttgttgctgagaagttctctctcttcactgctgtccataagcactatagcctcgttcagtggcaagagtttgctggccagaatcctgactgtcttgagcatctggctgccagctcaggcacaggctcttctgactttgagcagctggaacagatcctggaagctattccccaggtgaagtatatatgcctggatgtggcaaatggctactctgaacactttgttgaatttgtaaaagatgtacggaagcgcttcccccagcacaccatcatggcagggaatgtggtaacaggagagatggtagaagagctcatcctttctggggctgacatcatcaaagtgggaattgggccaggctctgtgtgtactactcggaagaaaactggagtggggtatccacagctcagcgcagtgatggagtgtgcagatgctgctcatggcctcaaaggccacatcatttcagatggaggttgcagctgtcctggggatgtggccaaggcttttggggcaggagctgacttcgtgatgctgggtggcatgctggctgggcacagtgagtcaggtggtgagctcatcgagagggatggcaagaagtacaagctcttctatggaatgagttctgaaatggccatgaagaagtatgctgggggcgtggctgagtacagagcctcagagggaaagacagtggaagttccttttaaaggagatgtggaacataccatccgagacatcctaggagggatccgctctacgtgtacctatgtgggagcagctaagctcaaagagttgagcaggagaactaccttcatccgagtcacccagcaggtgaatccaatcttcagtgaggcgtgctagacctgagcagttctaccctcccaaggcaccagtactctaccatggggcatcccaagtggggtcctcacccatcccagctactgcagctctgtattactttgtcatttcctgttgtctcactcctgagggctcctgcagtaactctgtacttctctatctgcacacacaaaatgcccaaggcactcactggggaggaagcaaggaagcaaacagtctgagaaaatgatgcaagaaaatcaaatgggaatctggggacccaacacaacatcctgaagattattaaaaggaaaagatgctgattggtacataaatcttttacatggccttggtctagaggaggcaggcttttagaatcatgttttgttaatccgcttcactaaattggaccttcacatatctaaaaagctctgaagtgtttgtatatttgaaatacctcaataaagagagagctcattgactgtaaa

SEQ ID NO: 291234 - DNA, 1850 bp, Homo sapiens
aaaggctcagggttgctcccgcgtttcggttcagtgacgtcgtaaattggaatgaggcatccagtttagcaacagcagagatgacgactctgcgattctgagagtccctggcgagcccgggctagcgaaaagtgggggcagaacgaactacatctcccatcgtgccaggaggcggtcccgcccgtttccccctgggagttgtagtctaaccccctcggatccaacagcaacctcagtgcgtgaactctgttatccagaaggcctcgccctgccgccgccgaagctggaattcgtcggctagtagttctcgccggcaactagaggaacctgttggcgtggcccagaaggcttagcgggattgcacgaggttagttgctaagcaaggtggtctttggtcaactgccgcctggaccaaggcaacaggaagtggatctcacaagatccttttcatttcggaactcaaagcagacatactctggggttcccatcattgctgccaatatggatactgtgggcacctttgagatggccaaggttctctgtaagttctctctcttcactgctgtccataagcactatagcctcgttcagtggcaagagtttgctggccagaatcctgactgtcttgagcatctggctgccagctcaggcacaggctcttctgactttgagcagctggaacagatcctggaagctattccccaggtgaagtatatatgcctggatgtggcaaatggctactctgaacactttgttgaatttgtaaaagatgtacggaagcgcttcccccagcacaccatcatggcagggaatgtggtaacaggagagatggtagaagagctcatcctttctggggctgacatcatcaaagtgggaattgggccaggctctgtgtgtactactcggaagaaaactggagtggggtatccacagctcagcgcagtgatggagtgtgcagatgctgctcatggcctcaaaggccacatcatttcagatggaggttgcagctgtcctggggatgtggccaaggcttttggggcaggagctgacttcgtgatgctgggtggcatgctggctgggcacagtgagtcaggtggtgagctcatcgagagggatggcaagaagtacaagctcttctatggaatgagttctgaaatggccatgaagaagtatgctgggggcgtggctgagtacagagcctcagagggaaagacagtggaagttccttttaaaggagatgtggaacataccatccgagacatcctaggagggatccgctctacgtgtacctatgtgggagcagctaagctcaaagagttgagcaggagaactaccttcatccgagtcacccagcaggtgaatccaatcttcagtgaggcgtgctagacctgagcagttctaccctcccaaggcaccagtactctaccatggggcatcccaagtggggtcctcacccatcccagctactgcagctctgtattactttgtcatttcctgttgtctcactcctgagggctcctgcagtaactctgtacttctctatctgcacacacaaaatgcccaaggcactcactggggaggaagcaaggaagcaaacagtctgagaaaatgatgcaagaaaatcaaatgggaatctggggacccaacacaacatcctgaagattattaaaaggaaaagatgctgattggtacataaatcttttacatggccttggtctagaggaggcaggcttttagaatcatgttttgttaatccgcttcactaaattggaccttcacatatctaaaaagctctgaagtgtttgtatatttgaaatacctcaataaagagagagctcattgactgtaaa

SEQ ID NO: 291235 - DNA, 1671 bp, Homo sapiens
aaaggctcagggttgctcccgcgtttcggttcagtgacgtcgtaaattggaatgaggcatccagtttagcaacagcagagatgacgactctgcgattctgagagtccctggcgagcccgggctagcgaaaagtgggggcagaacgaactacatctcccatcgtgccaggaggcggtcccgcccgtttccccctgggagttgtagtctaaccccctcggatccaacagcaacctcagtgcgtgaactctgttatccagaaggcctcgccctgccgccgccgaagctggaattcgtcggctagtagttctcgccggcaactagaggaacctgttggcgtggcccagaaggcttagcgggattgcacgagttctctctcttcactgctgtccataagcactatagcctcgttcagtggcaagagtttgctggccagaatcctgactgtcttgagcatctggctgccagctcaggcacaggctcttctgactttgagcagctggaacagatcctggaagctattccccaggtgaagtatatatgcctggatgtggcaaatggctactctgaacactttgttgaatttgtaaaagatgtacggaagcgcttcccccagcacaccatcatggcagggaatgtggtaacaggagagatggtagaagagctcatcctttctggggctgacatcatcaaagtgggaattgggccaggctctgtgtgtactactcggaagaaaactggagtggggtatccacagctcagcgcagtgatggagtgtgcagatgctgctcatggcctcaaaggccacatcatttcagatggaggttgcagctgtcctggggatgtggccaaggcttttggggcaggagctgacttcgtgatgctgggtggcatgctggctgggcacagtgagtcaggtggtgagctcatcgagagggatggcaagaagtacaagctcttctatggaatgagttctgaaatggccatgaagaagtatgctgggggcgtggctgagtacagagcctcagagggaaagacagtggaagttccttttaaaggagatgtggaacataccatccgagacatcctaggagggatccgctctacgtgtacctatgtgggagcagctaagctcaaagagttgagcaggagaactaccttcatccgagtcacccagcaggtgaatccaatcttcagtgaggcgtgctagacctgagcagttctaccctcccaaggcaccagtactctaccatggggcatcccaagtggggtcctcacccatcccagctactgcagctctgtattactttgtcatttcctgttgtctcactcctgagggctcctgcagtaactctgtacttctctatctgcacacacaaaatgcccaaggcactcactggggaggaagcaaggaagcaaacagtctgagaaaatgatgcaagaaaatcaaatgggaatctggggacccaacacaacatcctgaagattattaaaaggaaaagatgctgattggtacataaatcttttacatggccttggtctagaggaggcaggcttttagaatcatgttttgttaatccgcttcactaaattggaccttcacatatctaaaaagctctgaagtgtttgtatatttgaaatacctcaataaagagagagctcattgactgtaaa

SEQ ID NO: 291236 - DNA, 1941 bp, Homo sapiens
gtttgatgagtcattatgtccttgaactttattaaaatggactgaatgaaacagattttttagcttgatccatgtccccaactaggaaatttgtccttttttccactagagatggagacagggtagggtagccccttatcagctcttatcaaccttaaggcattacctttggtgagcatccagatctactgaattactgctggtaaatgaacgagaacataaccaaaaatagtttagtactaggttaccttaggaggaggggctgagtcagtgcagagaaacacaggctccatccagcttcttcatggttctttcatgtctgctgcctgtcccactgcaccagcagcttgtcaccttttaagtcagaagcagtgaatgtgctggcagatgaaatccaacccagatcactcagtactttggtgggaaatctgacaagtactagcttatggtaaaaagccctactagtatttgtagagagaagaaaggttgaactcaaatcccagctcaacctgagttctttgacttgtttcctccccaacttcaatcatgtcctccctcagatagaataggtctgtttctagaaaagagaccttaataaagttttctcccttttgatgcttctttgtcttctccccagttctctctcttcactgctgtccataagcactatagcctcgttcagtggcaagagtttgctggccagaatcctgactgtcttgagcatctggctgccagctcaggcacaggctcttctgactttgagcagctggaacagatcctggaagctattccccaggtgaagtatatatgcctggatgtggcaaatggctactctgaacactttgttgaatttgtaaaagatgtacggaagcgcttcccccagcacaccatcatggcagggaatgtggtaacaggagagatggtagaagagctcatcctttctggggctgacatcatcaaagtgggaattgggccaggctctgtgtgtactactcggaagaaaactggagtggggtatccacagctcagcgcagtgatggagtgtgcagatgctgctcatggcctcaaaggccacatcatttcagatggaggttgcagctgtcctggggatgtggccaaggcttttggggcaggagctgacttcgtgatgctgggtggcatgctggctgggcacagtgagtcaggtggtgagctcatcgagagggatggcaagaagtacaagctcttctatggaatgagttctgaaatggccatgaagaagtatgctgggggcgtggctgagtacagagcctcagagggaaagacagtggaagttccttttaaaggagatgtggaacataccatccgagacatcctaggagggatccgctctacgtgtacctatgtgggagcagctaagctcaaagagttgagcaggagaactaccttcatccgagtcacccagcaggtgaatccaatcttcagtgaggcgtgctagacctgagcagttctaccctcccaaggcaccagtactctaccatggggcatcccaagtggggtcctcacccatcccagctactgcagctctgtattactttgtcatttcctgttgtctcactcctgagggctcctgcagtaactctgtacttctctatctgcacacacaaaatgcccaaggcactcactggggaggaagcaaggaagcaaacagtctgagaaaatgatgcaagaaaatcaaatgggaatctggggacccaacacaacatcctgaagattattaaaaggaaaagatgctgattggtacataaatcttttacatggccttggtctagaggaggcaggcttttagaatcatgttttgttaatccgcttcactaaattggaccttcacatatctaaaaagctctgaagtgtttgtatatttgaaatacctcaataaagagagagctcattgactgtaaa

SEQ ID NO: 291237 - DNA, 1970 bp, Homo sapiens
gtttgatgagtcattatgtccttgaactttattaaaatggactgaatgaaacagattttttagcttgatccatgtccccaactaggaaatttgtccttttttccactagagatggagacagggtagggtagccccttatcagctcttatcaaccttaaggcattacctttggtgagcatccagatctactgaattactgctggtaaatgaacgagaacataaccaaaaatagtttagtactaggttaccttaggaggaggggctgagtcagtgcagagaaacacaggctccatccagcttcttcatggttctttcatgtctgctgcctgtcccactgcaccagcagcttgtcaccttttaagtcagaagcagtgaatgtgctggcagatgaaatccaacccagatcactcagtactttggtgggaaatctgacaagtactagcttatggtaaaaagccctactagtatttgtagagagaagaaaggttgaactcaaatcccagctcaacctgagttctttgacttgtttcctccccaacttcaatcatgtcctccctcagatagaataggtctgtttctagaaaagagaccttaataaagttttctcccttttgatgcttctttgtcttctccccagttctctctcttcactgctgtccataagcactatagcctcgttcagtggcaagagtttgctggccagaatcctgactgtcttgagcatctggctgccagctcaggcacaggctcttctgactttgagcagctggaacagatcctggaagctattccccaggtgaagtatatatgcctggatgtggcaaatggctactctgaacactttgttgaatttgtaaaagatgtacggaagcgcttcccccagcacaccatcatggatgctgtatttcaattgctctgtctcaggcagggaatgtggtaacaggagagatggtagaagagctcatcctttctggggctgacatcatcaaagtgggaattgggccaggctctgtgtgtactactcggaagaaaactggagtggggtatccacagctcagcgcagtgatggagtgtgcagatgctgctcatggcctcaaaggccacatcatttcagatggaggttgcagctgtcctggggatgtggccaaggcttttggggcaggagctgacttcgtgatgctgggtggcatgctggctgggcacagtgagtcaggtggtgagctcatcgagagggatggcaagaagtacaagctcttctatggaatgagttctgaaatggccatgaagaagtatgctgggggcgtggctgagtacagagcctcagagggaaagacagtggaagttccttttaaaggagatgtggaacataccatccgagacatcctaggagggatccgctctacgtgtacctatgtgggagcagctaagctcaaagagttgagcaggagaactaccttcatccgagtcacccagcaggtgaatccaatcttcagtgaggcgtgctagacctgagcagttctaccctcccaaggcaccagtactctaccatggggcatcccaagtggggtcctcacccatcccagctactgcagctctgtattactttgtcatttcctgttgtctcactcctgagggctcctgcagtaactctgtacttctctatctgcacacacaaaatgcccaaggcactcactggggaggaagcaaggaagcaaacagtctgagaaaatgatgcaagaaaatcaaatgggaatctggggacccaacacaacatcctgaagattattaaaaggaaaagatgctgattggtacataaatcttttacatggccttggtctagaggaggcaggcttttagaatcatgttttgttaatccgcttcactaaattggaccttcacatatctaaaaagctctgaagtgtttgtatatttgaaatacctcaataaagagagagctcattgactgtaaa

SEQ ID NO: 291238 - DNA, 1126 bp, Homo sapiens
taggctaggtacgaggccggtgtgaattcggccgaggaaaagatgtacggaatcgcttcccccagcacaccatcatggcagcagggaatgtggtaacaggagagatggtagaagagctcatcctttctggggctgacatcatcaaagtgggaattgggccaggctctgtgtgtactactcggaagaaaactggagtggggtatccacagctcagcgcagtgatggagtgtgcagatgctgctcatggcctcaaaggccacatcatttcagatggaggttgcagctgtcctggggatgtggccaaggcttttggggcaggagctgacttcgtgatgctgggtggcatgctggctgggcacagtgagtcaggtggtgagctcatcgagagggatggcaagaagtacaagctcttctatggaatgagttctgaaatggccatgaagaagtatgctgggggcgtggctgagtacagagcctcagagggaaagacagtggaagttccttttaaaggagatgtggaacataccatccgagacatcctaggagggatccgctctacgtgtacctatgtgggagcagctaagctcaaagagttgagcaggagaactaccttcatccgagtcacccagcaggtgaatccaatcttcagtgaggcgtgctagacctgagcagttctaccctcccaaggcaccagtactctaccatggggcatcccaagtggggtcctcacccatcccagctactgcagctctgtattactttgtcatttcctgttgtctcactcctgagggctcctgcagtaactctgtacttctctatctgcacacacaaaatgcccaaggcactcactggggaggaagcaaggaagcaaacagtctgagaaaatgatgcaagaaaatcaaatgggaatctggggacccaacacaacatcctgaagattattaaaaggaaaagatgctgattggtacataaatcttttacatggccttggtctagaggaggcaggcttttagaatcatgttttgttaatccgcttcactaaattggaccttcacatatctaaaaagctctgaagtgtttgtatatttgaaatacctcaataaagagagagctcattgactgtaaa

SEQ ID NO: 291239 - DNA, 2291 bp, Homo sapiens
aaaggctcagggttgctcccgcgtttcggttcagtgacgtcgtaaattggaatgaggcatccagtttagcaacagcagagatgacgactctgcgattctgagagtccctggcgagcccgggctagcgaaaagtgggggcagaacgaactacatctcccatcgtgccaggaggcggtcccgcccgtttccccctgggagttgtagtctaaccccctcggatccaacagcaacctcagtgcgtgaactctgttatccagaaggcctcgccctgccgccgccgaagctggaattcgtcggctagtagttctcgccggcaactagaggaacctgttggcgtggcccagaaggcttagcgggattgcacgagccctcagattcatcgctaccccgaggctaagcgccatgcctcatattgacaacgatgtgaaactggacttcaaggatgtccttttgaggcccaaacgcagtacccttaagtctcgaagtgaggtggatctcacaagatccttttcatttcggaactcaaagcagacatactctggggttcccatcattgctgccaatatggatactgtgggcacctttgagatggccaaggttctctgtaagttctctctcttcactgctgtccataagcactatagcctcgttcagtggcaagagtttgctggccagaatcctgactgtcttgagcatctggctgccagctcaggcacaggctcttctgactttgagcagctggaacagatcctggaagctattccccaggtgaagtatatatgcctggatgtggcaaatggctactctgaacactttgttgaatttgtaaaagatgtacggaagcgcttcccccagcacaccatcatggcagggaatgtggtaacaggagagatggtagaagagctcatcctttctggggctgacatcatcaaagtgggaattgggccaggctctgtgtgtactactcggaagaaaactggagtggggtatccacagctcagcgcagtgatggagtgtgcagatgctgctcatggcctcaaaggccacatcatttcagatggaggttgcagctgtcctggggatgtggccaaggcttttggggcaggagctgacttcgtgatgctgggtggcatgctggctgggcacagtgagtcaggtggtgagctcatcgagagggatggcaagaagtacaagctcttctatggaatgagttctgaaatggccatgaagaagtatgctgggggcgtggctgagtacagagcctcagagggaaagacagtggaagttccttttaaaggagatgtggaacataccatccgagacatcctaggagggatccgctctacgtgtacctatgtgggagcagctaagctcaaagagttgagcaggagaactaccttcatccgagtcacccagcaggtgaatccaatcttcagtgaggcgtgctagacctgagcagttctaccctcccaaggcaccagtactctaccatggggcatcccaagtggggtcctcacccatcccagctactgcagctctgtattactttgtcatttcctgttgtctcactcctgagggctcctgcagtaactctgtacttctctatctgcacacacaaaatgcccaaggcactcactggggaggaagcaaggaagcaaacagtctgagaaaatgatgcaagaaaatcaaatgggaatctggggacccaacacaacatcctgaagattattaaaaggaaaagatgctgattggtacataaatcttttacatggccttggtctagaggaggcaggcttttagaatcatgttttgttaatccgcttcactaaattggaccttcacatatctaaaaagctctgaagtgtttgtatatttgaaatacctcaataaagagagagctcattgactgtaaataaaaaaaaaaaaaaaaaaaaaaaaaaaaaaaaaaaaaaaaaaaaaaaaaaaaaaaaaaaaaaaaaaaaaaaaaaaaaaaacaaaaaaacaaaaaacaaaagagaaacaaaaaaaaaaaagagagggggagggcgccgccacggaagcccccccggcgggggaacccccaggggccacacacaaaggagacgggggcgcacacaaaggaaaagccgagacacaattatgtacacgcgagcaaaggaagagcagaacaactagaataaccaagccagcagacaagcaacaccacacaacaagcggacagaccaacatgacaccgagtggtaggaacgagaccaaatcacgcggttgctaggggggagggcaacaacaat

SEQ ID NO: 291240 - DNA, 2374 bp, Homo sapiens
aaaggctcagggttgctcccgcgtttcggttcagtgacgtcgtaaattggaatgaggcatccagtttagcaacagcagagatgacgactctgcgattctgagagtccctggcgagcccgggctagcgaaaagtgggggcagaacgaactacatctcccatcgtgccaggaggcggtcccgcccgtttccccctgggagttgtagtctaaccccctcggatccaacagcaacctcagtgcgtgaactctgttatccagaaggcctcgccctgccgccgccgaagctggaattcgtcggctagtagttctcgccggcaactagaggaacctgttggcgtggcccagaaggcttagcgggattgcacgagccctcagattcatcgctaccccgaggctaagcgccatgcctcatattgacaacgatgtgaaactggacttcaaggatgtccttttgaggcccaaacgcagtacccttaagtctcgaagtgaggtggatctcacaagatccttttcatttcggaactcaaagcagacatactctggggttcccatcattgctgccaatatggatactgtgggcacctttgagatggccaaggttctctgtaagttctctctcttcactgctgtccataagcactatagcctcgttcagtggcaagagtttgctggccagaatcctgactgtcttgagcatctggctgccagctcaggcacaggctcttctgactttgagcagctggaacagatcctggaagctattccccaggtgaagtatatatgcctggatgtggcaaatggctactctgaacactttgttgaatttgtaaaagatgtacggaagcgcttcccccagcacaccatcatggcagggaatgtggtaacaggagagatggtagaagagctcatcctttctggggctgacatcatcaaagtgggaattgggccaggctctgtgtgtactactcggaagaaaactggagtggggtatccacagctcagcgcagtgatggagtgtgcagatgctgctcatggcctcaaaggccacatcatttcagatggaggttgcagctgtcctggggatgtggccaaggcttttggggcaggagctgacttcgtgatgctgggtggcatgctggctgggcacagtgagtcaggtggtgagctcatcgagagggatggcaagaagtacaagctcttctatggaatgagttctgaaatggccatgaagaagtatgctgggggcgtggctgagtacagagcctcagagggaaagacagtggaagttccttttaaaggagatgtggaacataccatccgagacatcctaggagggatccgctctacgtgtacctatgtgggagcagctaagctcaaagagttgagcaggagaactaccttcatccgagtcacccagcaggtgaatccaatcttcagtgaggcgtgctagacctgagcagttctaccctcccaaggcaccagtactctaccatggggcatcccaagtggggtcctcacccatcccagctactgcagctctgtattactttgtcatttcctgttgtctcactcctgagggctcctgcagtaactctgtacttctctatctgcacacacaaaatgcccaaggcactcactggggaggaagcaaggaagcaaacagtctgagaaaatgatgcaagaaaatcaaatgggaatctggggacccaacacaacatcctgaagattattaaaaggaaaagatgctgattggtacataaatcttttacatggccttggtctagaggaggcaggcttttagaatcatgttttgttaatccgcttcactaaattggaccttcacatatctaaaaagctctgaagtgttgattattggaaaccttaataggaggagttaatgcctgtaagaaaaataaaacctatttcccaactcataatttcccaaactaaaaaataatgggtaattgccatatcccttatggggggttccaatatggccgcttttaaacggggctggaaaaccggggtccacctaaaggctgggaaaaccctttccccttgctaaagccccccatcgctttccaaattgccccttatggcatgaatgtggcctaaattgtcaatcgctatatttgtaacgctttttacaccgggccacgggaactcttatataagaaccccctgacgttggtgtccttaacacaccttattaacgcgctcttcctcgggaaactttaggggtcactcttggtccctcacatttttcggcgccataaatatcctgagcctccctctcttctcggcctcgtgaagaaggaccacttcttcgtcactcaggtgtatccaccttcatctctctaccctctctttctccc

SEQ ID NO: 291241 - DNA, 1668 bp, Homo sapiens
gcagggtatggaggtggcagagatggattagaattcctgggttcttgttggctttgagttgggctgttgggacatcgctgagggcttgggaaatccatgttgtattcatagtgctccttactttgcaggatggaggttgcagctgtcctggggatgtggccaaggcttttggtaaggagcttgagggcacagaaggatgattctatacaagaggatgaatcacctctgagggtctagggtcaggctaagagaggctcaggaagtcattcagattctttcataatatgaattagtgactccgaagtctatggtatcatctggggcagccagcaggggacatctgagactccaagtgtgggccagggccatctgaccatctcctagattgctgcacagtgcagactcctgagccccagccatacctaaaaataggctctgaggaatgggacagcacatctgcatttttcattttgcacagcttcccaggagatcattactcccattaaagttggggatctttgctcttgggacacatgaaatgagtcttatttagctgggcacagtaaaatcaaatgaccagacgatgatggtaaaaacagcaaaaggagaaagcaaaagccaggcagggactctccagaggctcttttttaaatcttggggaaatcatacccactgaggaatagaggccagggcagatcaggcctgcgtggattgtgggtcagctagggaagcagaaggaggaagacgctggaatcattgtcaggactgagaatatggtgtgagttgcttttgagggtggccatgtgagcaccttggccagattaatctctttcccccctccatgatggtggcaggggcaggagctgacttcgtgatgctgggtggcatgctggctgggcacagtgagtcaggtggtgagctcatcgagagggatggcaagaagtacaagctcttctatggaatgagttctgaaatggccatgaagaagtatgctgggggcgtggctgagtacagagcctcagagggaaagacagtggaagttccttttaaaggagatgtggaacataccatccgagacatcctaggagggatccgctctacgtgtacctatgtgggagcagctaagctcaaagagttgagcaggagaactaccttcatccgagtcacccagcaggtgaatccaatcttcagtgaggcgtgctagacctgagcagttctaccctcccaaggcaccagtactctaccatggggcatcccaagtggggtcctcacccatcccagctactgcagctctgtattactttgtcatttcctgttgtctcactcctgagggctcctgcagtaactctgtacttctctatctgcacacacaaaatgcccaaggcactcactggggaggaagcaaggaagcaaacagtctgagaaaatgatgcaagaaaatcaaatgggaatctggggacccaacacaacatcctgaagattattaaaaggaaaagatgctgattggtacataaatcttttacatggccttggtctagaggaggcaggcttttagaatcatgttttgttaatccgcttcactaaattggaccttcacatatctaaaaagctctgaagtgtttgtatatttgaaatacctcaataaagagagagctcattgactgtaaa

SEQ ID NO: 291242 - DNA, 770 bp, Homo sapiens
ctgtaactcatctgatgagggaataggcggggaatctatcatagcacttcaacttgcagtgcgttctagactatggcacctgaccgatcgtattcagaagcgtccttgcttggaaaagcctcagagggaaagacagtggaagttccttttaaaggagatgtggaacataccatccgagacatcctaggagggatccgctctacgtgtacctatgtgggagcagctaagctcaaagagttgagcaggagaactaccttcatccgagtcacccagcaggtgaatccaatcttcagtgaggcgtgctagacctgagcagttctaccctcccaaggcaccagtactctaccatggggcatcccaagtggggtcctcacccatcccagctactgcagctctgtattactttgtcatttcctgttgtctcactcctgagggctcctgcagtaactctgtacttctctatctgcacacacaaaatgcccaaggcactcactggggaggaagcaaggaagcaaacagtctgagaaaatgatgcaagaaaatcaaatgggaatctggggacccaacacaacatcctgaagattattaaaaggaaaagatgctgattggtacataaatcttttacatggccttggtctagaggaggcaggcttttagaatcatgttttgttaatccgcttcactaaattggaccttcacatatctaaaaagctctgaagtgtttgtatatttgaaatacctcaataaagagagagctcattgactgtaaa

SEQ ID NO: 291243 - DNA, 1437 bp, Homo sapiens
aaaggctcagggttgctcccgcgtttcggttcagtgacgtcgtaaattggaatgaggcatccagtttagcaacagcagagatgacgactctgcgattctgagagtccctggcgagcccgggctagcgaaaagtgggggcagaacgaactacatctcccatcgtgccaggaggcggtcccgcccgtttccccctgggagttgtagtctaaccccctcggatccaacagcaacctcagtgcgtgaactctgttatccagaaggcctcgccctgccgccgccgaagctggaattcgtcggctagtagttctcgccggcaactagaggaacctgttggcgtggcccagaaggcttagcgggattgcacgagccctcagattcatcgctaccccgaggctaagcgccatgcctcatattgacaacgatgtgaaactggacttcaaggatgtccttttgaggcccaaacgcagtacccttaagtctcgaagtgaggtggatctcacaagatccttttcatttcggaactcaaagcagacatactctggggttcccatcattgctgccaatatggatactgtgggcacctttgagatggccaaggttctctgtaagttctctctcttcactgctgtccataagcactatagcctcgttcagtggcaagagtttgctggccagaatcctgactgtcttgagcatctggctgccagctcaggcacaggctcttctgactttgagcagctggaacagatcctggaagctattccccaggtgaagtatatatgcctggatgtggcaaatggctactctgaacacttttaaaggagatgtggaacataccatccgagacatcctaggagggatccgctctacgtgtacctatgtgggagcagctaagctcaaagagttgagcaggagaactaccttcatccgagtcacccagcaggtgaatccaatcttcagtgaggcgtgctagacctgagcagttctaccctcccaaggcaccagtactctaccatggggcatcccaagtggggtcctcacccatcccagctactgcagctctgtattactttgtcatttcctgttgtctcactcctgagggctcctgcagtaactctgtacttctctatctgcacacacaaaatgcccaaggcactcactggggaggaagcaaggaagcaaacagtctgagaaaatgatgcaagaaaatcaaatgggaatctggggacccaacacaacatcctgaagattattaaaaggaaaagatgctgattggtacataaatcttttacatggccttggtctagaggaggcaggcttttagaatcatgttttgttaatccgcttcactaaattggaccttcacatatctaaaaagctctgaagtgtttgtatatttgaaatacctcaataaagagagagctcattgactgtaaa

SEQ ID NO: 291244 - DNA, 1777 bp, Homo sapiens
aaaggctcagggttgctcccgcgtttcggttcagtgacgtcgtaaattggaatgaggcatccagtttagcaacagcagagatgacgactctgcgattctgagagtccctggcgagcccgggctagcgaaaagtgggggcagaacgaactacatctcccatcgtgccaggaggcggtcccgcccgtttccccctgggagttgtagtctaaccccctcggatccaacagcaacctcagtgcgtgaactctgttatccagaaggcctcgccctgccgccgccgaagctggaattcgtcggctagtagttctcgccggcaactagaggaacctgttggcgtggcccagaaggcttagcgggattgcacgagccctcagattcatcgctaccccgaggctaagcgccatgcctcatattgacaacgatgtgaaactggacttcaaggatgtccttttgaggcccaaacgcagtacccttaagtctcgaagtgaggtggatctcacaagatccttttcatttcggaactcaaagcagacatactctggggttcccatcattgctgccaatatggatactgtgggcacctttgagatggccaaggttctctgtaagttctctctcttcactgctgtccataagcactatagcctcgttcagtggcaagagtttgctggccagaatcctgactgtcttgagcatctggctgccagctcaggcacaggctcttctgactttgagcagctggaacagatcctggaagctattccccaggtgaagtatatatgcctggatgtggcaaatggctactctgaacactttgttgaatttgtaaaagatgtacggaagcgcttcccccagcacaccatcatggcagggaatgtggtaacaggagagatggtagaagagctcatcctttctggggctgacatcatcaaagtgggaattgggccaggctctgtgtgtactactcggaagaaaactggagtggggtatccacagctcagcgcagtgatggagtgtgcagatgctgctcatggcctcaaaggccacatcatttcagatggaggttgcagctgtcctggggatgtggccaaggcttttggggcaggagctgacttcgtgatgctgggtggcatgctggctgggcacagtgagtcaggtggtgagctcatcgagagggatggcaagaagtacaagctcttctatggaatgagttctgaaatggccatgaagaagtatgctgggggcgtggctgagtacagagcctcagagggaaagacagtggaagttccttttaaaggagatgtggaacataccatccgagacatcctaggagggatccgctctacgtgtacctatgtgggagcagctaagctcaaagagttgagcaggagaactaccttcatccgagtcacccagcaggtgaatccaatcttcagtgagggctcctgcagtaactctgtacttctctatctgcacacacaaaatgcccaaggcactcactggggaggaagcaaggaagcaaacagtctgagaaaatgatgcaagaaaatcaaatgggaatctggggacccaacacaacatcctgaagattattaaaaggaaaagatgctgattggtacataaatcttttacatggccttggtctagaggaggcaggcttttagaatcatgttttgttaatccgcttcactaaattggaccttcacatatctaaaaagctctgaagtgtttgtatatttgaaatacctcaataaagagagagctcattgactgtaaa

SEQ ID NO: 291245 - DNA, 1617 bp, Homo sapiens
aaaggctcagggttgctcccgcgtttcggttcagtgacgtcgtaaattggaatgaggcatccagtttagcaacagcagagatgacgactctgcgattctgagagtccctggcgagcccgggctagcgaaaagtgggggcagaacgaactacatctcccatcgtgccaggaggcggtcccgcccgtttccccctgggagttgtagtctaaccccctcggatccaacagcaacctcagtgcgtgaactctgttatccagaaggcctcgccctgccgccgccgaagctggaattcgtcggctagtagttctcgccggcaactagaggaacctgttggcgtggcccagaaggcttagcgggattgcacgagccctcagattcatcgctaccccgaggctaagcgccatgcctcatattgacaacgatgtgaaactggacttcaaggatgtccttttgaggcccaaacgcagtacccttaagtctcgaagtgaggtggatctcacaagatccttttcatttcggaactcaaagcagacatactctggggttcccatcattgctgccaatatggatactgtgggcacctttgagatggccaaggttctctgtaagttctctctcttcactgctgtccataagcactatagcctcgttcagtggcaagagtttgctggccagaatcctgactgtcttgagcatctggctgccagctcaggcacaggctcttctgactttgagcagctggaacagatcctggaagctattccccaggtgaagtatatatgcctggatgtggcaaatggctactctgaacactttgttgaatttgtaaaagatgtacggaagcgcttcccccagcacaccatcatggcagggaatgtggtaacaggagagatggtagaagagctcatcctttctggggctgacatcatcaaagtgggaattgggccaggctctgtgtgtactactcggaagaaaactggagtggggtatccacagctcagcgcagtgatggagtgtgcagatgctgctcatggcctcaaaggccacatcatttcagatggaggttgcagctgtcctggggatgtggccaaggcttttggggcaggagctgacttcgtgatgctgggtggcatgctggctgggcacagtgagtcaggtggtgagctcatcgagagggatggcaagaagtacaagctcttctatggaatgagttctgaaatggccatgaagaagtatgctgggggcgtggctgagtacagagcctcagagggaaagacagtggaagttccttttaaaggagatgtggaacataccatccgagacatcctaggagggatccgctctacgtgtacctatgtgggagcagctaagctcaaagagttgagcaggagaactaccttcatccgagtcacccagcaggtgaatccaatcttcagtgaggcgtgctagacctgagcagttctaccctcccaaggcaccagtactctaccatggggcatcccaagtggggtcctcacccatcccagctactgcagctctgtattactttgtcatttccctggggccacactccgagagggccccgggaaaaaactttgaccctttttttttgggcca

SEQ ID NO: 291246 - DNA, 1286 bp, Homo sapiens
cccgtcgccaacattccttcgttcccctaaatcagcctcttgccccattgctctttgcaggggtagaagaaggaagtgtagcggggtaaggaatgcaccgtcagggtctctcacaaccctttcccagctctcctccccaacaaacagtacctgggatggagccctagggtaatcgcagccacgggatgggtcgaggtgacaggcttcagggaccacacttcggcctttgcccgaccttccacaacttaagcgaagagaggccaccagccgtaacagggcgttaaagcccaggggaagattggtccttatgacttcctgccttccagccctcagattcatcgctaccccgaggctaagcgccatgcctcatattgacaacgatgtgaaactggacttcaaggatgtccttttgaggcccaaacgcagtacccttaagtctcgaagtgaggtggatctcacaagatccttttcatttcggaactcaaagcagacatactctggggttcccatcattgctgccaatatggatactgtgggcacctttgagatggccaaggttctctgtaagttctctctcttcactgctgtccataagcactatagcctcgttcagtggcaagagtttgctggccagaatcctgactgtcttgagcatctggctgccagctcaggcacaggctcttctgactttgagcagctggaacagatcctggaagctattccccaggtgaagtatatatgcctggatgtggcaaatggctactctgaacactttgttgaatttgtaaaagatgtacggaagcgcttcccccagcacaccatcatggcagggaatgtggtaacaggagagatggtagaagagctcatcctttctggggctgacatcatcaaagtgggaattgggccagctctgtattactttgtcatttcctgttgtctcactcctgagggctcctgcagtaactctgtacttctctatctgcacacacaaaatgcccaaggcactcactggggaggaagcaaggaagcaaacagtctgagaaaatgatgcaagaaaatcaaatgggaatctggggacccaacacaacatcctgaagattattaaaaggaaaagatgctgattggtacataaatcttttacatggccttggtctagaggaggcaggcttttagaatcatgttttgttaatccgcttcactaaattggaccttcacatatctaaaaagctctgaagtgtttgtatatttgaaatacctcaataaagagagagctcattgactgtaaa

SEQ ID NO: 291247 - DNA, 846 bp, Homo sapiens
cccgtcgccaacattccttcgttcccctaaatcagcctcttgccccattgctctttgcaggggtagaagaaggaagtgtagcggggtaaggaatgcaccgtcagggtctctcacaaccctttcccagctctcctccccaacaaacagtacctgggatggagccctagggtaatcgcagccacgggatgggtcgaggtgacaggcttcagggaccacacttcggcctttgcccgaccttccacaacttaagcgaagagaggccaccagccgtaacagggcgttaaagcccaggggaagattggtccttatgacttcctgccttccagccctcagattcatcgctaccccgaggctaagcgccatgcctcatattgacaacgatgtgaaactggacttcaaggatgtccttttgaggcccaaacgcagtacccttaagtctcgaagtgaggtggatctcacaagatccttttcatttcggaactcaaagcagacatactctggggttcccatcattgctgccaatatggatactgtgggcacctttgagatggccaaggttctctgtaagttctctctcttcactgctgtccataagcactatagcctcgttcagtggcaagagtttgctggccagaatcctgactgtcttgagcatctggctgccagctcaggcacaggctcttctgactttgagcagctggaacagatcctggaagctattccccaggtgaagtatatatgcctggatgtggcaaatggctactctgaacactttgttgaatttgtaaaagatgtacggaagcgcttcccccagcacaccatcatgcagggaatgggggatcctct

SEQ ID NO: 291248 - DNA, 384 bp, Homo sapiens
tcaatttcctgttcatatctgcaggtggatctcacaagatccttttcatttcggaactcaaagcagacatactctggggttcccatcattgctgccaatatggatactgtgggcacctttgagatggccaaggttctctgtaagaggtagggctttcctcatgccccatccctattggtgtccagttagcccagctgactgcagaggtgtttgcatccccacccccatgcccagtcagttctctggcagttagcagtcaggatgctctgatttacggttttttccactactgaagccctttatctgataagttcaaaaggccatctgaattagtgagattcaaagctaagttctgctccgatatttctgatatatgaacagaat

SEQ ID NO: 291249 - DNA, 2555 bp, Homo sapiens
tacaaagtccaagataggtgaggggtttcaaatttctcagtagtgagggagtataagtacggggatgatggagaaatgaagcaggagaggtaaaggatgaggtcggactatgggacttatgcctgggagactccttccttcaacaactctagtgctggtggaggacctgagagatcatctacagaagttcaatcccttattttgttaaaaagagaccggataggtaggggagggaagagaagtgactcaagtttgacaaatccaaacctgggctcccctctcctgcgcctcgcccgctattctttccactcggccagcgtgactccaagacgcgccactacccttctactagccggctgcccggcctctcctccacttaccctggccactggggcgctcctctcatcagtgtcccaggcccagaagccccgcccacgccaggcataggccccgcccctgtatcccaagaccctgcctcctcttgcggtggggggaaagcggcctcttactctaggcctttcggtttgcgcgagcgggcaggaaagcgtgcgtgcggctaagagagtgggcgctctcgcggccgctgacgatggaagaactggagcaaggcctgttgatgcagccatgggcgtggctacagcttgcagagaactccctcttggccaaggtttttatcaccaagcagggctatgccttgttggtttcagatcttcaacaggtgtggcatgaacaggtggacactagtgtggtcagccagcgagccaaggagctgaacaagcggctcactgctcctcctgcagctttcctctgtcatttggataatctccttcgcccattgttgaaggacgctgctcaccctagcgaagctaccttctcctgtgattgtgtggcagatgcactgattctacgggtgcgaagtgagctctctggcctccccttctattggaatttccactgcatgctagctagtccttccctggtctcccaacatttgattcgtcctctgatgggcatgagtctggcattacagtgccaagtgagggagctagcaacgttacttcatatgaaagacctagagatccaagactaccaggagagtggggctacgctgattcgagatcgattgaagacagaaccatttgaagaaaattccttcttggaacaatttatgatagagaaactgccagaggcatgcagcattggtgatggaaagccctttgtcatgaatctgcaggatctgtatatggcagtcaccacacaagaggtccaagtgggacagaagcatcaaggcgctggagatcctcatacctcaaacagtgcttccctgcaaggaatcgatagccaatgtgtaaaccagccagaacaactggtctcctcagccccaaccctctcagcacctgagaaagagtccacgggtacttcaggccctctgcagagacctcagctgtcaaaggtcaagaggaagaagccaaggggtctcttcagttaatctgttgtggcctcagctgctgaggatggacttggagaatagcttccaagcttcaccttgaaagaagcttacatggcagcaatatttctaaaatagtgatacagtcagaggcctcctgtaagggcgagagaactgaagttgatgttgacaggcccacagggaattggccttccctgttcaagtggaagccagtctctgagaatcccgtgctctcctctcttttggtggaggttctgtaggttcaggtttctaccatggactttaggtatatagggcaagtcagcaagaaagcaccacacactcaggaagccttgtctacctttccctagcgtctctagccagccagccccagatactcctcagagacccacttctctcttttgcatggaataaaaagcactcacagtccctgcttttgggattacttatgctgtggaactcataacccaattcacttccttcactgggtcccaccccattgttgtctctggatgaagtctagccatcagtctggtccttcagattcttcgtaaacttttctgcagttgccagagctaagtctccatttggaaactttgatctcaagaactctcttgatggtgggcacaagacagatagatgattgctgctttcctttgccaaacttggatgcatttttctctttgtttccaaagtataggcaacaggttaaactaccacgtggggtagtttatcaatcctcccgcctcatccttctgcataactgggactaaaggcacacaccaccacacctagctaatttttgtatttttttgtgtgtggagacaaggctttgccatgttgcccaggctggtcttgaactcctggactctagtgatctgcccacctcaacctcccaaagtgctgggattacaggcatgagctaccacgcctatccaatttctggtttatttactttcgatggttaaatgcctccttattcaaatatcctgtatatatactggcgtttctgtcctgatgtcaagtctcgagagaagatgatcaaacaataataaaataattataataagaacaacaataataaata

SEQ ID NO: 291250 - DNA, 1998 bp, Homo sapiens
tgcccggcgtggatggtagggctcgagtgaagatggaagaactggagcaaggcctgttgatgcagccatgggcgtggctacagcttgcagagaactccctcttggccaaggtttttatcaccaagcagggctatgccttgttggtttcagatcttcaacaggtgtggcatgaacaggtggacactagtgtggtcagccagcgagccaaggagctgaacaagcggctcactgctcctcctgcagctttcctctgtcatttggataatctccttcgcccattgttgaaggacgctgctcaccctagcgaagctaccttctcctgtgattgtgtggcagatgcactgattctacgggtgcgaagtgagctctctggcctccccttctattggaatttccactgcatgctagctagtccttccctggtctcccaacatttgattcgtcctctgatgggcatgagtctggcattacagtgccaagtgagggagctagcaacgttacttcatatgaaagacctagagatccaagactaccaggagagtggggctacgctgattcgagatcgattgaagacagaaccatttgaagaaaattccttcttggaacaatttatgatagagaaactgccagaggcatgcagcattggtgatggaaagccctttgtcatgaatctgcaggatctgtatatggcagtcaccacacaagaggtccaagtgggacagaagcatcaaggcgctggagatcctcatacctcaaacagtgcttccctgcaaggaatcgatagccaatgtgtaaaccagccagaacaactggtctcctcagccccaaccctctcagcacctgagaaagagtccacgggtacttcaggccctctgcagagacctcagctgtcaaaggtcaagaggaagaagccaaggggtctcttcagttaatctgttgtggcctcagctgctgaggatggacttggagaatagcttccaagcttcaccttgaaagaagcttacatggcagcaatatttctaaaatagtgatacagtcagaggcctcctgtaagggcgagagaactgaagttgatgttgacaggcccacagggaattggccttccctgttcaagtggaagccagtctctgagaatcccgtgctctcctctcttttggtggaggttctgtaggttcaggtttctaccatggactttaggtatatagggcaagtcagcaagaaagcaccacacactcaggaagccttgtctacctttccctagcgtctctagccagccagccccagatactcctcagagacccacttctctcttttgcatggaataaaaagcactcacagtccctgcttttgggattacttatgctgtggaactcataacccaattcacttccttcactgggtcccaccccattgttgtctctggatgaagtctagccatcagtctggtccttcagattcttcgtaaacttttctgcagttgccagagctaagtctccatttggaaactttgatctcaagaactctcttgatggtgggcacaagacagatagatgattgctgctttcctttgccaaacttggatgcatttttctctttgtttccaaagtataggcaacaggttaaactaccacgtggggtagtttatcaatcctcccgcctcatccttctgcataactgggactaaaggcacacaccaccacacctagctaatttttgtatttttttgtgtgtggagacaaggctttgccatgttgcccaggctggtcttgaactcctggactctagtgatctgcccacctcaacctcccaaagtgctgggattacaggcatgagctaccacgcctatccaatttctggtttatttactttcgatggttaaatgcctccttattcaaatatcctgtatatatactggcgtttctgtcctgatgtcaagtctcgagagaagatgatcaaacaataataaaataattataataagaacaacaataataaata

SEQ ID NO: 291251 - DNA, 2067 bp, Homo sapiens
ccgtctccgggtgttattttcgttacaggggtttgcgtgaagtggtattgaaatggtcgcttgctgtataaaatgagtgggcgctctcgcggccgctgacgatggaagaactggagcaaggcctgttgatgcagccatgggcgtggctacagcttgcagagaactccctcttggccaaggtttttatcaccaagcagggctatgccttgttggtttcagatcttcaacaggtgtggcatgaacaggtggacactagtgtggtcagccagcgagccaaggagctgaacaagcggctcactgctcctcctgcagctttcctctgtcatttggataatctccttcgcccattgttgaaggacgctgctcaccctagcgaagctaccttctcctgtgattgtgtggcagatgcactgattctacgggtgcgaagtgagctctctggcctccccttctattggaatttccactgcatgctagctagtccttccctggtctcccaacatttgattcgtcctctgatgggcatgagtctggcattacagtgccaagtgagggagctagcaacgttacttcatatgaaagacctagagatccaagactaccaggagagtggggctacgctgattcgagatcgattgaagacagaaccatttgaagaaaattccttcttggaacaatttatgatagagaaactgccagaggcatgcagcattggtgatggaaagccctttgtcatgaatctgcaggatctgtatatggcagtcaccacacaagaggtccaagtgggacagaagcatcaaggcgctggagatcctcatacctcaaacagtgcttccctgcaaggaatcgatagccaatgtgtaaaccagccagaacaactggtctcctcagccccaaccctctcagcacctgagaaagagtccacgggtacttcaggccctctgcagagacctcagctgtcaaaggtcaagaggaagaagccaaggggtctcttcagttaatctgttgtggcctcagctgctgaggatggacttggagaatagcttccaagcttcaccttgaaagaagcttacatggcagcaatatttctaaaatagtgatacagtcagaggcctcctgtaagggcgagagaactgaagttgatgttgacaggcccacagggaattggccttccctgttcaagtggaagccagtctctgagaatcccgtgctctcctctcttttggtggaggttctgtaggttcaggtttctaccatggactttaggtatatagggcaagtcagcaagaaagcaccacacactcaggaagccttgtctacctttccctagcgtctctagccagccagccccagatactcctcagagacccacttctctcttttgcatggaataaaaagcactcacagtccctgcttttgggattacttatgctgtggaactcataacccaattcacttccttcactgggtcccaccccattgttgtctctggatgaagtctagccatcagtctggtccttcagattcttcgtaaacttttctgcagttgccagagctaagtctccatttggaaactttgatctcaagaactctcttgatggtgggcacaagacagatagatgattgctgctttcctttgccaaacttggatgcatttttctctttgtttccaaagtataggcaacaggttaaactaccacgtggggtagtttatcaatcctcccgcctcatccttctgcataactgggactaaaggcacacaccaccacacctagctaatttttgtatttttttgtgtgtggagacaaggctttgccatgttgcccaggctggtcttgaactcctggactctagtgatctgcccacctcaacctcccaaagtgctgggattacaggcatgagctaccacgcctatccaatttctggtttatttactttcgatggttaaatgcctccttattcaaatatcctgtatatatactggcgtttctgtcctgatgtcaagtctcgagagaagatgatcaaacaataataaaataattataataagaacaacaataataaata

SEQ ID NO: 291252 - DNA, 2501 bp, Homo sapiens
tacaaagtccaagataggtgaggggtttcaaatttctcagtagtgagggagtataagtacggggatgatggagaaatgaagcaggagaggtaaaggatgaggtcggactatgggacttatgcctgggagactccttccttcaacaactctagtgctggtggaggacctgagagatcatctacagaagttcaatcccttattttgttaaaaagagaccggataggtaggggagggaagagaagtgactcaagtttgacaaatccaaacctgggctcccctctcctgcgcctcgcccgctattctttccactcggccagcgtgactccaagacgcgccactacccttctactagccggctgcccggcctctcctccacttaccctggccactggggcgctcctctcatcagtgtcccaggcccagaagccccgcccacgccaggcataggccccgcccctgtatcccaagaccctgcctcctcttgcggtggggggaaagcggcctcttactctaggcctttcggtttgcgcgagcgggcaggaaagcgtgcgtgcggctaagagagtgggcgctctcgcggccgctgacgatggaagaactggagcaaggcctgttgatgcagccatgggcgtggctacagcttgcagagaactccctcttggccaaggtttttatcaccaagcagggctatgccttgttggtttcagatcttcaacaggtgtggcatgaacaggtggacactagtgtggtcagccagcgagccaaggagctgaacaagcggctcactgctcctcctgcagctttcctctgtcatttggataatctccttcgcccattgttgaaggacgctgctcaccctagcgaagctaccttctcctgtgattgtgtggcagatgcactgattctacgggtgcgaagtgagctctctggcctccccttctattggaatttccactgcatgctagctagtccttccctggtctcccaacatttgattcgtcctctgatgggcatgagtctggcattacagtgccaagtgagggagctagcaacgttacttcatatgaaagacctagagatccaagactaccaggagagtggggctacgctgattcgagatcgattgaagacagaaccatttgaagttggtgatggaaagccctttgtcatgaatctgcaggatctgtatatggcagtcaccacacaagaggtccaagtgggacagaagcatcaaggcgctggagatcctcatacctcaaacagtgcttccctgcaaggaatcgatagccaatgtgtaaaccagccagaacaactggtctcctcagccccaaccctctcagcacctgagaaagagtccacgggtacttcaggccctctgcagagacctcagctgtcaaaggtcaagaggaagaagccaaggggtctcttcagttaatctgttgtggcctcagctgctgaggatggacttggagaatagcttccaagcttcaccttgaaagaagcttacatggcagcaatatttctaaaatagtgatacagtcagaggcctcctgtaagggcgagagaactgaagttgatgttgacaggcccacagggaattggccttccctgttcaagtggaagccagtctctgagaatcccgtgctctcctctcttttggtggaggttctgtaggttcaggtttctaccatggactttaggtatatagggcaagtcagcaagaaagcaccacacactcaggaagccttgtctacctttccctagcgtctctagccagccagccccagatactcctcagagacccacttctctcttttgcatggaataaaaagcactcacagtccctgcttttgggattacttatgctgtggaactcataacccaattcacttccttcactgggtcccaccccattgttgtctctggatgaagtctagccatcagtctggtccttcagattcttcgtaaacttttctgcagttgccagagctaagtctccatttggaaactttgatctcaagaactctcttgatggtgggcacaagacagatagatgattgctgctttcctttgccaaacttggatgcatttttctctttgtttccaaagtataggcaacaggttaaactaccacgtggggtagtttatcaatcctcccgcctcatccttctgcataactgggactaaaggcacacaccaccacacctagctaatttttgtatttttttgtgtgtggagacaaggctttgccatgttgcccaggctggtcttgaactcctggactctagtgatctgcccacctcaacctcccaaagtgctgggattacaggcatgagctaccacgcctatccaatttctggtttatttactttcgatggttaaatgcctccttattcaaatatcctgtatatatactggcgtttctgtcctgatgtcaagtctcgagagaagatgatcaaacaataataaaataattataataagaacaacaataataaata

SEQ ID NO: 291253 - DNA, 1610 bp, Homo sapiens
  misc_feature (1603)..(1603): n is a, c, g, or t
tacaaagtccaagataggtgaggggtttcaaatttctcagtagtgagggagtataagtacggggatgatggagaaatgaagcaggagaggtaaaggatgaggtcggactatgggacttatgcctgggagactccttccttcaacaactctagtgctggtggaggacctgagagatcatctacagaagttcaatcccttattttgttaaaaagagaccggataggtaggggagggaagagaagtgactcaagtttgacaaatccaaacctgggctcccctctcctgcgcctcgcccgctattctttccactcggccagcgtgactccaagacgcgccactacccttctactagccggctgcccggcctctcctccacttaccctggccactggggcgctcctctcatcagtgtcccaggcccagaagccccgcccacgccaggcataggccccgcccctgtatcccaagaccctgcctcctcttgcggtggggggaaagcggcctcttactctaggcctttcggtttgcgcgagcgggcaggaaagcgtgcgtgcggctaagagagtgggcgctctcgcggccgctgacgatggaagaactggagcaaggcctgttgatgcagccatgggcgtggctacagcttgcagagaactccctcttggccaaggtttttatcaccaagcagggctatgccttgttggtttcagatcttcaacaggtgtggcatgaacaggtggacactagtgtggtcagccagcgagccaaggagctgaacaagcggctcactgctcctcctgcagctttcctctgtcatttggataatctccttcgcccattgttgaaggacgctgctcaccctagcgaagctaccttctcctgtgattgtgtggcagatgcactgattctacgggtgcgaagtgagctctctggcctccccttctattggaatttccactgcatgctagctagtccttccctggtctcccaacatttgattcgtcctctgatgggcatgagtctggcattacagtgccaagtgagggagctagcaacgttacttcatatgaaagacctagagatccaagactaccaggagagtggggctacgctgattcgagatcgattgaagacagaaccatttgaagaaaattccttcttggaacaatttatgatagagaaactgccagaggcatgcagcattggtgatggaaagccctttgtcatgaatctgcaggatctgtatatggcagtcaccacacaagaggtccaagtgggacagaagcatcaaggcgctggagatcctcatacctcaaacagtgcttccctgcaaggaatcgatagccaatgtgtaaaccagccagaacaactggtctcctcagccccaaccctctcagcacctgagaaagagtccacgggtacttcaggccctctgcagagacctcagctgtcaaaggtcaagaggaagaagccaaggggtctcttcagttaatctgttgtggcctcagctgctgaggatggacttggagaatagcttccaagcttcaccttgaaagaagcttacatggcagcaatatttctgttgacaggccccacaggaattggncttcctt

SEQ ID NO: 291254 - DNA, 552 bp, Homo sapiens
aggcatttatcactatcttctcttgatctttctgatttcaggagatcctcatacctcaaacagtgcttccctgcaaggaatcgatagccaatgtgtaaaccagccagaacaactggtctcctcagccccaaccctctcagcacctgagaaagagtccacggtgagtcatgagcagcttcctggatggtgttctgagagttggcacctatagcccccaagccagtggtccctggaattgctgcttcattggcactgcctcaaaaatattgagggatatttgtgaccaggctccaaattgtaggtgtctagatggagagtcatggtcttgcacatcttcccttggtgtcccttctctgtaggtcttgtacgaatgatgtgccttgactcctctttcaccttatcccacttccggtgatggccagtgatgaccagtgatagtcagcgaggctattccttgggggagaagggaatctacatctcctgcttagggtcttatatcgcatttgctgtctgacatagacttcaaaatacctatgtcagacacttcctgaa

SEQ ID NO: 291255 - DNA, 739 bp, Homo sapiens
tattttcaatgtaccttttcccaaatgtcctaaattaaaagtggatgctgatcaagttcactggtcaacttcaattcttcctttctcttttctttacagatgcagcctttttgaaatttattcttggccaaaagaggaagatagttcaaggattctatcttgcttttggggggcaatggagaaaccctgaaaacacttaaggaaaacctgaggccttctataagaaaataaactccctgaaaggggaggcagggccaaggaatttacttatttttataaatctctttcctgggtggatatggtaatggatgtgtttcttgaattgtggtaaatgtacctcataaaatggatggactggggctatattctcaggcttcctgggctctgttggcattgggcaagcacgtaatgcctggtttgaggctagaagccaaagccacaaccttcttgcagtaccaactgagccatagggagattaatgcagaacaaggtcgttagtctcattgtttatccagttactagccgcatagattttgtgtaaatttcagctacagtggttgcagcctgcctttgatgtgtgtaatctgtacattttagtgctccaggaaagtacctgattgacaagatctacatccaatgcccagaaaacacatcctacacaggcacagtgaagcgtggagttgaagaattttccagtgagttccatcaaagtaaataaaccaacctagagcatcagaat

SEQ ID NO: 291256 - DNA, 1122 bp, Homo sapiens
acaaggacgagagaaaagcacggtgcccctcgagtcctctccgccccctcggtcctaacccccgcccaggctccaggtcttcccctttgtgtggcctggactctctcccagctacgactttggtgggatccaaaaggaaggaggtggcggggcctacggaagaggatacccaggagccagggagaagggctagaaaacgaataatgtgactccagaggcggaaccccgaccccctctatttcccaccccggcttcacccggagacgaaagctgtgggcatcttcagtttaacggacttcgcggaaaaggagagaaggggggcgagggaaatggcagtttgtgtcccaggggttcttccccttcttcttgccgcctcctaaagacaaacaaactcaaccccccaccctccggggtatcagggaactcgtgggaccgtgaaaaagtcgttcccaaatccggccgcctgcggacgtcggacttccgcggggccggcgcccgttggcgtctgtagctcggcgcagccacgcggggctccagcgagcggggtccgccacccctcgcgccctcctgcggctttcccagcgctgggccagtgcaggccgagccctgcgtccctgcctcgctgggtgggggtccggggcgcggctgtccacagggccgcctcctcctgcggcccgcggggaaggggcgcatcccaccccgctctgcaggccgcccttctgccagctgggaggcgagggcacacgtcctaaggctgcccaagggggagaggaatcgcgccggtaggagagcgcacgggaaccaggaacgcaaggcgggcacaggggagccgaaggagccagacagggcccggccacgcgccctcctcgctcggctgcgctccgtgacgggaacccaggctcccacgcacggggaatgcctagaacggagctagaatggaggtgggagctggagtcattttgcgggccacaggactgctcatttcgtgggcaggacgtgacattcttgtccctcctttctgaaaaacttttctcaggcgcctgaacttggcatggggaccggcctcgaaaagccggcgggtagcacggccgcggtatccaacccttcgccctccttcccacc

SEQ ID NO: 291257 - DNA, 189 bp, Homo sapiens
  misc_feature (75)..(75): n is a, c, g, or t
gatgggtggggtgtcgaggtgagtgggggaaaccaagagaggcttatagctaacgcaagtaccttgtgtagaagnatctacatccaatgcccagaaaacacatcctacacaggcacagtgaagcgtggagttgaagaattttccagtgagttccatcaaagtaaataaaccaacctagagcatcagaat

SEQ ID NO: 291258 - DNA, 1682 bp, Homo sapiens
acaaggacgagagaaaagcacggtgcccctcgagtcctctccgccccctcggtcctaacccccgcccaggctccaggtcttcccctttgtgtggcctggactctctcccagctacgactttggtgggatccaaaaggaaggaggtggcggggcctacggaagaggatacccaggagccagggagaagggctagaaaacgaataatgtgactccagaggcggaaccccgaccccctctatttcccaccccggcttcacccggagacgaaagctgtgggcatcttcagtttaacggacttcgcggaaaaggagagaaggggggcgagggaaatggcagtttgtgtcccaggggttcttccccttcttcttgccgcctcctaaagacaaacaaactcaaccccccaccctccggggtatcagggaactcgtgggaccgtgaaaaagtcgttcccaaatccggccgcctgcggacgtcggacttccgcggggccggcgcccgttggcgtctgtagctcggcgcagccacgcggggctccagcgagcggggtccgccacccctcgcgccctcctgcggctttcccagcgctgggccagtgcaggccgagccctgcgtccctgcctcgctgggtgggggtccggggcgcggctgtccacagggccgcctcctcctgcggcccgcggggaaggggcgcatcccaccccgctctgcaggccgcccttctgccagctgggaggcgagggcacacgtcctaaggctgcccaagggggagaggaatcgcgccggtaggagagcgcacgggaaccaggaacgcaaggcgggcacaggggagccgaaggagccagacagggcccggccacgcgccctcctcgctcggctgcgctccgtgacgggaacccaggctcccacgcacggggaatgcctagaacggagctagaatggaggcccctttgtgtgactaaatttggcaagaatatggatctgagccagtctttccacgtgtgctcccagctcccagctgagaaggccaagggttctcttccggatgcagcctttttgaaatttattcttggccaaaagaggaagatagttcaaggattctatcttgcttttggggggcaatggagaaaccctgaaaacacttaaggaaaacctgaggccttctataagaaaataaactccctgaaaggggaggcagggccaaggaatttacttatttttataaatctctttcctgggtggatatggtaatggatgtgtttcttgaattgtggtaaatgtacctcataaaatggatggactggggctatattctcaggcttcctgggctctgttggcattgggcaagcacgtaatgcctggtttgaggctagaagccaaagccacaaccttcttgcagtaccaactgagccatagggagattaatgcagaacaaggtcgttagtctcattgtttatccagttactagccgcatagattttgtgtaaatttcagctacagtggttgcagcctgcctttgatgtgtgtaatctgtacattttagtgctccaggaaagtacctgattgacaagatctacatccaatgcccagaaaacacatcctacacaggcacagtgaagcgtggagttgaagaattttccagtgagttccatcaaagtaaataaaccaacctagagcatcagaat

SEQ ID NO: 291259 - DNA, 1386 bp, Homo sapiens
acaaggacgagagaaaagcacggtgcccctcgagtcctctccgccccctcggtcctaacccccgcccaggctccaggtcttcccctttgtgtggcctggactctctcccagctacgactttggtgggatccaaaaggaaggaggtggcggggcctacggaagaggatacccaggagccagggagaagggctagaaaacgaataatgtgactccagaggcggaaccccgaccccctctatttcccaccccggcttcacccggagacgaaagctgtgggcatcttcagtttaacggacttcgcggaaaaggagagaaggggggcgagggaaatggcagtttgtgtcccaggggttcttccccttcttcttgccgcctcctaaagacaaacaaactcaaccccccaccctccggggtatcagggaactcgtgggaccgtgaaaaagtcgttcccaaatccggccgcctgcggacgtcggacttccgcggggccggcgcccgttggcgtctgtagctcggcgcagccacgcggggctccagcgagcggggtccgccacccctcgcgccctcctgcggctttcccagcgctgggccagtgcaggccgagccctgcgtccctgcctcgctgggtgggggtccggggcgcggctgtccacagggccgcctcctcctgcggcccgcggggaaggggcgcatcccaccccgctctgcaggccgcccttctgccagctgggaggcgagggcacacgtcctaaggctgcccaagggggagaggaatcgcgccggtaggagagcgcacgggaaccaggaacgcaaggcgggcacaggggagccgaaggagccagacagggcccggccacgcgccctcctcgctcggctgcgctccgtgacgggaacccaggctcccacgcacggggaatgcctagaacggagctagaatggaggcccctttgtgtgactaaatttggcaagaatatggatctgagccagtctttccacgtgtgctcccagctcccagctgagaaggccaagggttctcttccggatgcagcctttttgaaatttattcttggccaaaagaggaagatagttcaaggattctatcttgcttttggggggcaatggagaaaccctgaaaacacttaaggaaaacctgaggccttctataagaaaataaactccctgaaaggggaggcagggccaaggaatttacttatttttataaatctctttcctgggtggatatgtgctccaggaaagtacctgattgacaagatctacatccaatgcccagaaaacacatcctacacaggcacagtgaagcgtggagttgaagaattttccagtgagttccatcaaagtaaataaaccaacctagagcatcagaat

SEQ ID NO: 291260 - DNA, 1971 bp, Homo sapiens
acaaggacgagagaaaagcacggtgcccctcgagtcctctccgccccctcggtcctaacccccgcccaggctccaggtcttcccctttgtgtggcctggactctctcccagctacgactttggtgggatccaaaaggaaggaggtggcggggcctacggaagaggatacccaggagccagggagaagggctagaaaacgaataatgtgactccagaggcggaaccccgaccccctctatttcccaccccggcttcacccggagacgaaagctgtgggcatcttcagtttaacggacttcgcggaaaaggagagaaggggggcgagggaaatggcagtttgtgtcccaggggttcttccccttcttcttgccgcctcctaaagacaaacaaactcaaccccccaccctccggggtatcagggaactcgtgggaccgtgaaaaagtcgttcccaaatccggccgcctgcggacgtcggacttccgcggggccggcgcccgttggcgtctgtagctcggcgcagccacgcggggctccagcgagcggggtccgccacccctcgcgccctcctgcggctttcccagcgctgggccagtgcaggccgagccctgcgtccctgcctcgctgggtgggggtccggggcgcggctgtccacagggccgcctcctcctgcggcccgcggggaaggggcgcatcccaccccgctctgcaggccgcccttctgccagctgggaggcgagggcacacgtcctaaggctgcccaagggggagaggaatcgcgccggtaggagagcgcacgggaaccaggaacgcaaggcgggcacaggggagccgaaggagccagacagggcccggccacgcgccctcctcgctcggctgcgctccgtgacgggaacccaggctcccacgcacggggaatgcctagaacggagctagaatggaggcccctttgtgtgactaaatttggcaagaatatggatctgagccagtctttccacgtgtgctcccagctcccagctgagaaggccaagggttctcttccggatgcagcctttttgaaatttattcttggccaaaagaggaagatagttcaaggattctatcttgcttttggggggcaatggagaaaccctgaaaacacttaaggaaaacctgaggccttctataagaaaataaactccctgaaaggggaggcagggccaaggaatttacttatttttataaatctctttcctgggtggatatggtaatggatgtgtttcttgaattgtggtaaatgtacctcataaaatggatggactggggctatattctcaggcttcctgggctctgttggcattgggcaagcacgtaatgcctggtttgaggctagaagccaaagccacaaccttcttgcagtaccaactgagccatagggagattaatgcagaacaaggtcgttagtctcattgtttatccagttactagccgcatagattttgtgtaaatttcagctacagtggttgcagcctgcctttgatgtgtgtaatctgtacattttagtgctccaggaaagtacctgattgacaagatctacatccaatgcccagaaaacacatcctacacaggcacagtgaagcgtggagttgaagaattttccagaaaaccagtttggctattaagggaacctgtcgacacagagcagagcaagataaggccaggtttcagaaagaatagctgtttaccatcaaagcaactgggttccacacagacatggtatattatacacaaagacgaaggatatgggtccactctccgtcaaggaatgttataaatccacgtggtgtccctgggtgtcaggcttggccagaacatctgtggctggagaagccaatgtggctcaggagctccctgctggctgcacatctgaacggcttcaggagtacaagtttccccatcaaaggtttggaataaattacactaaaaaattggct

SEQ ID NO: 291261 - DNA, 1225 bp, Homo sapiens
acaaggacgagagaaaagcacggtgcccctcgagtcctctccgccccctcggtcctaacccccgcccaggctccaggtcttcccctttgtgtggcctggactctctcccagctacgactttggtgggatccaaaaggaaggaggtggcggggcctacggaagaggatacccaggagccagggagaagggctagaaaacgaataatgtgactccagaggcggaaccccgaccccctctatttcccaccccggcttcacccggagacgaaagctgtgggcatcttcagtttaacggacttcgcggaaaaggagagaaggggggcgagggaaatggcagtttgtgtcccaggggttcttccccttcttcttgccgcctcctaaagacaaacaaactcaaccccccaccctccggggtatcagggaactcgtgggaccgtgaaaaagtcgttcccaaatccggccgcctgcggacgtcggacttccgcggggccggcgcccgttggcgtctgtagctcggcgcagccacgcggggctccagcgagcggggtccgccacccctcgcgccctcctgcggctttcccagcgctgggccagtgcaggccgagccctgcgtccctgcctcgctgggtgggggtccggggcgcggctgtccacagggccgcctcctcctgcggcccgcggggaaggggcgcatcccaccccgctctgcaggccgcccttctgccagctgggaggcgagggcacacgtcctaaggctgcccaagggggagaggaatcgcgccggtaggagagcgcacgggaaccaggaacgcaaggcgggcacaggggagccgaaggagccagacagggcccggccacgcgccctcctcgctcggctgcgctccgtgacgggaacccaggctcccacgcacggggaatgcctagaacggagctagaatggaggcccctttgtgtgactaaatttggcaagaatatggatctgagccagtctttccacgtgtgctcccagctcccagctgagaaggccaagggttctcttccgggtaaggagacagggagaaagatcaaagagtttggggagctggatctgaaatgtgaattgaaaataaaaatcaagcctggacacattccagtttctaaagcaaaaccaaccctcagcagaggccggctctctatatagctctctttctttctctctctgctccctttgactcttttctgtgacc

SEQ ID NO: 291262 - DNA, 500 bp, Homo sapiens
aagctaggctggtacggtcccggtcttagatcaggccgcctcctcctgcggcccgcggggaaggggcgcatcccaccccgctctgcaggccgcccttctgccagctgggaggcgagggcacacgtcctaaggctgcccaagggggagaggaatcgcgccggtaggagagcgcacgggaaccaggaacgcaaggcgggcacaggggagccgaaggagccagacagggcccggccacgcgccctcctcgctcggctgcgctccgtgacgggaacccaggctcccacgcacggggaatgcctagaacggagctagaatggaggtgggagctggagtcattttgcgggccacaggactgctcatttcgtgggcaggacgtgacattcttgtccctcctttctgaaaaacttttctcaggcgcctgaacttggcatggggaccggcctcgaaaagccggcgggtagcacggccgcggtatccaacccttcgccctccttcccacc

SEQ ID NO: 291263 - DNA, 1052 bp, Homo sapiens
gcctctcggaactggggcagcggcccgctcacctcgtgtccgttgctggccgggatgatttcagactcgttcaccaaggaagacttgatgtcagctaaatcgccttcctcttcgggatgactgatctcggcgaagatcttttccttctgaggatcgccctcgtccttgaaggggatcatctcgtccgtggcgcagagttccgggtcccccccgccgccgccacctcctccggagagttggggcatcccggcggctctgtaatctccgctccgctgtgggagcacccgcgcaacagcaggaaagacagaggggcccctttgtgtgactaaatttggcaagaatatggatctgagccagtctttccacgtgtgctcccagctcccagctgagaaggccaagggttctcttccggatgcagcctttttgaaatttattcttggccaaaagaggaagatagttcaaggattctatcttgcttttggggggcaatggagaaaccctgaaaacacttaaggaaaacctgaggccttctataagaaaataaactccctgaaaggggaggcagggccaaggaatttacttatttttataaatctctttcctgggtggatatggtaatggatgtgtttcttgaattgtggtaaatgtacctcataaaatggatggactggggctatattctcaggcttcctgggctctgttggcattgggcaagcacgtaatgcctggtttgaggctagaagccaaagccacaaccttcttgcagtaccaactgagccatagggagattaatgcagaacaaggtcgttagtctcattgtttatccagttactagccgcatagattttgtgtaaatttcagctacagtggttgcagcctgcctttgatgtgtgtaatctgtacattttagtgctccaggaaagtacctgattgacaagatctacatccaatgcccagaaaacacatcctacacaggcacagtgaagcgtggagttgaagaattttccagtgagttccatcaaagtaaataaaccaacctagagcatcagaat

SEQ ID NO: 291264 - DNA, 716 bp, Homo sapiens
agtgtacggtcggaatagggatcgcgctgggccagtgcaggccgagccctgcgtccctgcctcgctgggtgggggtccggggcgcggctgtccacagggccgcctcctcctgcggcccgcggggaaggggcgcatcccaccccgctctgcaggccgcccttctgccagctgggaggcgagggcacacgtcctaaggctgcccaagggggagaggaatcgcgccggtaggagagcgcacgggaaccaggaacgcaaggcgggcacaggggagccgaaggagccagacagggcccggccacgcgccctcctcgctcggctgcgctccgtgacgggaacccaggctcccacgcacggggaatgcctagaacggagctagaatggaggaaaaccagtttggctattaagggaacctgtcgacacagagcagagcaagataaggccaggtttcagaaagaatagctgtttaccatcaaagcaactgggttccacacagacatggtatattatacacaaagacgaaggatatgggtccactctccgtcaaggaatgttataaatccacgtggtgtccctgggtgtcaggcttggccagaacatctgtggctggagaagccaatgtggctcaggagctccctgctggctgcacatctgaacggcttcaggagtacaagtttccccatcaaaggtttggaataaattacactaaaaaattggct

SEQ ID NO: 291265 - DNA, 473 bp, Homo sapiens
cctgcctaagcccctctggaggctgggatgcagaggaggaaggaggaggtgcagaagcaaagccttgaaaatactgtacttctggtgctgacggccccattcccctgaggcctactggagctcaccatagttactatttagttgtgtgccacgagtgaggtcggcctgcaggctcactgcgcctggggagacacaggagggaccccccaacattagccaaagtctcagctgagtctcctcactgatgtgacttgtggatttggaagcgaagactgctgtgtcctcagagattgaaaagcaaccaagtcaatactgagaagaagattttgctacttatttctctgactaatcattgttattctctgcttaacttgtaaaaatttttacttattttgacataatttcagacttgcattaaaatgttgcaaaattagtgtaaagaattctcacataaacttcgcctagacttccta

SEQ ID NO: 291266 - DNA, 340 bp, Homo sapiens
ttcagacagggttggaattccagctcaaccacagatcagcaatgtgaaacctttaggaagttactgcatttctttgtgccttgaatactccatctgtagaacgggtaatcgtgtaaggaagaaaaaggggttacaaagaggttttctacttgctgggctaaaggcccctggtggcttctggtagctataaaacccccgaacgcttaggtaaggattagagaagaaacccagagtggctgtgagtcaagaaaagacatcagataacagcaattattttaccattatgtgacacgtaatactaatgttcctacctgaagataaagagcacaattttaaaatc

SEQ ID NO: 291267 - DNA, 1722 bp, Homo sapiens
tttttttttttagaggtatttttgtttgttcccatttcatgtgctattcatttgagctgaaatattagttttgtttgtacacagaaaacatttgaacacttttatagccagaaagaatgagcccacaatgttggcaggttgacaccacaaaaggaaaggataaggtttctaaacgaaagtcaagaacacagatgaaattgttaccttaaataatcatctcaatgggttctacaaattcttaagacagctttcaaatttactgcaattttaagtgtgtatataatgcctcttttaaaagaagggatgggaatcattatgatattagctcagtcaagggcaaaggaagacttactaaatgacctctatgtcaaaacctttcacagttatcatcacatttagacatcacaactttgcaatccatttgtagaagaaaaacgaaaggctcagagaggtcaagtgaccttcccaaggtcaaaaacccaattggcagctgacaaaggctcaaaatgaagctgatctgacttcagtctccttgcacttccccatgccatgctacgtgtctaacaatctggaagtatcacagaggagcaaaaatagctgaattcagctgcagtgaacagtatcaggaaagaagagaaaaaaactgtccgggaccacatattatacctggccttaaatctatccaagctaaccagattttggacaacagaccaatgaaggagccaatgaatcagtacatatatcacaagaaggctgctacacagactgaatgtttgtgcccccacccacaaaaaaacatgtattaaaatactaacccctaatgtgacggtgttagaagtgagacctttgggtggtgatgatgttgtgagggcaaagcactcatgaatgagattagtgacctcataaaagcagccccagagagctgccttgcctttcctgccaggtgagtacacagtgagaagatggccaactataagccaggaaacaggcctccatcaacaaggaatctgccggcaacttgatcttggacttcccagcctccaggattgtgagaaatcaattatgttgtttataaaaccacacattctatgatattttataatggcagcctaaacgaactaagacagggttgtgtcattttctaccaaattcacagcaacatcagcaatggcttttcaaatttcagttatttgagcttcctcaacatttagggtggagatacactacattttggttaacaacaaacaaacagaacccatccccctcaccccaaaaataattttatttaggaaattaacctccctaaaaatctggcatgttttggaggcaaagaagtatgaataaagaaaacacacaaacgaacaacaaggaaactttccatgtagccaaagttctcacaacacccatctctgaaatgcactactttatctcagggagacaagtaaggtaaactatatcaaggccatagggaagctccaaaaaaaatcatgaagtacaaagttcaaacaacattacaggttttgaagggctttgacaacgttccaccttctacctatggagacttgtagctaacacaaatgtcccattatactgcttgatgttttccagcagctaaaacctgtgaaacatgttaaaaagaaaaaaattaagtggggtggggatcttagagtagatccaattcagcagtaccacagaaactaaagtttaaataaggagactctc

SEQ ID NO: 291268 - DNA, 1496 bp, Homo sapiens
tttttttttttagaggtatttttgtttgttcccatttcatgtgctattcatttgagctgaaatattagttttgtttgtacacagaaaacatttgaacacttttatagccagaaagaatgagcccacaatgttggcaggttgacaccacaaaaggaaaggataaggtttctaaacgaaagtcaagaacacagatgaaattgttaccttaaataatcatctcaatgggttctacaaattcttaagacagctttcaaatttactgcaattttaagtgtgtatataatgcctcttttaaaagaagggatgggaatcattatgatattagctcagtcaagggcaaaggaagacttactaaatgacctctatgtcaaaacctttcacagttatcatcacatttagacatcacaactttgcaatccatttgtagaagaaaaacgaaaggctcagagaggtcaagtgaccttcccaaggtcaaaaacccaattggcagctgacaaaggctcaaaatgaagctgatctgacttcagtctccttgcacttccccatgccatgctacgtgtctaacaatctggaagtatcacagaggagcaaaaatagctgaattcagctgcagtgaacagtatcaggaaagaagagaaaaaaactgtccgggaccacatattatacctggccttaaatctatccaagctaaccagattttggacaacagaccaatgaaggagccaatgaatcagtacatatatcacaagaaggctgctacacagactgaatgtttgtgcccccacccacaaaaaaacatgtattaaaatactaacccctaatgtgacggtgttagaagtgagacctttgggtggtgatgatgttgtgagggcaaagcactcatgaatgagattagtgacctcataaaagcagccccagagagctgccttgcctttcctgccaggtgagtacacagtgagaagatggccaactataagccaggaaacaggcctccatcaacaaggaatctgccggcaacttgatcttggacttcccagcctccaggattgaagaaaaatatgttgcaaacatggaggaaagatgatggcctccttcaacagaactatgagttgtccaagatttcacaaagttcttcaagcatggcatttgatgatgagccctaagatgacttgagcctcacgtcaactctctttgctacaaggtctgcaagcaggtgaaagagcaagccgcaaaaagagctgcaaaactggaaaacagcacaagggtggcccaagactgtcgtttccaaaagtgttatgtagaaccgccgcagcagcatatggccaagagcgaagcctgcctgagagcaaaccgccaagtcaaggatagcagagctcagagagaaaaaactaaagtccttaaggacatcaatgagttcctcatcataccacatattgtctagatcccaaccacttctggattctcaatgttgtgaaataataatcccctgattattt

SEQ ID NO: 291269 - DNA, 496 bp, Homo sapiens
gcctgtattacagataggtatggttgttaaagaaacttttgttgtactgtttctgttgtttacagagtaatgtaatttttaaacttatattccagagagatataaaatagcctcctccatcgtcagccaatgatatcactgttgagctgttttcaataaaagttcatgctgtacttcctgcctcacaggtcatgtctggttccgtttttggatcctctccactgtattcaatccctttggttctcaaggtgactactgactgatcaggggcttgaaaaaagggagacaatattgatttttaatttgtttttgtttttctctaatcatagcagctgaaatttttcatccaagctgtggcctctttgactactacattgcagttctcaaacttttaactttagacttctctggatagtttctaagatataaattaaattcagtgtcaatgaaaacaaacttacaaaacaggccttcttggcaacacccctctccccag

SEQ ID NO: 291270 - DNA, 339 bp, Homo sapiens
ccaagctgtggcctctttgactactacattgcagttctcaaacttttaactttagacttctctggatagtttctaagatataaattaaattcagtgtcaatgaaaacaaacttacaaaacaggccttcttggcaacacccctctccccagatatagaggtgctaatggattctcatcctctcctaggagccctaagatgacttgagcctcacgtcaactctctttgctacagttaagtcaattctcttttcttagttatctaagtgccagccaaatactgcatcttagcatttttcattccaaaccactttgtggatgaagagggccacactgaaatgg

SEQ ID NO: 291271 - DNA, 853 bp, Homo sapiens
gagagccacttccggaacaagcgtcgcgtttctgaggagaaactcttggtgagaattcccagagtgataatggctacctacagcctggcgaacgagagactacgcgctctggaagacattgaacgggaaatcggcgccatccttcagaatgcaggtactgtgatcctagaattgtccaaggaaaaaactaacgagcggctcctagaccggcaggcggcggccttcaccgcttcagtgcaacacgtggaggcggagctgtcagctcagatccgctacctcacccaggtggccacagggcagccccatgagggctccagctactcttcgaggaaggactgtcagatggctctgaagcgagtggactatgcccgcctcaagctcagtgatgtggctcgaacctgtgagcagatgctggagaactaggccagggagatggacccagagctgagagggagaccatcacctgtgccatgggacagaacctgggaacatgtagggtggggagtatgagcaccaacataccctgctggtcaaagtaccctaggacaaaggggcaaatggtgggcatggaaaaactgaagcccgagcctgcccacagctatgccttggcctctccagcagggtgctcctgctctgcactccagaaacaccctgacaggctcagagaggagatggaaactgacatacccaacccacttcctcaaacacttcatgctgctgccccagccttcccgcagacttggcctaatgaaaatacatacttcttcattcggagagacaaaacaagaactagagttttaatgataataaaagcaataataataaaagcaataacaataaaaacaaaaaaaga

SEQ ID NO: 291272 - DNA, 799 bp, Homo sapiens
gagagccacttccggaacaagcgtcgcgtttctgaggagaaactcttggtgagaattcccagagtgataatggctacctacagcctggcgaacgagagactacgcgctctggaagacattgaacgggaaatcggcgccatccttcagaatgcaggtactgtgatcctagaattgtccaaggaaaaaactaacgagcggctcctagaccggcaggcggcggccttcaccgcttcagtgcaacacgtggaggcggagctgtcagctcagatccgctacctcacccaggtggccacagggcagccccatgagggctccagctactcttcgaggaaggactgtcagatggctctgaagcgagtggactatgcccgcctcaagctcagtgatgtggctcgaacctgtgagcagatgctggagaactaggccagggagatggacccagagctgagagggagaccatcacctgtgccatgggacagaacctgggaacatgtagggtggggagtatgagcaccaacataccctgctggtcaaagtaccctaggacaaaggggcaaatggtgggcatggactcctgctctgcactccagaaacaccctgacaggctcagagaggagatggaaactgacatacccaacccacttcctcaaacacttcatgctgctgccccagccttcccgcagacttggcctaatgaaaatacatacttcttcattcggagagacaaaacaagaactagagttttaatgataataaaagcaataataataaaagcaataacaataaaaacaaaaaaaga

SEQ ID NO: 291273 - DNA, 1131 bp, Homo sapiens
gagagccacttccggaacaagcgtcgcgtttctgaggagaaactcttggtgagaattcccagagtgataatggctacctacagcctggcgaacgagagactacgcgctctggaagacattgaacgggaaatcggcgccatccttcagaatgcaggttcgggatgcgacaacctggacagcggggagcgaaagcgtgaccgggctgcactggcagcctgacctgggacttggagcagggttggggagggaatcctacgtgcgtgcgcagcgaaagggcgggactgagaggggctggcctagggagaggctacactggcagtctccgtgtgtccccgccctctctccgccctggcaggtactgtgatcctagaattgtccaaggaaaaaactaacgagcggctcctagaccggcaggcggcggccttcaccgcttcagtgcaacacgtggaggcggagctgtcagctcagatccgctacctcacccaggtcggtgtgtctggggggttctgcgagcgaaccccagctctgggtcaaagcctcaggcttgggtgatccagggtggagcattaactgggcaggaccagacctccccagccggccatccagagcgggtttcttcctctaaaaggaaagaatgggccgggcgcagtggcttgacagagttcgagaccagcctggccaacacggtgaaacctcgtctctactaaaaatataaaaattaggccaggctcggtggctcactcctgtaatcccagcactttgggaggctgaggcgggtggatcatctgaggtcaggagttcgagaccagcctggccaacatggtgaaactccgtctctactaaaaatacaaaaattagctgggctggtagcgggcacctgtaatcccagctacttggaagggtgaggcaggagaatcgcttgaacccaggaggtggaggttgcagtgagccaagattgcagcactgcactccagcctgggtgacaaagcaagactgtctcaaaaaaaaaaaaagccgggcttggtggtgagtaccggtaaccccagctacttggaaggctgaggcaggagaatcgcttgaacccaggaggcggaggttgttgtacttagccgagatcatgccattgcactc

SEQ ID NO: 291274 - DNA, 985 bp, Homo sapiens
ctcactgggtaacatcacatgtgcctagcagaagatgtgtaaataatgctagaactacagaactttgtcactggaaacttggcctgacctccaggccacgaggtcccaaatccttatatcctgagaagagggacaggattgagaaggttctgaaatcgtcgcagggaccactaccattactaatttttacggtgtgccagatactctgcattactttatctaatcctcaacaactctaggaagtagttattgtcacccccattttacagacaagattaacataagttaaatgatttatttacccagctaccagatggcctaacaaattcaaactcagggaagaaatgagacgagacctgatgcctggttggagttagggtaaaggagatggtgctccattgatagtctgtcttgtaggtggccacagggcagccccatgagggctccagctactcttcgaggaaggactgtcagatggctctgaagcgagtggactatgcccgcctcaagctcagtgatgtggctcgaacctgtgagcagatgctggagaactaggccagggagatggacccagagctgagagggagaccatcacctgtgccatgggacagaacctgggaacatgtagggtggggagtatgagcaccaacataccctgctggtcaaagtaccctaggacaaaggggcaaatggtgggcatggaaaaactgaagcccgagcctgcccacagctatgccttggcctctccagcagggtgctcctgctctgcactccagaaacaccctgacaggctcagagaggagatggaaactgacatacccaacccacttcctcaaacacttcatgctgctgccccagccttcccgcagacttggcctaatgaaaatacatacttcttcattcggagagacaaaacaagaactagagttttaatgataataaaagcaataataataaaagcaataacaataaaaacaaaaaaaga

SEQ ID NO: 291275 - DNA, 964 bp, Homo sapiens
gagagccacttccggaacaagcgtcgcgtttctgaggagaaactcttggtgagaattcccagagtgataatggctacctacagcctggcgaacgagagactacgcgctctggaagacattgaacgggaaatcggcgccatccttcagaatgcaggtactgtgatcctagaattgtccaaggaaaaaactaacgagcggctcctagaccggcaggcggcggccttcaccgcttcagtgcaacacgtggaggcggagctgtcagctcagatccgctacctcacccagctaccagatggcctaacaaattcaaactcagggaagaaatgagacgagacctgatgcctggttggagttagggtaaaggagatggtgctccattgatagtctgtcttgtaggtggccacagggcagccccatgagggctccagctactcttcgaggaaggactgtcagatggctctgaagcgagtggactatgcccgcctcaagctcagtgatgtggctcgaacctgtgagcagatgctggagaactaggccagggagatggacccagagctgagagggagaccatcacctgtgccatgggacagaacctgggaacatgtagggtggggagtatgagcaccaacataccctgctggtcaaagtaccctaggacaaaggggcaaatggtgggcatggaaaaactgaagcccgagcctgcccacagctatgccttggcctctccagcagggtgctcctgctctgcactccagaaacaccctgacaggctcagagaggagatggaaactgacatacccaacccacttcctcaaacacttcatgctgctgccccagccttcccgcagacttggcctaatgaaaatacatacttcttcattcggagagacaaaacaagaactagagttttaatgataataaaagcaataataataaaagcaataacaataaaaacaaaaaaaga

SEQ ID NO: 291276 - DNA, 917 bp, Homo sapiens
gagagccacttccggaacaagcgtcgcgtttctgaggagaaactcttggtgagaattcccagagtgataatggctacctacagcctggcgaacgagagactacgcgctctggaagacattgaacgggaaatcggcgccatccttcagaatgcaggtactgtgatcctagaattgtccaaggaaaaaactaacgagcggctcctagaccggcaggcggcggccttcaccgcttcagtgcaacacgtggaggcggagctgtcagctcagatccgctacctcacccaggtggccacagggcagccccatgagggctccagctactcttcgaggaaggactgtcagatggctctgaagcgagtggactatgcccgcctcaagctcagtgatgtggctcgaacctgtgagcagatgctggagaactaggccagggagatggacccagagctgagagggagaccatcacctgtgccatgggacagaacctgggaacatgtagggtggggagtatgagcaccaacataccctgctggtcaaagtaccctaggacaaaggggcaaatggtgggcatggaaaaactgaagcccgagcctgcccacagctatgccttggcctctccagcagggtgctcctgctctgcactccagaaacaccctgacaggctcagagaggagatggaaactgacatacccaaccgagctgcccacaggttatgccttggcctctccagcagggtgtcctgctctggaatcccagaaaacaccttgaagggtcagagaggagatgggaatggataccaaccgaattcttcaaaatttcatggttgtgcccgcttcccggagattgggcaatgaataataatcttcctgggggaggcacccgattgcagttaggaaaaggcgcatattaaggggaactta

SEQ ID NO: 291277 - DNA, 930 bp, Homo sapiens
gagagccacttccggaacaagcgtcgcgtttctgaggagaaactcttggtgagaattcccagagtgataatggctacctacagcctggcgaacgagagactacgcgctctggaagacattgaacgggaaatcggcgccatccttcagaatgcaggtactgtgatcctagaattgtccaaggaaaaaactaacgagcggctcctagaccggcaggcggcggccttcaccgcttcagtgcaacacgtggaggcggagctgtcagctcagatccgctacctcacccaggtcggtgtgtctggggggttctgcgagcgaaccccagctctgggtcaaagcctcaggcttgggtgatccagggtggagcattaactgggcaggaccagacctccccagccggccatccagagcgggtttcttcctctaaaaggaaagaatgggccgggcgcagtggcttgacagagttcgagaccagcctggccaacacggtgaaacctcgtctctactaaaaatataaaaattaggccaggctcggtggctcactcctgtaatcccagcactttgggaggctgaggcgggtggatcatctgaggtcaggagttcgagaccagcctggccaacatggtgaaactccgtctctactaaaaatacaaaaattagctgggctggtagcgggcacctgtaatcccagctacttggaagggtgaggcaggagaatcgcttgaacccaggaggtggaggttgcagtgagccaagattgcagcactgcactccagcctgggtgacaaagcaagactgtctcaaaaaaaaaaaaagccgggcttggtggtgagtaccggtaaccccagctacttggaaggctgaggcaggagaatcgcttgaacccaggaggcggaggttgttgtacttagccgagatcatgccattgcactc

SEQ ID NO: 291278 - DNA, 718 bp, Homo sapiens
gagagccacttccggaacaagcgtcgcgtttctgaggagaaactcttggtgagaattcccagagtgataatggctacctacagcctggcgaacgagagactacgcgctctggaagacattgaacgggaaatcggcgccatccttcagaatgcaggtactgtgatcctagaattgtccaaggaaaaaactaacgagcggctcctagaccggcaggcggcggccttcaccgcttcagtgcaacacgtggaggcggagctgtcagctcagatccgctacctcacccaggtggccacagggcagccccatgagggctccagctactcttcgaggaaggactgtcagatggctctgaagcgagtggactatgcccgcctcaagctcagtgatgtggctcgaacctgtgagcagatgctggagaactaggccagggagatggacccagagctgagagggagaccatcacctgtgccatgggacaggtggccacagggcagccccatgagggctccagctactcttcgaggctcagagaggagatggaaactgacatacccaacccacttcctcaaacacttcatgctgctgccccagccttcccgcagacttggcctaatgaaaatacatacttcttcattcggagagacaaaacaagaactagagttttaatgataataaaagcaataataataaaagcaataacaataaaaacaaaaaaaga

SEQ ID NO: 291279 - DNA, 2163 bp, Homo sapiens
gcatgaggagagtgtgtaggggccgggttccgtggatgaactctcacccgagcggtttctctttccgggacaacatggcgccgtccacgccgctcttgacagtccgaggatcagaaggactgtacatggtgaatggaccaccacattttacagaaagcacagtgtttccaagggaatctgggaagaattgcaaagtctgtatctttagtaaggatgggaccttgtttgcctggggcaatggagaaaaagtaaatattatcagtgtcactaacaagggactactgcactccttcgacctcctgaaggcagtttgccttgaattctcacccaaaaatactgtcctggcaacgtggcagccttacactacttctaaagatggcacagctgggatacccaacctacaactttatgatgtgaaaactgggacatgtttgaaatctttcatccagaaaaaaatgcaaaattggtgtccatcctggtcagaagatgaaactctttgtgcccgcaatgttaacaatgaagttcacttctttgaaaacaacaattttaacacaattgcaaataaattgcatttgcaaaaaattaatgattttgtattatcacctggaccccaaccatacaaggtggctgtctatgttccaggaagtaaaggtgcaccttcatttgttagattatatcagtaccccaactttgctggacctcatgcagctttagctaataaaagtttctttaaggcagataaagttacaatgctgtggaataaaaaagctactgctgtgttggtaatagctagcacagatgttgacaagacaggagcttcctactatggagaacaaactctacactacattgcaacaaatggagaaagtgctgtagtgcaattaccaaaaaatggccccatttatgatgtagtttggaattctagttctactgagttttgtgctgtatatggttttatgcctgccaaagcgacaattttcaacttgaaatgtgatcctgtatttgactttggaactggtcctcgtaatgcagcctactatagccctcatggacatatattagtattagctggatttggaaatctgaggggacaaatggaagtgtgggatgtgaaaaactacaaacttatttctaaaccggtggcttctgattctacatattttgcttggtgcccggatggtgagcatattttaacagctacatgtgctcccaggttacgggttaataatggatacaaaatttggcattatactggctctatcttgcacaagtatgatgtgccatcaaatgcagaattatggcaggtttcttggcagccatttttggatggaatatttccagcaaaaacaataacttaccaagcagttccaagtgaagtacccaatgaggaacctaaagttgcaacagcttatagacccccagctttaagaaataaaccaatcaccaattccaaattgcatgaagaggaaccacctcagaatatgaaaccacaatcaggaaacgataagccattatcaaaaacagctcttaaaaatcaaaggaagcatgaagctaagaaagctgcaaagcaggaagcaagaagtgacaagagtccagatttggcacctactcctgccccacagagcacaccacgaaacactgtctctcagtcaatttctggggaccctgagatagacaaaaaaatcaagaacctaaagaagaaactgaaagcaatcgaacaactgaaagaacaagcagcaactggaaaacagctagaaaaaaatcagttggagaaaattcagaaagaaacagcccttctccaggagctggaagatttggaattgggtatttaaagattcacggaaagcaagttgatgaccagaaatcagtgcaaacacatcttctgttaaacccattggtatacacagaatattcctgtgcccacacttaatgtcaatctataattttaaccatttatccaagattctactaagtgtaaaattatttaataatgtctattaaattgatatttatatcttgcatcctatatcatgtcaatatgtgatatagaaaagagatacgtgaattttttagctaagcttgacagattgaaagacaagtgtcatttttttttgtagagggtgatatataccatgtaaatgaataaagacattttaaatttaa

SEQ ID NO: 291280 - DNA, 512 bp, Homo sapiens
  misc_feature (31)..(32): n is a, c, g, or t
ttatttttggatccagtcctaaagaaaaaannaaacctagagctacaagaaactgaaagcaatcgaacaactgaaagaacaagcagcaactggaaaacagctagaaaaaaatcagttggagaaaattcagaaagaaacagcccttctccaggagctggaagatttggaattgggtatttaaagattcacggaaagcaagttgatgaccagaaatcagtgcaaacacatcttctgttaaacccattggtatacacagaatattcctgtgcccacacttaatgtcaatctataattttaaccatttatccaagattctactaagtgtaaaattatttaataatgtctattaaattgatatttatatcttgcatcctatatcatgtcaatatgtgatatagaaaagagatacgtgaattttttagctaagcttgacagattgaaagacaagtgtcatttttttttgtagagggtgatatataccatgtaaatgaataaagacattttaaatttaa

SEQ ID NO: 291281 - DNA, 555 bp, Homo sapiens
aagtcttaataatatttacttataagattttatatcgagagagaaacaagaaagacaacccctgatggagctgacaaagcattacgacttacaaactgaaagcaatcgaacaactgaaagaacaagcagcaactggaaaacagctagaaaaaaatcagttggagaaaattcagaaagaaacagcccttctccaggagctggaagatttggaattgggtatttaaagattcacggaaagcaagttgatgaccagaaatcagtgcaaacacatcttctgttaaacccattggtatacacagaatattcctgtgcccacacttaatgtcaatctataattttaaccatttatccaagattctactaagtgtaaaattatttaataatgtctattaaattgatatttatatcttgcatcctatatcatgtcaatatgtgatatagaaaagagatacgtgaattttttagctaagcttgacagattgaaagacaagtgtcatttttttttgtagagggtgatatataccatgtaaatgaataaagacattttaaatttaa

SEQ ID NO: 291282 - DNA, 525 bp, Homo sapiens
gcgctcgtatactatctccgttttgccccgttatggtattgtttattaattaggggtctgagaaactgaaagcaatcgaacaactgaaagaacaagcagcaactggaaaacagctagaaaaaaatcagttggagaaaattcagaaagaaacagcccttctccaggagctggaagatttggaattgggtatttaaagattcacggaaagcaagttgatgaccagaaatcagtgcaaacacatcttctgttaaacccattggtatacacagaatattcctgtgcccacacttaatgtcaatctataattttaaccatttatccaagattctactaagtgtaaaattatttaataatgtctattaaattgatatttatatcttgcatcctatatcatgtcaatatgtgatatagaaaagagatacgtgaattttttagctaagcttgacagattgaaagacaagtgtcatttttttttgtagagggtgatatataccatgtaaatgaataaagacattttaaatttaa

SEQ ID NO: 291283 - DNA, 515 bp, Homo sapiens
tatcctaatttttgatccacatttgggatataattaataactcatactgcagaaactgaaagcaatcgaacaactgaaagaacaagcagcaactggaaaacagctagaaaaaaatcagttggagaaaattcagaaagaaacagcccttctccaggagctggaagatttggaattgggtatttaaagattcacggaaagcaagttgatgaccagaaatcagtgcaaacacatcttctgttaaacccattggtatacacagaatattcctgtgcccacacttaatgtcaatctataattttaaccatttatccaagattctactaagtgtaaaattatttaataatgtctattaaattgatatttatatcttgcatcctatatcatgtcaatatgtgatatagaaaagagatacgtgaattttttagctaagcttgacagattgaaagacaagtgtcatttttttttgtagagggtgatatataccatgtaaatgaataaagacattttaaatttaa

SEQ ID NO: 291284 - DNA, 508 bp, Homo sapiens
  misc_feature (47)..(47): n is a, c, g, or t
  misc_feature (63)..(63): n is a, c, g, or t
  misc_feature (68)..(68): n is a, c, g, or t
  misc_feature (111)..(111): n is a, c, g, or t
tgagagttctatactcggtagcgatcaaaaaaaaaaaaaaacttaanagtacagcatcgaacntctgnagagacaacgcagcaactggaaaacagctagaaaaaaatcagnttggagaaaattcagaaagaaacagcccttctccaggagctggaagatttggaattgggtatttaaagattcacggaaagcaagttgatgaccagaaatcagtgcaaacacatcttctgttaaacccattggtatacacagaatattcctgtgcccacacttaatgtcaatctataattttaaccatttatccaagattctactaagtgtaaaattatttaataatgtctattaaattgatatttatatcttgcatcctatatcatgtcaatatgtgatatagaaaagagatacgtgaattttttagctaagcttgacagattgaaagacaagtgtcatttttttttgtagagggtgatatataccatgtaaatgaataaagacattttaaatttaa

SEQ ID NO: 291285 - DNA, 497 bp, Homo sapiens
  misc_feature (52)..(52): n is a, c, g, or t
  misc_feature (57)..(57): n is a, c, g, or t
  misc_feature (100)..(100): n is a, c, g, or t
aaattctataagtccacaagacggcgtaatgcgtagactgaagcatcgaacntctgnagagacaacgcagcaactggaaaacagctagaaaaaaatcagnttggagaaaattcagaaagaaacagcccttctccaggagctggaagatttggaattgggtatttaaagattcacggaaagcaagttgatgaccagaaatcagtgcaaacacatcttctgttaaacccattggtatacacagaatattcctgtgcccacacttaatgtcaatctataattttaaccatttatccaagattctactaagtgtaaaattatttaataatgtctattaaattgatatttatatcttgcatcctatatcatgtcaatatgtgatatagaaaagagatacgtgaattttttagctaagcttgacagattgaaagacaagtgtcatttttttttgtagagggtgatatataccatgtaaatgaataaagacattttaaatttaa

SEQ ID NO: 291286 - DNA, 203 bp, Homo sapiens
atatcgtcgaccacggcgtccgatttaataatgtctattaaattgatatttatatcttgcatcctatatcatgtcaatatgtgatatagaaaagagatacgtgaattttttagctaagcttgacagattgaaagacaagtgtcatttttttttgtagagggtgatatataccatgtaaatgaataaagacattttaaatttaa

SEQ ID NO: 291287 - DNA, 530 bp, Homo sapiens
gcatgaggagagtgtgtaggggccgggttccgtggatgaactctcacccgagcggtttctctttccgggacaacatggcgccgtccacgccgctcttgacagtccgaggatcagaaggactgtacatggtgaatggaccaccacattttacagaaagcacagtgtttccaaggtatgatttattttgttaagtaatgttatagggaacatacagtacaatctaaaatggttttgttggtggtgtattttgaacaagaaaggaaaagaacagatgaactcatttttattgtataatatttaccgaagatgaaaagaatacatattctctatcaaggaaaatgatcttcagatctgaaaatagtaacttaagcctatttataaggtagggggaacaatactaagaaaaagtgtagacactagtgtaattgaatacaagcctttattttacaagagttgtatcttaaggaatgagaaaaacttgcaaatttgatagccaaatcatggccagtaatcttagtgaaatcataatg

SEQ ID NO: 291288 - DNA, 3008 bp, Homo sapiens
gcatgaggagagtgtgtaggggccgggttccgtggatgaactctcacccgagcggtttctctttccgggacaacatggcgccgtccacgccgctcttgacagtccgaggatcagaaggactgtacatggtgaatggaccaccacattttacagaaagcacagtgtttccaagggaatctgggaagaattgcaaagtctgtatctttagtaaggatgggaccttgtttgcctggggcaatggagaaaaagtaaatattatcagtgtcactaacaagggactactgcactccttcgacctcctgaaggcagtttgccttgaattctcacccaaaaatactgtcctggcaacgtggcagccttacactacttctaaagatggcacagctgggatacccaacctacaactttatgatgtgaaaactgggacatgtttgaaatctttcatccagaaaaaaatgcaaaattggtgtccatcctggtcagaagatgaaactctttgtgcccgcaatgttaacaatgaagttcacttctttgaaaacaacaattttagtatggaaagatttatgacataattttattacttactgtaatcgtatacagtttccattaacttttatgacatcatagggttttcctaaatactgttaatctattaatcaataattactcttacatacatttgcataattctttataagtctgaattcagtgaaaatctgtaacacaaaggttttcttttacaataactttttattatctggtaattgctattaagacatttgaatatcttttcctgaatttaattgctattgaaattctgtgacacaaattttttagatattttatcgtgtagaattttaaacttcagacacctagttctagtaaccatcagcttgtggccaatcttatctcatccatacatctctccagctaccatctcttactaagtgaaagcaaatcccagatatggttatacttttatatacttgttaaatatgtaattgtaaatatttcagagtagatttctgaagattggggcctttcattttttaaacttagccacaaaaccattatcacaaattattaaatatgtgttcaaatttctactaattgcaaatgttacaattttttttaaaactcgggatccaaataaggtactgcacattgtggttgattgatatatcttttatgtttcttttggtcctataagttcccactctatctgttattttattcttcataatttattgtttaagaaacaaggttatttgtctttcacgttttcccatagtttgaattttgcttttgtatcccatggtataatttaacatgttcatctgtcccctataaattgcaagttggctctagagtttcagcttcaggttcttttttagacacaattgcaaataaattgcatttgcaaaaaattaatgattttgtattatcacctggaccccaaccatacaaggtggctgtctatgttccaggaagtaaaggtgcaccttcatttgttagattatatcagtaccccaactttgctggacctcatgcagctttagctaataaaagtttctttaaggcagataaagttacaatgctgtggaataaaaaagctactgctgtgttggtaatagctagcacagatgttgacaagacaggagcttcctactatggagaacaaactctacactacattgcaacaaatggagaaagtgctgtagtgcaattaccaaaaaatggccccatttatgatgtagtttggaattctagttctactgagttttgtgctgtatatggttttatgcctgccaaagcgacaattttcaacttgaaatgtgatcctgtatttgactttggaactggtcctcgtaatgcagcctactatagccctcatggacatatattagtattagctggatttggaaatctgaggggacaaatggaagtgtgggatgtgaaaaactacaaacttatttctaaaccggtggcttctgattctacatattttgcttggtgcccggatggtgagcatattttaacagctacatgtgctcccaggttacgggttaataatggatacaaaatttggcattatactggctctatcttgcacaagtatgatgtgccatcaaatgcagaattatggcaggtttcttggcagccatttttggatggaatatttccagcaaaaacaataacttaccaagcagttccaagtgaagtacccaatgaggaacctaaagttgcaacagcttatagacccccagctttaagaaataaaccaatcaccaattccaaattgcatgaagaggaaccacctcagaatatgaaaccacaatcaggaaacgataagccattatcaaaaacagctcttaaaaatcaaaggaagcatgaagctaagaaagctgcaaagcaggaagcaagaagtgacaagagtccagatttggcacctactcctgccccacagagcacaccacgaaacactgtctctcagtcaatttctggggaccctgagatagacaaaaaaatcaagaacctaaagaagaaactgaaagcaatcgaacaactgaaagaacaagcagcaactggaaaacagctagaaaaaaatcagttggagaaaattcagaaagaaacagcccttctccaggagctggaagatttggaattgggtatttaaagattcacggaaagcaagttgatgaccagaaatcagtgcaaacacatcttctgttaaacccattggtatacacagaatattcctgtgcccacacttaatgtcaatctataattttaaccatttatccaagattctactaagtgtaaaattatttaataatgtctattaaattgatatttatatcttgcatcctatatcatgtcaatatgtgatatagaaaagagatacgtgaattttttagctaagcttgacagattgaaagacaagtgtcatttttttttgtagagggtgatatataccatgtaaatgaataaagacattttaaatttaa

SEQ ID NO: 291289 - DNA, 2950 bp, Homo sapiens
gcatgaggagagtgtgtaggggccgggttccgtggatgaactctcacccgagcggtttctctttccgggacaacatggcgccgtccacgccgctcttgacagtccgaggatcagaaggactgtacatggtgaatggaccaccacattttacagaaagcacagtgtttccaagggaatctgggaagaattgcaaagtctgtatctttagtaaggatgggaccttgtttgcctggggcaatggagaaaaagtaaatattatcagtgtcactaacaagggactactgcactccttcgacctcctgaaggcagtttgccttgaattctcacccaaaaatactgtcctggcaacgtggcagccttacactacttctaaagatggcacagctgggatacccaacctacaactttatgatgtgaaaactgggacatgtttgaaatctttcatccagaaaaaaatgcaaaattggtgtccatcctggtcagaagatgaaactctttgtgcccgcaatgttaacaatgaagttcacttctttgaaaacaacaattttagtatggaaagatttatgacataattttattacttactgtaatcgtatacagtttccattaacttttatgacatcatagggttttcctaaatactgttaatctattaatcaataattactcttacatacatttgcataattctttataagtctgaattcagtgaaaatctgtaacacaaaggttttcttttacaataactttttattatctggtaattgctattaagacatttgaatatcttttcctgaatttaattgctattgaaattctgtgacacaaattttttagatattttatcgtgtagaattttaaacttcagacacctagttctagtaaccatcagcttgtggccaatcttatctcatccatacatctctccagctaccatctcttactaagtgaaagcaaatcccagatatggttatacttttatatacttgttaaatatgtaattgtaaatatttcagagtagatttctgaagattggggcctttcattttttaaacttagccacaaaaccattatcaaaactcgggatccaaataaggtactgcacattgtggttgattgatatatcttttatgtttcttttggtcctataagttcccactctatctgttattttattcttcataatttattgtttaagaaacaaggttatttgtctttcacgttttcccatagtttgaattttgcttttgtatcccatggtataatttaacatgttcatctgtcccctataaattgcaagttggctctagagtttcagcttcaggttcttttttagacacaattgcaaataaattgcatttgcaaaaaattaatgattttgtattatcacctggaccccaaccatacaaggtggctgtctatgttccaggaagtaaaggtgcaccttcatttgttagattatatcagtaccccaactttgctggacctcatgcagctttagctaataaaagtttctttaaggcagataaagttacaatgctgtggaataaaaaagctactgctgtgttggtaatagctagcacagatgttgacaagacaggagcttcctactatggagaacaaactctacactacattgcaacaaatggagaaagtgctgtagtgcaattaccaaaaaatggccccatttatgatgtagtttggaattctagttctactgagttttgtgctgtatatggttttatgcctgccaaagcgacaattttcaacttgaaatgtgatcctgtatttgactttggaactggtcctcgtaatgcagcctactatagccctcatggacatatattagtattagctggatttggaaatctgaggggacaaatggaagtgtgggatgtgaaaaactacaaacttatttctaaaccggtggcttctgattctacatattttgcttggtgcccggatggtgagcatattttaacagctacatgtgctcccaggttacgggttaataatggatacaaaatttggcattatactggctctatcttgcacaagtatgatgtgccatcaaatgcagaattatggcaggtttcttggcagccatttttggatggaatatttccagcaaaaacaataacttaccaagcagttccaagtgaagtacccaatgaggaacctaaagttgcaacagcttatagacccccagctttaagaaataaaccaatcaccaattccaaattgcatgaagaggaaccacctcagaatatgaaaccacaatcaggaaacgataagccattatcaaaaacagctcttaaaaatcaaaggaagcatgaagctaagaaagctgcaaagcaggaagcaagaagtgacaagagtccagatttggcacctactcctgccccacagagcacaccacgaaacactgtctctcagtcaatttctggggaccctgagatagacaaaaaaatcaagaacctaaagaagaaactgaaagcaatcgaacaactgaaagaacaagcagcaactggaaaacagctagaaaaaaatcagttggagaaaattcagaaagaaacagcccttctccaggagctggaagatttggaattgggtatttaaagattcacggaaagcaagttgatgaccagaaatcagtgcaaacacatcttctgttaaacccattggtatacacagaatattcctgtgcccacacttaatgtcaatctataattttaaccatttatccaagattctactaagtgtaaaattatttaataatgtctattaaattgatatttatatcttgcatcctatatcatgtcaatatgtgatatagaaaagagatacgtgaattttttagctaagcttgacagattgaaagacaagtgtcatttttttttgtagagggtgatatataccatgtaaatgaataaagacattttaaatttaa

SEQ ID NO: 291290 - DNA, 2049 bp, Homo sapiens
gcatgaggagagtgtgtaggggccgggttccgtggatgaactctcacccgagcggtttctctttccgggacaacatggcgccgtccacgccgctcttgacagtccgaggatcagaaggactgtacatggtgaatggaccaccacattttacagaaagcacagtgtttccaagggaatctgggaagaattgcaaagtctgtatctttagtaaggatgggaccttgtttgcctggggcaatggagaaaaagtaaatattatcagtgtcactaacaagggactactgcactccttcgacctcctgaaggcagtttgccttgaattctcacccaaaaatactgtcctggcaacgtggcagccttacactacttctaaagatggcacagctgggatacccaacctacaactttatgatgtgaaaactgggacatgtttgaaatctttcatccagaaaaaaatgcaaaattggtgtccatcctggtcagaagatgaaactctttgtgcccgcaatgttaacaatgaagttcacttctttgaaaacaacaattttaacacaattgcaaataaattgcatttgcaaaaaattaatgattttgtattatcacctggaccccaaccatacaaggtggctgtctatgttccaggaagtaaaggtgcaccttcatttgttagattatatcagtaccccaactttgctggacctcatgcagctttagctaataaaagtttctttaaggcagataaagttacaatgctgtggaataaaaaagctactgctgtgttggtaatagctagcacagatgttgacaagacaggagcttcctactatggagaacaaactctacactacattgcaacaaatggagaaagtgctgtagtgcaattaccaaaaaatggccccatttatgatgtagtttggaattctagttctactgagttttgtgctgtatatggttttatgcctgccaaagcgacaattttcaacttgaaatgtgatcctgtatttgactttggaactggtcctcgtaatgcagcctactatagccctcatggacatatattagtattagctggatttggaaatctgaggggacaaatggaagtgtgggatgtgaaaaactacaaacttatttctaaaccggtggcttctgattctacatattttgcttggtgcccggatggtgagcatattttaacagctacatgtgctcccaggttacgggttaataatggatacaaaatttggcattatactggctctatcttgcacaagtatgatgtgccatcaaatgcagaattatggcaggtttcttggcagccatttttggatggaatatttccagcaaaaacaataacttaccaagcagttccaagtgaagtacccaatgaggaacctaaagttgcaacagcttatagacccccagctttaagaaataaaccaatcaccaattccaaattggaagcaagaagtgacaagagtccagatttggcacctactcctgccccacagagcacaccacgaaacactgtctctcagtcaatttctggggaccctgagatagacaaaaaaatcaagaacctaaagaagaaactgaaagcaatcgaacaactgaaagaacaagcagcaactggaaaacagctagaaaaaaatcagttggagaaaattcagaaagaaacagcccttctccaggagctggaagatttggaattgggtatttaaagattcacggaaagcaagttgatgaccagaaatcagtgcaaacacatcttctgttaaacccattggtatacacagaatattcctgtgcccacacttaatgtcaatctataattttaaccatttatccaagattctactaagtgtaaaattatttaataatgtctattaaattgatatttatatcttgcatcctatatcatgtcaatatgtgatatagaaaagagatacgtgaattttttagctaagcttgacagattgaaagacaagtgtcatttttttttgtagagggtgatatataccatgtaaatgaataaagacattttaaatttaa

SEQ ID NO: 291291 - DNA, 2147 bp, Homo sapiens
ggccccacggaacgcaggaaaacaacggctaaggatgcgaggcctgcgtgttagacgacatggcgcgtccacgccgctcttgacagtccgaggatcagaaggactgtacatggtgaatggaccaccacattttacagaaagcacagtgtttccaagggaatctgggaagaattgcaaagtctgtatctttagtaaggatgggaccttgtttgcctggggcaatggagaaaaagtaaatattatcagtgtcactaacaagggactactgcactccttcgacctcctgaaggcagtttgccttgaattctcacccaaaaatactgtcctggcaacgtggcagccttacactacttctaaagatggcacagctgggatacccaacctacaactttatgatgtgaaaactgggacatgtttgaaatctttcatccagaaaaaaatgcaaaattggtgtccatcctggtcagaagatgaaactctttgtgcccgcaatgttaacaatgaagttcacttctttgaaaacaacaattttaacacaattgcaaataaattgcatttgcaaaaaattaatgattttgtattatcacctggaccccaaccatacaaggtggctgtctatgttccaggaagtaaaggtgcaccttcatttgttagattatatcagtaccccaactttgctggacctcatgcagctttagctaataaaagtttctttaaggcagataaagttacaatgctgtggaataaaaaagctactgctgtgttggtaatagctagcacagatgttgacaagacaggagcttcctactatggagaacaaactctacactacattgcaacaaatggagaaagtgctgtagtgcaattaccaaaaaatggccccatttatgatgtagtttggaattctagttctactgagttttgtgctgtatatggttttatgcctgccaaagcgacaattttcaacttgaaatgtgatcctgtatttgactttggaactggtcctcgtaatgcagcctactatagccctcatggacatatattagtattagctggatttggaaatctgaggggacaaatggaagtgtgggatgtgaaaaactacaaacttatttctaaaccggtggcttctgattctacatattttgcttggtgcccggatggtgagcatattttaacagctacatgtgctcccaggttacgggttaataatggatacaaaatttggcattatactggctctatcttgcacaagtatgatgtgccatcaaatgcagaattatggcaggtttcttggcagccatttttggatggaatatttccagcaaaaacaataacttaccaagcagttccaagtgaagtacccaatgaggaacctaaagttgcaacagcttatagacccccagctttaagaaataaaccaatcaccaattccaaattgcatgaagaggaaccacctcagaatatgaaaccacaatcaggaaacgataagccattatcaaaaacagctcttaaaaatcaaaggaagcatgaagctaagaaagctgcaaagcaggaagcaagaagtgacaagagtccagatttggcacctactcctgccccacagagcacaccacgaaacactgtctctcagtcaatttctggggaccctgagatagacaaaaaaatcaagaacctaaagaagaaactgaaagcaatcgaacaactgaaagaacaagcagcaactggaaaacagctagaaaaaaatcagttggagaaaattcagaaagaaacagcccttctccaggagctggaagatttggaattgggtatttaaagattcacggaaagcaagttgatgaccagaaatcagtgcaaacacatcttctgttaaacccattggtatacacagaatattcctgtgcccacacttaatgtcaatctataattttaaccatttatccaagattctactaagtgtaaaattatttaataatgtctattaaattgatatttatatcttgcatcctatatcatgtcaatatgtgatatagaaaagagatacgtgaattttttagctaagcttgacagattgaaagacaagtgtcatttttttttgtagagggtgatatataccatgtaaatgaataaagacattttaaatttaa

SEQ ID NO: 291292 - DNA, 2132 bp, Homo sapiens
atggcgcgcttactaacgtcagtgactggcaaaacctggacgacatggcgcgtccacgccgctcttgacagtccgaggatcagaaggactgtacatggtgaatggaccaccacattttacagaaagcacagtgtttccaagggaatctgggaagaattgcaaagtctgtatctttagtaaggatgggaccttgtttgcctggggcaatggagaaaaagtaaatattatcagtgtcactaacaagggactactgcactccttcgacctcctgaaggcagtttgccttgaattctcacccaaaaatactgtcctggcaacgtggcagccttacactacttctaaagatggcacagctgggatacccaacctacaactttatgatgtgaaaactgggacatgtttgaaatctttcatccagaaaaaaatgcaaaattggtgtccatcctggtcagaagatgaaactctttgtgcccgcaatgttaacaatgaagttcacttctttgaaaacaacaattttaacacaattgcaaataaattgcatttgcaaaaaattaatgattttgtattatcacctggaccccaaccatacaaggtggctgtctatgttccaggaagtaaaggtgcaccttcatttgttagattatatcagtaccccaactttgctggacctcatgcagctttagctaataaaagtttctttaaggcagataaagttacaatgctgtggaataaaaaagctactgctgtgttggtaatagctagcacagatgttgacaagacaggagcttcctactatggagaacaaactctacactacattgcaacaaatggagaaagtgctgtagtgcaattaccaaaaaatggccccatttatgatgtagtttggaattctagttctactgagttttgtgctgtatatggttttatgcctgccaaagcgacaattttcaacttgaaatgtgatcctgtatttgactttggaactggtcctcgtaatgcagcctactatagccctcatggacatatattagtattagctggatttggaaatctgaggggacaaatggaagtgtgggatgtgaaaaactacaaacttatttctaaaccggtggcttctgattctacatattttgcttggtgcccggatggtgagcatattttaacagctacatgtgctcccaggttacgggttaataatggatacaaaatttggcattatactggctctatcttgcacaagtatgatgtgccatcaaatgcagaattatggcaggtttcttggcagccatttttggatggaatatttccagcaaaaacaataacttaccaagcagttccaagtgaagtacccaatgaggaacctaaagttgcaacagcttatagacccccagctttaagaaataaaccaatcaccaattccaaattgcatgaagaggaaccacctcagaatatgaaaccacaatcaggaaacgataagccattatcaaaaacagctcttaaaaatcaaaggaagcatgaagctaagaaagctgcaaagcaggaagcaagaagtgacaagagtccagatttggcacctactcctgccccacagagcacaccacgaaacactgtctctcagtcaatttctggggaccctgagatagacaaaaaaatcaagaacctaaagaagaaactgaaagcaatcgaacaactgaaagaacaagcagcaactggaaaacagctagaaaaaaatcagttggagaaaattcagaaagaaacagcccttctccaggagctggaagatttggaattgggtatttaaagattcacggaaagcaagttgatgaccagaaatcagtgcaaacacatcttctgttaaacccattggtatacacagaatattcctgtgcccacacttaatgtcaatctataattttaaccatttatccaagattctactaagtgtaaaattatttaataatgtctattaaattgatatttatatcttgcatcctatatcatgtcaatatgtgatatagaaaagagatacgtgaattttttagctaagcttgacagattgaaagacaagtgtcatttttttttgtagagggtgatatataccatgtaaatgaataaagacattttaaatttaa

SEQ ID NO: 291293 - DNA, 2100 bp, Homo sapiens
ggtttctctttccgggacatttgtgcgtcagtctgacagtccgaggatcagaaggactgtacatggtgaatggaccaccacattttacagaaagcacagtgtttccaagggaatctgggaagaattgcaaagtctgtatctttagtaaggatgggaccttgtttgcctggggcaatggagaaaaagtaaatattatcagtgtcactaacaagggactactgcactccttcgacctcctgaaggcagtttgccttgaattctcacccaaaaatactgtcctggcaacgtggcagccttacactacttctaaagatggcacagctgggatacccaacctacaactttatgatgtgaaaactgggacatgtttgaaatctttcatccagaaaaaaatgcaaaattggtgtccatcctggtcagaagatgaaactctttgtgcccgcaatgttaacaatgaagttcacttctttgaaaacaacaattttaacacaattgcaaataaattgcatttgcaaaaaattaatgattttgtattatcacctggaccccaaccatacaaggtggctgtctatgttccaggaagtaaaggtgcaccttcatttgttagattatatcagtaccccaactttgctggacctcatgcagctttagctaataaaagtttctttaaggcagataaagttacaatgctgtggaataaaaaagctactgctgtgttggtaatagctagcacagatgttgacaagacaggagcttcctactatggagaacaaactctacactacattgcaacaaatggagaaagtgctgtagtgcaattaccaaaaaatggccccatttatgatgtagtttggaattctagttctactgagttttgtgctgtatatggttttatgcctgccaaagcgacaattttcaacttgaaatgtgatcctgtatttgactttggaactggtcctcgtaatgcagcctactatagccctcatggacatatattagtattagctggatttggaaatctgaggggacaaatggaagtgtgggatgtgaaaaactacaaacttatttctaaaccggtggcttctgattctacatattttgcttggtgcccggatggtgagcatattttaacagctacatgtgctcccaggttacgggttaataatggatacaaaatttggcattatactggctctatcttgcacaagtatgatgtgccatcaaatgcagaattatggcaggtttcttggcagccatttttggatggaatatttccagcaaaaacaataacttaccaagcagttccaagtgaagtacccaatgaggaacctaaagttgcaacagcttatagacccccagctttaagaaataaaccaatcaccaattccaaattgcatgaagaggaaccacctcagaatatgaaaccacaatcaggaaacgataagccattatcaaaaacagctcttaaaaatcaaaggaagcatgaagctaagaaagctgcaaagcaggaagcaagaagtgacaagagtccagatttggcacctactcctgccccacagagcacaccacgaaacactgtctctcagtcaatttctggggaccctgagatagacaaaaaaatcaagaacctaaagaagaaactgaaagcaatcgaacaactgaaagaacaagcagcaactggaaaacagctagaaaaaaatcagttggagaaaattcagaaagaaacagcccttctccaggagctggaagatttggaattgggtatttaaagattcacggaaagcaagttgatgaccagaaatcagtgcaaacacatcttctgttaaacccattggtatacacagaatattcctgtgcccacacttaatgtcaatctataattttaaccatttatccaagattctactaagtgtaaaattatttaataatgtctattaaattgatatttatatcttgcatcctatatcatgtcaatatgtgatatagaaaagagatacgtgaattttttagctaagcttgacagattgaaagacaagtgtcatttttttttgtagagggtgatatataccatgtaaatgaataaagacattttaaatttaa

SEQ ID NO: 291294 - DNA, 2092 bp, Homo sapiens
  misc_feature (26)..(26): n is a, c, g, or t
ggcacgaggcggcgtggacggcgcantgtagtccgaggatcagaaggactgtacatggtgaatggaccaccacattttacagaaagcacagtgtttccaagggaatctgggaagaattgcaaagtctgtatctttagtaaggatgggaccttgtttgcctggggcaatggagaaaaagtaaatattatcagtgtcactaacaagggactactgcactccttcgacctcctgaaggcagtttgccttgaattctcacccaaaaatactgtcctggcaacgtggcagccttacactacttctaaagatggcacagctgggatacccaacctacaactttatgatgtgaaaactgggacatgtttgaaatctttcatccagaaaaaaatgcaaaattggtgtccatcctggtcagaagatgaaactctttgtgcccgcaatgttaacaatgaagttcacttctttgaaaacaacaattttaacacaattgcaaataaattgcatttgcaaaaaattaatgattttgtattatcacctggaccccaaccatacaaggtggctgtctatgttccaggaagtaaaggtgcaccttcatttgttagattatatcagtaccccaactttgctggacctcatgcagctttagctaataaaagtttctttaaggcagataaagttacaatgctgtggaataaaaaagctactgctgtgttggtaatagctagcacagatgttgacaagacaggagcttcctactatggagaacaaactctacactacattgcaacaaatggagaaagtgctgtagtgcaattaccaaaaaatggccccatttatgatgtagtttggaattctagttctactgagttttgtgctgtatatggttttatgcctgccaaagcgacaattttcaacttgaaatgtgatcctgtatttgactttggaactggtcctcgtaatgcagcctactatagccctcatggacatatattagtattagctggatttggaaatctgaggggacaaatggaagtgtgggatgtgaaaaactacaaacttatttctaaaccggtggcttctgattctacatattttgcttggtgcccggatggtgagcatattttaacagctacatgtgctcccaggttacgggttaataatggatacaaaatttggcattatactggctctatcttgcacaagtatgatgtgccatcaaatgcagaattatggcaggtttcttggcagccatttttggatggaatatttccagcaaaaacaataacttaccaagcagttccaagtgaagtacccaatgaggaacctaaagttgcaacagcttatagacccccagctttaagaaataaaccaatcaccaattccaaattgcatgaagaggaaccacctcagaatatgaaaccacaatcaggaaacgataagccattatcaaaaacagctcttaaaaatcaaaggaagcatgaagctaagaaagctgcaaagcaggaagcaagaagtgacaagagtccagatttggcacctactcctgccccacagagcacaccacgaaacactgtctctcagtcaatttctggggaccctgagatagacaaaaaaatcaagaacctaaagaagaaactgaaagcaatcgaacaactgaaagaacaagcagcaactggaaaacagctagaaaaaaatcagttggagaaaattcagaaagaaacagcccttctccaggagctggaagatttggaattgggtatttaaagattcacggaaagcaagttgatgaccagaaatcagtgcaaacacatcttctgttaaacccattggtatacacagaatattcctgtgcccacacttaatgtcaatctataattttaaccatttatccaagattctactaagtgtaaaattatttaataatgtctattaaattgatatttatatcttgcatcctatatcatgtcaatatgtgatatagaaaagagatacgtgaattttttagctaagcttgacagattgaaagacaagtgtcatttttttttgtagagggtgatatataccatgtaaatgaataaagacattttaaatttaa

SEQ ID NO: 291295 - DNA, 2194 bp, Homo sapiens
gcatgaggagagtgtgtaggggccgggttccgtggatgaactctcacccgagcggtttctctttccgggacaacatggcgccgtccacgccgctcttgacagtccgaggatcagaaggactgtacatggtgaatggaccaccacattttacagaaagcacagtgtttccaagggaatctgggaagaattgcaaagtctgtatctttagtaaggatgggaccttgtttgcctggggcaatggagaaaaagtaaatattatcagtgtcactaacaagggactactgcactccttcgacctcctgaaggcagtttgccttgaattctcacccaaaaatactgtcctggcaacgtggcagccttacactacttctaaagatggcacagctgggatacccaacctacaactttatgatgtgaaaactgggacatgtttgaaatctttcatccagaaaaaaatgcaaaattggtgtccatcctggtcagaagatgaaactctttgtgcccgcaatgttaacaatgaagttcacttctttgaaaacaacaattttaacacaattgcaaataaattgcatttgcaaaaaattaatgattttgtattatcacctggaccccaaccatacaaggtggctgtctatgttccaggaagtaaaggtgcaccttcatttgttagattatatcagtaccccaactttgctggacctcatgcagctttagctaataaaagtttctttaaggcagataaagttacaatgctgtggaataaaaaagctactgctgtgttggtaatagctagcacagatgttgacaagacaggagcttcctactatggagaacaaactctacactacattgcaacaaatggagaaagtgctgtagtgcaattaccaaaaaatggccccatttatgatgtagtttggaattctagttctactgagttttgtgctgtatatggttttatgcctgccaaagcgacaattttcaacttgaaatgtgatcctgtatttgactttggaactggtcctcgtaatgcagcctactatagccctcatggacatatattagtattagctggatttggaaatctgaggggacaaatggaagtgtgggatgtgaaaaactacaaacttatttctaaaccggtggcttctgattctacatattttgcttggtgcccggatggtgagcatattttaacagctacatgtgctcccaggttacgggttaataatggatacaaaatttggcattatactggctctatcttgcacaagtatgatgtgccatcaaatgcagaattatggcaggtttcttggcagccatttttggatggaatatttccagcaaaaacaataacttaccaagcagttccaagtgaagtacccaatgaggaacctaaagttgcaacagcttatagacccccagctttaagaaataaaccaatcaccaattccaaattgcatgaagaggaaccacctcagaatatgaaaccacaatcaggaaacgataagccattatcaaaaacagctcttaaaaatcaaaggaagcatgaagctaagaaagctgcaaagcaggaagcaagaagtgacaagagtccagatttggcacctactcctgccccacagagcacaccacgaaacactgtctctcagtcaatttctggggaccctgagatagacaaaaaaatcaagaacctaaagaagaaactgaaagcaatcgaacaactgaaagaacaagcagcaactggaaaacagctagaaaaaaatcagttggagaaaattcagaaagaaacagcccttctccaggagctggaagatttggaattgggtatttaaagattcacggaaagcaagttgatgaccagaaatcagtgcaaacacatcttctgttaaacccattggtatacacagaatattcctgtgcccacacttaatgtcaatctataattttaaccatttatccaagattctactaagtgtaaaattatttaataatgtctattaaattgatatttatatcttgcatcctatatcatgtcaatatgtgatatagaaaagagatacgtgaattttttagctaagcttgacagattgaaagacaagtgtcatttttttttgtagagggtgatatataccatgtaaatgaataaagacattttaaatttaaaaaaaaaataaaaatggccttatttgcctca

SEQ ID NO: 291296 - DNA, 2019 bp, Homo sapiens
gcatgaggagagtgtgtaggggccgggttccgtggatgaactctcacccgagcggtttctctttccgggacaacatggcgccgtccacgccgctcttgacagtccgaggatcagaaggactgtacatggtgaatggaccaccacattttacagaaagcacagtgtttccaagggaatctgggaagaattgcaaagtctgtatctttagtaaggatgggaccttgtttgcctggggcaatggagaaaaagtaaatattatcagtgtcactaacaagggactactgcactccttcgacctcctgaaggcagtttgccttgaattctcacccaaaaatactgtcctggcaacgtggcagccttacactacttctaaagatggcacagctgggatacccaacctacaactttatgatgtgaaaactgggacatgtttgaaatctttcatccagaaaaaaatgcaaaattggtgtccatcctggtcagaagatgaaactctttgtgcccgcaatgttaacaatgaagttcacttctttgaaaacaacaattttaacacaattgcaaataaattgcatttgcaaaaaattaatgattttgtattatcacctggaccccaaccatacaaggtggctgtctatgttccaggaagtaaaggtgcaccttcatttgttagattatatcagtaccccaactttgctggacctcatgcagctttagctaataaaagtttctttaaggcagataaagttacaatgctgtggaataaaaaagctactgctgtgttggtaatagctagcacagatgttgacaagacaggagcttcctactatggagaacaaactctacactacattgcaacaaatggagaaagtgctgtagtgcaattaccaaaaaatggccccatttatgatgtagtttggaattctagttctactgagttttgtgctgtatatggttttatgcctgccaaagcgacaattttcaacttgaaatgtgatcctgtatttgactttggaactggtcctcgtaatgcagcctactatagccctcatggacatatattagtattagctggatttggaaatctgaggggacaaatggaagtgtgggatgtgaaaaactacaaacttatttctaaaccggtggcttctgattctacatattttgcttggtgcccggatggtgagcatattttaacagctacatgtgctcccaggttacgggttaataatggatacaaaatttggcattatactggctctatcttgcacaagtatgatgtgccatcaaatgcagaattatggcaggtttcttggcagccatttttggatggaatatttccagcaaaaacaataacttaccaagcagttccaagtgaagtacccaatgaggaacctaaagttgcaacagcttatagacccccagctttaagaaataaaccaatcaccaattccaaattgcatgaagaggaaccacctcagaatatgaaaccacaatcaggaaacgataagccattatcaaaaacagctcttaaaaatcaaaggaagcatgaagctaagaaagctgcaaagcaggaagcaagaagtgacaagagtccagatttggcacctactcctgccccacagagcacaccacgaaacactgtctctcagtcaatttctggggaccctgagatagacaaaaaaatcaagaacctaaagaagaaactgaaagcaatcgaacaactgaaagaacaagcagcaactggaaaacagctagaaaaaaatcagttggagaaaattcagaaagaaacagcccttctccaggagctggaagatttggaattgggtatttaaagattcacggaaagcaagttgatgaccagaaatcagtgcaaacacatcttctgttaaacccattggtatacacagaatattcctgtgcccacacttaatgtcaatctataattttaaccatttatccaagattctactaagtgtaaaattatttaataatgtctattaaattgatatttatatcttg

SEQ ID NO: 291297 - DNA, 2034 bp, Homo sapiens
gcatgaggagagtgtgtaggggccgggttccgtggatgaactctcacccgagcggtttctctttccgggacaacatggcgccgtccacgccgctcttgacagtccgaggatcagaaggactgtacatggtgaatggaccaccacattttacagaaagcacagtgtttccaagggaatctgggaagaattgcaaagtctgtatctttagtaaggatgggaccttgtttgcctggggcaatggagaaaaagtaaatattatcagtgtcactaacaagggactactgcactccttcgacctcctgaaggcagtttgccttgaattctcacccaaaaatactgtcctggcaacgtggcagccttacactacttctaaagatggcacagctgggatacccaacctacaactttatgatgtgaaaactgggacatgtttgaaatctttcatccagaaaaaaatgcaaaattggtgtccatcctggtcagaagatgaaactctttgtgcccgcaatgttaacaatgaagttcacttctttgaaaacaacaattttaacacaattgcaaataaattgcatttgcaaaaaattaatgattttgtattatcacctggaccccaaccatacaaggtggctgtctatgttccaggaagtaaaggtgcaccttcatttgttagattatatcagtaccccaactttgctggacctcatgcagctttagctaataaaagtttctttaaggcagataaagttacaatgctgtggaataaaaaagctactgctgtgttggtaatagctagcacagatgttgacaagacaggagcttcctactatggagaacaaactctacactacattgcaacaaatggagaaagtgctgtagtgcaattaccaaaaaatggccccatttatgatgtagtttggaattctagttctactgagttttgtgctgtatatggttttatgcctgccaaagcgacaattttcaacttgaaatgtgatcctgtatttgactttggaactggtcctcgtaatgcagcctactatagccctcatggacatatattagtattagctggatttggaaatctgaggggacaaatggaagtgtgggatgtgaaaaactacaaacttatttctaaaccggtggcttctgattctacatattttgcttggtgcccggatggtgagcatattttaacagctacatgtgctcccaggttacgggttaataatggatacaaaatttggcattatactggctctatcttgcacaagtatgatgtgccatcaaatgcagaattatggcaggtttcttggcagccatttttggatggaatatttccagcaaaaacaataacttaccaagcagttccaagtgaagtacccaatgaggaacctaaagttgcaacagcttatagacccccagctttaagaaataaaccaatcaccaattccaaattgcatgaagaggaaccacctcagaatatgaaaccacaatcaggaaacgataagccattatcaaaaacagctcttaaaaatcaaaggaagcatgaagctaagaaagctgcaaagcagaaactgaaagcaatcgaacaactgaaagaacaagcagcaactggaaaacagctagaaaaaaatcagttggagaaaattcagaaagaaacagcccttctccaggagctggaagatttggaattgggtatttaaagattcacggaaagcaagttgatgaccagaaatcagtgcaaacacatcttctgttaaacccattggtatacacagaatattcctgtgcccacacttaatgtcaatctataattttaaccatttatccaagattctactaagtgtaaaattatttaataatgtctattaaattgatatttatatcttgcatcctatatcatgtcaatatgtgatatagaaaagagatacgtgaattttttagctaagcttgacagattgaaagacaagtgtcatttttttttgtagagggtgatatataccatgtaaatgaataaagacattttaaatttaa

SEQ ID NO: 291298 - DNA, 2136 bp, Homo sapiens
ggtttctctttccgggacatttgtgcgtcagtctgacagtccgaggatcagaaggactgtacatggtgaatggaccaccacattttacagaaagcacagtgtttccaagggaatctgggaagaattgcaaagtctgtatctttagtaaggatgggaccttgtttgcctggggcaatggagaaaaagtaaatattatcagtgtcactaacaagggactactgcactccttcgacctcctgaaggcagtttgccttgaattctcacccaaaaatactgtcctggcaacgtggcagccttacactacttctaaagatggcacagctgggatacccaacctacaactttatgatgtgaaaactgggacatgtttgaaatctttcatccagaaaaaaatgcaaaattggtgtccatcctggtcagaagatgaaactctttgtgcccgcaatgttaacaatgaagttcacttctttgaaaacaacaattttattggctctagagtttcagcttcaggttcttttttagacacaattgcaaataaattgcatttgcaaaaaattaatgattttgtattatcacctggaccccaaccatacaaggtggctgtctatgttccaggaagtaaaggtgcaccttcatttgttagattatatcagtaccccaactttgctggacctcatgcagctttagctaataaaagtttctttaaggcagataaagttacaatgctgtggaataaaaaagctactgctgtgttggtaatagctagcacagatgttgacaagacaggagcttcctactatggagaacaaactctacactacattgcaacaaatggagaaagtgctgtagtgcaattaccaaaaaatggccccatttatgatgtagtttggaattctagttctactgagttttgtgctgtatatggttttatgcctgccaaagcgacaattttcaacttgaaatgtgatcctgtatttgactttggaactggtcctcgtaatgcagcctactatagccctcatggacatatattagtattagctggatttggaaatctgaggggacaaatggaagtgtgggatgtgaaaaactacaaacttatttctaaaccggtggcttctgattctacatattttgcttggtgcccggatggtgagcatattttaacagctacatgtgctcccaggttacgggttaataatggatacaaaatttggcattatactggctctatcttgcacaagtatgatgtgccatcaaatgcagaattatggcaggtttcttggcagccatttttggatggaatatttccagcaaaaacaataacttaccaagcagttccaagtgaagtacccaatgaggaacctaaagttgcaacagcttatagacccccagctttaagaaataaaccaatcaccaattccaaattgcatgaagaggaaccacctcagaatatgaaaccacaatcaggaaacgataagccattatcaaaaacagctcttaaaaatcaaaggaagcatgaagctaagaaagctgcaaagcaggaagcaagaagtgacaagagtccagatttggcacctactcctgccccacagagcacaccacgaaacactgtctctcagtcaatttctggggaccctgagatagacaaaaaaatcaagaacctaaagaagaaactgaaagcaatcgaacaactgaaagaacaagcagcaactggaaaacagctagaaaaaaatcagttggagaaaattcagaaagaaacagcccttctccaggagctggaagatttggaattgggtatttaaagattcacggaaagcaagttgatgaccagaaatcagtgcaaacacatcttctgttaaacccattggtatacacagaatattcctgtgcccacacttaatgtcaatctataattttaaccatttatccaagattctactaagtgtaaaattatttaataatgtctattaaattgatatttatatcttgcatcctatatcatgtcaatatgtgatatagaaaagagatacgtgaattttttagctaagcttgacagattgaaagacaagtgtcatttttttttgtagagggtgatatataccatgtaaatgaataaagacattttaaatttaa

SEQ ID NO: 291299 - DNA, 2045 bp, Homo sapiens
atggcgcgcttactaacgtcagtgactggcaaaacctggacgacatggcgcgtccacgccgctcttgacagtccgaggatcagaaggactgtacatggtgaatggaccaccacattttacagaaagcacagtgtttccaagggaatctgggaagaattgcaaagtctgtatctttagtaaggatgggaccttgtttgcctggggcaatggagaaaaagtaaatattatcagtgtcactaacaagggactactgcactccttcgacctcctgaaggcagtttgccttgaattctcacccaaaaatactgtcctggcaacgtggcagccttacactacttctaaagatggcacagctgggatacccaacctacaactttatgatgtgaaaactgggacatgtttgaaatctttcatccagaaaaaaatgcaaaattggtgtccatcctggtcagaagatgaaactctttgtgcccgcaatgttaacaatgaagttcacttctttgaaaacaacaattttaacacaattgcaaataaattgcatttgcaaaaaattaatgattttgtattatcacctggaccccaaccatacaaggtggctgtctatgttccaggaagtaaagataaagttacaatgctgtggaataaaaaagctactgctgtgttggtaatagctagcacagatgttgacaagacaggagcttcctactatggagaacaaactctacactacattgcaacaaatggagaaagtgctgtagtgcaattaccaaaaaatggccccatttatgatgtagtttggaattctagttctactgagttttgtgctgtatatggttttatgcctgccaaagcgacaattttcaacttgaaatgtgatcctgtatttgactttggaactggtcctcgtaatgcagcctactatagccctcatggacatatattagtattagctggatttggaaatctgaggggacaaatggaagtgtgggatgtgaaaaactacaaacttatttctaaaccggtggcttctgattctacatattttgcttggtgcccggatggtgagcatattttaacagctacatgtgctcccaggttacgggttaataatggatacaaaatttggcattatactggctctatcttgcacaagtatgatgtgccatcaaatgcagaattatggcaggtttcttggcagccatttttggatggaatatttccagcaaaaacaataacttaccaagcagttccaagtgaagtacccaatgaggaacctaaagttgcaacagcttatagacccccagctttaagaaataaaccaatcaccaattccaaattgcatgaagaggaaccacctcagaatatgaaaccacaatcaggaaacgataagccattatcaaaaacagctcttaaaaatcaaaggaagcatgaagctaagaaagctgcaaagcaggaagcaagaagtgacaagagtccagatttggcacctactcctgccccacagagcacaccacgaaacactgtctctcagtcaatttctggggaccctgagatagacaaaaaaatcaagaacctaaagaagaaactgaaagcaatcgaacaactgaaagaacaagcagcaactggaaaacagctagaaaaaaatcagttggagaaaattcagaaagaaacagcccttctccaggagctggaagatttggaattgggtatttaaagattcacggaaagcaagttgatgaccagaaatcagtgcaaacacatcttctgttaaacccattggtatacacagaatattcctgtgcccacacttaatgtcaatctataattttaaccatttatccaagattctactaagtgtaaaattatttaataatgtctattaaattgatatttatatcttgcatcctatatcatgtcaatatgtgatatagaaaagagatacgtgaattttttagctaagcttgacagattgaaagacaagtgtcatttttttttgtagagggtgatatataccatgtaaatgaataaagacattttaaatttaa

SEQ ID NO: 291300 - DNA, 1293 bp, Homo sapiens
cttaaaaatcaaaggaagcatgaagctaagaaagctgcaagagcaggaagcaagaagtgacaagattttgtgctgtatatggttttatgcctgccaaagcgacaattttcaacttgaaatgtgatcctgtatttgactttggaactggtcctcgtaatgcagcctactatagccctcatggacatatattagtattagctggatttggaaatctgaggggacaaatggaagtgtgggatgtgaaaaactacaaacttatttctaaaccggtggcttctgattctacatattttgcttggtgcccggatggtgagcatattttaacagctacatgtgctcccaggttacgggttaataatggatacaaaatttggcattatactggctctatcttgcacaagtatgatgtgccatcaaatgcagaattatggcaggtttcttggcagccatttttggatggaatatttccagcaaaaacaataacttaccaagcagttccaagtgaagtacccaatgaggaacctaaagttgcaacagcttatagacccccagctttaagaaataaaccaatcaccaattccaaattgcatgaagaggaaccacctcagaatatgaaaccacaatcaggaaacgataagccattatcaaaaacagctcttaaaaatcaaaggaagcatgaagctaagaaagctgcaaagcaggaagcaagaagtgacaagagtccagatttggcacctactcctgccccacagagcacaccacgaaacactgtctctcagtcaatttctggggaccctgagatagacaaaaaaatcaagaacctaaagaagaaactgaaagcaatcgaacaactgaaagaacaagcagcaactggaaaacagctagaaaaaaatcagttggagaaaattcagaaagaaacagcccttctccaggagctggaagatttggaattgggtatttaaagattcacggaaagcaagttgatgaccagaaatcagtgcaaacacatcttctgttaaacccattggtatacacagaatattcctgtgcccacacttaatgtcaatctataattttaaccatttatccaagattctactaagtgtaaaattatttaataatgtctattaaattgatatttatatcttgcatcctatatcatgtcaatatgtgatatagaaaagagatacgtgaattttttagctaagcttgacagattgaaagacaagtgtcatttttttttgtagagggtgatatataccatgtaaatgaataaagacattttaaatttaa

SEQ ID NO: 291301 - DNA, 816 bp, Homo sapiens
taatcgagctcggtacctgccaaagcgtagtacccaatgaggaacctaaagttgcaacagcttatagacccccagctttaagaaataaaccaatcaccaattccaaattgcatgaagaggaaccacctcagaatatgaaaccacaatcaggaaacgataagccattatcaaaaacagctcttaaaaatcaaaggaagcatgaagctaagaaagctgcaaagcaggaagcaagaagtgacaagagtccagatttggcacctactcctgccccacagagcacaccacgaaacactgtctctcagtcaatttctggggaccctgagatagacaaaaaaatcaagaacctaaagaagaaactgaaagcaatcgaacaactgaaagaacaagcagcaactggaaaacagctagaaaaaaatcagttggagaaaattcagaaagaaacagcccttctccaggagctggaagatttggaattgggtatttaaagattcacggaaagcaagttgatgaccagaaatcagtgcaaacacatcttctgttaaacccattggtatacacagaatattcctgtgcccacacttaatgtcaatctataattttaaccatttatccaagattctactaagtgtaaaattatttaataatgtctattaaattgatatttatatcttgcatcctatatcatgtcaatatgtgatatagaaaagagatacgtgaattttttagctaagcttgacagattgaaagacaagtgtcatttttttttgtagagggtgatatataccatgtaaatgaataaagacattttaaatttaa

SEQ ID NO: 291302 - DNA, 1872 bp, Homo sapiens
gcatgaggagagtgtgtaggggccgggttccgtggatgaactctcacccgagcggtttctctttccgggacaacatggcgccgtccacgccgctcttgacagtccgaggatcagaaggactgtacatggtgaatggaccaccacattttacagaaagcacagtgtttccaagggaatctgggaagaattgcaaagtctgtatctttagtaaggatgggaccttgtttgcctggggcaatggagaaaaagtaaatattatcagtgtcactaacaagggactactgcactccttcgacctcctgaaggcagtttgccttgaattctcacccaaaaatactgtcctggcaacgtggcagccttacactacttctaaagatggcacagctgggatacccaacctacaactttatgatgtgaaaactgggacatgtttgaaatctttcatccagaaaaaaatgcaaaattggtgtccatcctggtcagaagatgaaactctttgtgcccgcaatgttaacaatgaagttcacttctttgaaaacaacaattttaacacaattgcaaataaattgcatttgcaaaaaattaatgattttgtattatcacctggaccccaaccatacaaggtggctgtctatgttccaggaagtaaaggtgcaccttcatttgttagattatatcagtaccccaactttgctggacctcatgcagctttagctaataaaagtttctttaaggcagataaagttacaatgctgtggaataaaaaagctactgctgtgttggtaatagctagcacagatgttgacaagacaggagcttcctactatggagaacaaactctacactacattgcaacaaatggagaaagtgctgtagtgcaattaccaaaaaatggccccatttatgatgtagtttggaattctagttctactgagttttgtgctgtatatggttttatgcctgccaaagcgacaattttcaacttgaaatgtgatcctgtatttgactttggaactggtcctcgtaatgcagcctactatagccctcatggacatatattagtattagctggatttggaaatctgaggggacaaatggaagtgtgggatgtgaaaaactacaaacttatttctaaaccggtggcttctgattctacatattttgcttggtgcccggatggtgagcatattttaacagctacatgtgctcccaggttacgggttaataatggatacaaaatttggcattatactggctctatcttgcacaagtatgatgtgccatcaaatgcagaattatggcaggtttcttggcagccatttttggatggaatatttccagcaaaaacaataacttaccaagcagttccaagtgaagtacccaatgaggaacctaaagttgcaacagcttatagacccccagctttaagaaataaaccaatcaccaattccaaattgcatgaagaggaaccacctcagaatatgaaaccacaatcaggaaacgataagccattatcaaaaacagctcttaaaaatcaaaggaagcatgaagctaagaaagctgcaaagcaggaagcaagaagtgacaagagtccagatttggcacctactcctgccccacagagcacaccacgaaacactgtctctcagtcaatttctggggaccctgagatagacaaaaatcagaactaagaagaaatggaagcatcgaacatgaagacagcgcatggaacagttgaaaatcgtggggaatcgaagaagctttcaggaggaattgatgggttacaatccggagagtgtgtccgaatctggcttttgtacctggtagattcgggactagggtatttactctccgttcaaggggtaggcgagg

SEQ ID NO: 291303 - DNA, 2074 bp, Homo sapiens
  misc_feature (2074)..(2074): n is a, c, g, or t
gcatgaggagagtgtgtaggggccgggttccgtggatgaactctcacccgagcggtttctctttccgggacaacatggcgccgtccacgccgctcttgacagtccgaggatcagaaggactgtacatggtgaatggaccaccacattttacagaaagcacagtgtttccaagggaatctgggaagaattgcaaagtctgtatctttagtaaggatgggaccttgtttgcctggggcaatggagaaaaagtaaatattatcagtgtcactaacaagggactactgcactccttcgacctcctgaaggcagtttgccttgaattctcacccaaaaatactgtcctggcaacgtggcagccttacactacttctaaagatggcacagctgggatacccaacctacaactttatgatgtgaaaactgggacatgtttgaaatctttcatccagaaaaaaatgcaaaattggtgtccatcctggtcagaagatgaaactctttgtgcccgcaatgttaacaatgaagttcacttctttgaaaacaacaattttaacacaattgcaaataaattgcatttgcaaaaaattaatgattttgtattatcacctggaccccaaccatacaaggtggctgtctatgttccaggaagtaaaggtgcaccttcatttgttagattatatcagtaccccaactttgctggacctcatgcagctttagctaataaaagtttctttaaggcagataaagttacaatgctgtggaataaaaaagctactgctgtgttggtaatagctagcacagatgttgacaagacaggagcttcctactatggagaacaaactctacactacattgcaacaaatggagaaagtgctgtagtgcaattaccaaaaaatggccccatttatgatgtagtttggaattctagttctactgagttttgtgctgtatatggttttatgcctgccaaagcgacaattttcaacttgaaatgtgatcctgtatttgactttggaactggtcctcgtaatgcagcctactatagccctcatggacatatattagtattagctggatttggaaatctgaggggacaaatggaagtgtgggatgtgaaaaactacaaacttatttctaaaccggtggcttctgattctacatattttgcttggtgcccggatggtgagcatattttaacagctacatgtgctcccaggttacgggttaataatggatacaaaatttggcattatactggctctatcttgcacaagtatgatgtgccatcaaatgcagaattatggcaggtttcttggcagccatttttggatggaatatttccagcaaaaacaataacttaccaagcagttccaagtgaagtacccaatgaggaacctaaagttgcaacagcttatagacccccagctttaagaaataaaccaatcaccaattccaaattgcatgaagaggaaccacctcagaatatgaaaccacaatcaggaaacgataagccattatcaaaaacagctcttaaaaatcaaaggaagcatgaagctaagaaagctgcaaagcagaaactgaaagcaatcgaacaactgaaagaacaagcagcaactggaaaacagctagaaaaaaatcagttggagaaaattcagaaagaaacagcccttctccaggagctggaagatttggaattgggtatttaaagattcacggaaagcaagttgatgaccagaaatcagtgcaaacacatcttctgttaaacccattggtatacacagaatattcctgtgcccacacttaatgtcaatctataattttaaccatttatccaagattctactaagtgtaaaattatttaataatgtctattaaattgatatttatatcttgcatcctatatcatgtcaatatgtgatatagaaaagagatacgtgaattttttagctaagcttgacagattgaaagacaagtgtcatttttttttgtagagggtgatatataccatgtaaatgaataaagacattttaaatttaaggcctcgttggcctcagcggtggagctctgccggccggan

SEQ ID NO: 291304 - DNA, 1394 bp, Homo sapiens
gcatgaggagagtgtgtaggggccgggttccgtggatgaactctcacccgagcggtttctctttccgggacaacatggcgccgtccacgccgctcttgacagtccgaggatcagaaggactgtacatggtgaatggaccaccacattttacagaaagcacagtgtttccaagggaatctgggaagaattgcaaagtctgtatctttagtaaggatgggaccttgtttgcctggggcaatggagaaaaagtaaatattatcagtgtcactaacaagggactactgcactccttcgacctcctgaaggcagtttgccttgaattctcacccaaaaatactgtcctggcaacgtggcagccttacactacttctaaagatggcacagctgggatacccaacctacaactttatgatgtgaaaactgggacatgtttgaaatctttcatccagaaaaaaatgcaaaattggtgtccatcctggtcagaagatgaaactctttgtgcccgcaatgttaacaatgaagttcacttctttgaaaacaacaattttaacacaattgcaaataaattgcatttgcaaaaaattaatgattttgtattatcacctggaccccaaccatacaaggtggctgtctatgttccaggaagtaaaggtgcaccttcatttgttagattatatcagtaccccaactttgctggacctcatgcagctttagctaataaaagtttctttaaggcagataaagttacaatgctgtggaataaaaaagctactgctgtgttggtaatagctagcacagatgttgacaagacaggagcttcctactatggagaacaaactctacactacattgcaacaaatggagaaagtgctgtagtgcaattaccaaaaaatggccccatttatgatgtagtttggaattctagttctactgagttttgtgctgtatatggttttatgcctgccaaagcgacaattttcaacttgaaatgtgatcctgtatttgactttggaactggtcctcgtaatgcagcctactatagccctcatggacatatattagtattagctggatttggaaatctgaggggacaaatggaagtgtgggatgtgaaaaactacaaacttatttctaaaccggtggcttctgattctacatattttgcttggtgcccggatggtgagcatattttaacagcgctacatgtgctcccaggttacgggttaataatgaacaattggcatatcgctctatctgcacagtatggatgtccatcaatcagattatggcagttcggcaccattggatgatattcagcaacatactcaccccaaggttttccaagtcaggaacgctctagtggacggggttgtgacacggaacagctatgacat

SEQ ID NO: 291305 - DNA, 735 bp, Homo sapiens
  misc_feature (56)..(56): n is a, c, g, or t
  misc_feature (62)..(62): n is a, c, g, or t
  misc_feature (73)..(73): n is a, c, g, or t
  misc_feature (78)..(78): n is a, c, g, or t
  misc_feature (85)..(86): n is a, c, g, or t
  misc_feature (89)..(89): n is a, c, g, or t
  misc_feature (95)..(95): n is a, c, g, or t
  misc_feature (99)..(99): n is a, c, g, or t
  misc_feature (104)..(104): n is a, c, g, or t
  misc_feature (116)..(117): n is a, c, g, or t
  misc_feature (119)..(119): n is a, c, g, or t
  misc_feature (121)..(122): n is a, c, g, or t
  misc_feature (130)..(130): n is a, c, g, or t
  misc_feature (137)..(137): n is a, c, g, or t
  misc_feature (139)..(139): n is a, c, g, or t
  misc_feature (141)..(141): n is a, c, g, or t
  misc_feature (143)..(144): n is a, c, g, or t
  misc_feature (170)..(171): n is a, c, g, or t
  misc_feature (191)..(191): n is a, c, g, or t
  misc_feature (194)..(194): n is a, c, g, or t
ttcctaacttccatttttaaaaaaaaggtggctataactttttagaaaagtttccnccaganggcaagtccancctanccagagnncgncaggtnttcnccttncagctaccgaannananncccccttntgcaaangngntnngtcggatagctacgcctttggacagnngcacccattaaatggaacantgnttatgtctccccaccctcctccccactaatgcactaaaaagcttcaggagagacaaaaaaatcaagaacctaaagaagaaactgaaagcaatcgaacaactgaaagaacaagcagcaactggaaaacagctagaaaaaaatcagttggagaaaattcagaaagaaacagcccttctccaggagctggaagatttggaattgggtatttaaagattcacggaaagcaagttgatgaccagaaatcagtgcaaacacatcttctgttaaacccattggtatacacagaatattcctgtgcccacacttaatgtcaatctataattttaaccatttatccaagattctactaagtgtaaaattatttaataatgtctattaaattgatatttatatcttgcatcctatatcatgtcaatatgtgatatagaaaagagatacgtgaattttttagctaagcttgacagattgaaagacaagtgtcatttttttttgtagagggtgatatataccatgtaaatgaataaagacattttaaatttaa

SEQ ID NO: 291306 - DNA, 522 bp, Homo sapiens
ccccctcatatatcaatttcccttgatgtaataattaataggggtttgtaggctacaagaaactgaaagcaatcgaacaactgaaagaacaagcagcaactggaaaacagctagaaaaaaatcagttggagaaaattcagaaagaaacagcccttctccaggagctggaagatttggaattgggtatttaaagattcacggaaagcaagttgatgaccagaaatcagtgcaaacacatcttctgttaaacccattggtatacacagaatattcctgtgcccacacttaatgtcaatctataattttaaccatttatccaagattctactaagtgtaaaattatttaataatgtctattaaattgatatttatatcttgcatcctatatcatgtcaatatgtgatatagaaaagagatacgtgaattttttagctaagcttgacagattgaaagacaagtgtcatttttttttgtagagggtgatatataccatgtaaatgaataaagacattttaaatttaa

SEQ ID NO: 291307 - DNA, 2014 bp, Homo sapiens
gcatgaggagagtgtgtaggggccgggttccgtggatgaactctcacccgagcggtttctctttccgggacaacatggcgccgtccacgccgctcttgacagtccgaggatcagaaggactgtacatggtgaatggaccaccacattttacagaaagcacagtgtttccaagggaatctgggaagaattgcaaagtctgtatctttagtaaggatgggaccttgtttgcctggggcaatggagaaaaagtaaatattatcagtgtcactaacaagggactactgcactccttcgacctcctgaaggcagtttgccttgaattctcacccaaaaatactgtcctggcaacgtggcagccttacactacttctaaagatggcacagctgggatacccaacctacaactttatgatgtgaaaactgggacatgtttgaaatctttcatccagaaaaaaatgcaaaattggtgtccatcctggtcagaagatgaaactctttgtgcccgcaatgttaacaatgaagttcacttctttgaaaacaacaattttagtatggaaagatttatgacataattttattacttactgtaatcgtatacagtttccattaacttttatgacatcatagggttttcctaaatactgttaatctattaatcaataattactcttacatacatttgcataattctttataagtctgaattcagtgaaaatctgtaacacaaaggttttcttttacaataactttttattatctggtaattgctattaagacatttgaatatcttttcctgaatttaattgctattgaaattctgtgacacaaattttttagatattttatcgtgtagaattttaaacttcagacacctagttctagtaaccatcagcttgtggccaatcttatctcatccatacatctctccagctaccatctcttactaagtgaaagcaaatcccagatatggttatacttttatatacttgttaaatatgtaattgtaaatatttcagagtagatttctgaagattggggcctttcattttttaaacttagccacaaaaccattatcacaaattattaaatatgtgttcaaatttctactaattgcaaatgttacaattttttttaaaactcgggatccaaataaggtactgcacattgtggttgattgatatatcttttatgtttcttttggtcctataagttcccactctatctgttattttattcttcataatttattgtttaagaaacaaggttatttgtctttcacgttttcccatagtttgaattttgcttttgtatcccatggtataatttaacatgttcatctgtcccctataaattgcaagttggctctagagtttcagcttcaggttcttttttaggtgagtaagggtaagactacattataaggtgatgttcacttcttttatcaagaagcacataatgtctggttgtctttaattttgtaggcttagctgacattaatgtttcatgcctggatgcattatttcatcagtggttgcaaattgttgatactctggttttttctccctcacttatttttcagctgtactgcttctataaagaaaaatttccccttctactatttggttacctagtgctgcatttatatagaaaaggcgggataaatattcttgctcttatcagttttaatataatgtattccacctctagcaaccttcattgtaaccaattagctttttccccattcttgtttttcgagagtgggcctcattcttttgtccaagctgagtgcaatcatggctcactgcaatctcgacttcctgggctcaagcaattctcctgcctcagcctcccaagtagctgggactacaggcttgcaccaccatgcccggctaatttttgattatttgtagagacaggatctcattatgttgcccaggctgttttttagttccattctttttttttttttttttttttttgagatggagtttcgctgttgttgcccgggctggag

SEQ ID NO: 291308 - DNA, 1833 bp, Homo sapiens
gcatgaggagagtgtgtaggggccgggttccgtggatgaactctcacccgagcggtttctctttccgggacaacatggcgccgtccacgccgctcttgacagtccgaggatcagaaggactgtacatggtgaatggaccaccacattttacagaaagcacagtgtttccaagggaatctgggaagaattgcaaagtctgtatctttagtaaggatgggaccttgtttgcctggggcaatggagaaaaagtaaatattatcagtgtcactaacaagggactactgcactccttcgacctcctgaaggcagtttgccttgaattctcacccaaaaatactgtcctggcaacgtggcagccttacactacttctaaagatggcacagctgggatacccaacctacaactttatgatgtgaaaactgggacatgtttgaaatctttcatccagaaaaaaatgcaaaattggtgtccatcctggtcagaagatgaaactctttgtgcccgcaatgttaacaatgaagttcacttctttgaaaacaacaattttagtatggaaagatttatgacataattttattacttactgtaatcgtatacagtttccattaacttttatgacatcatagggttttcctaaatactgttaatctattaatcaataattactcttacatacatttgcataattctttataagtctgaattcagtgaaaatctgtaacacaaaggttttcttttacaataactttttattatctggtaattgctattaagacatttgaatatcttttcctgaatttaattgctattgaaattctgtgacacaaattttttagatattttatcgtgtagaattttaaacttcagacacctagttctagtaaccatcagcttgtggccaatcttatctcatccatacatctctccagctaccatctcttactaagtgaaagcaaatcccagatatggttatacttttatatacttgttaaatatgtaattgtaaatatttcagagtagatttctgaagattggggcctttcattttttaaacttagccacaaaaccattatcacaaattattaaatatgtgttcaaatttctactaattgcaaatgttacaattttttttaaaactcgggatccaaataaggtactgcacattgtggttgattgatatatcttttatgtttcttttggtcctataagttcccactctatctgttattttattcttcataatttattgtttaagaaacaaggttatttgtctttcacgttttcccatagtttgaattttgcttttgtatcccatggtataatttaacatgttcatctgtcccctataaattgcaagttggctctagagtttcagcttcaggttcttttttaggtgagtaagggtaagactacattataaggtgatgttcacttcttttatcaagaagcacataatgtctggttgtctttaattttgtaggcttagctgacattaatgtttcatgcctggatgcattatttcatcagtggttgcaaattgttgatactctggttttttctccctcacttatttttcagctgtactgcttctataaagaaaaatttccccttctactatttggttacctagtgctgcatttatatagaaaaggcgggataaatattcttgctcttatcagttttaatataatgtattccacctctagcaaccttcattgtaaccaattagctttttccccattcttgtttttcgagagtgggcctcattcttttgtccaaccgagatcgcaccactgcactccagcctgagcaacagagtgagactccgtctc

SEQ ID NO: 291309 - DNA, 538 bp, Homo sapiens
  misc_feature (22)..(22): n is a, c, g, or t
  misc_feature (34)..(34): n is a, c, g, or t
  misc_feature (47)..(47): n is a, c, g, or t
  misc_feature (62)..(63): n is a, c, g, or t
  misc_feature (93)..(93): n is a, c, g, or t
  misc_feature (98)..(98): n is a, c, g, or t
  misc_feature (141)..(141): n is a, c, g, or t
tggagtgggggtgtaaatatanaaaaaatatttntgactgaagttanaaataaaaaaagcgnnggggctttgttagctgaccagcatcgaacntctgnagagacaacgcagcaactggaaaacagctagaaaaaaatcagnttggagaaaattcagaaagaaacagcccttctccaggagctggaagatttggaattgggtatttaaagattcacggaaagcaagttgatgaccagaaatcagtgcaaacacatcttctgttaaacccattggtatacacagaatattcctgtgcccacacttaatgtcaatctataattttaaccatttatccaagattctactaagtgtaaaattatttaataatgtctattaaattgatatttatatcttgcatcctatatcatgtcaatatgtgatatagaaaagagatacgtgaattttttagctaagcttgacagattgaaagacaagtgtcatttttttttgtagagggtgatatataccatgtaaatgaataaagacattttaaatttaa

SEQ ID NO: 291310 - DNA, 794 bp, Homo sapiens
ggccccacggaacgcaggaaaacaacggctaaggatgcgaggcctgcgtgttagacgacatggcgcgtccacgccgctcttgacagtccgaggatcagaaggactgtacatggtgaatggaccaccacattttacagaaagcacagtgtttccaagggaatctgggaagaattgcaaagtctgtatctttagtaaggatgggaccttgtttgcctggggcaatggagaaaaagtaaatattatcagtgtcactaacaagggactactgcactccttcgacctcctgaaggcagtttgccttgaattctcacccaaaaatactgtcctggcaacgtggcagccttacactacttctaaagatggcacagctgggatacccaacctacaactttatgatgtgaaaactgggacatgtttgaaatctttcatccagaaaaaaatgcaaaattggtgtccatcctggtcagaagatgaaactctttgtgcccgcaatgttaacaatgaagttcacttctttgaaaacaacaattttaacacaattgcaaataaattgcatttgcaaaaaattaatgattttgtattatcacctggaccccaaccatacaaggtggctgtctatgttccaggaagtaaaggtgcaccttcatttgttagattatatcagtaccccaactttgctggacctcatgcagctttagctaataaaagtttctttaaggcagataaagttacaatgctgtggaataaaaaagtatggagacaaactctcactcattggaacaatggggaaggga

SEQ ID NO: 291311 - DNA, 682 bp, Homo sapiens
  misc_feature (56)..(56): n is a, c, g, or t
  misc_feature (62)..(62): n is a, c, g, or t
  misc_feature (73)..(73): n is a, c, g, or t
  misc_feature (78)..(78): n is a, c, g, or t
  misc_feature (85)..(86): n is a, c, g, or t
  misc_feature (89)..(89): n is a, c, g, or t
  misc_feature (95)..(95): n is a, c, g, or t
  misc_feature (99)..(99): n is a, c, g, or t
  misc_feature (104)..(104): n is a, c, g, or t
  misc_feature (116)..(117): n is a, c, g, or t
  misc_feature (119)..(119): n is a, c, g, or t
  misc_feature (121)..(122): n is a, c, g, or t
  misc_feature (130)..(130): n is a, c, g, or t
  misc_feature (137)..(137): n is a, c, g, or t
  misc_feature (139)..(139): n is a, c, g, or t
  misc_feature (141)..(141): n is a, c, g, or t
  misc_feature (143)..(144): n is a, c, g, or t
  misc_feature (170)..(171): n is a, c, g, or t
  misc_feature (191)..(191): n is a, c, g, or t
  misc_feature (194)..(194): n is a, c, g, or t
ttcctaacttccatttttaaaaaaaaggtggctataactttttagaaaagtttccnccaganggcaagtccancctanccagagnncgncaggtnttcnccttncagctaccgaannananncccccttntgcaaangngntnngtcggatagctacgcctttggacagnngcacccattaaatggaacantgnttatgtctccccaccctcctccccactaatgcactaaaaagcttcaggagagacaaaaaaatcaagaacctaaagaagaaactgaaagcaatcgaacaactgaaagaacaagcagcaactggaaaacagctagaaaaaaatcagttggagaaaattcagaaagaaacagcccttctccaggagctggaagatttggaattgggtatttaaagattcacggaaagcaagttgatgaccagaaatcagtgcaaacacatcttctgttaaacccattgcatttatccaagattctactaagtgtaaaattatttaataatgtctattaaattgatatttatatcttgcatcctatatcatgtcaatatgtgatatagaaaagagatacgtgaattttttagctaagcttgacagattgaaagacaagtgtcatttttttttgtagagggtgatatataccatgtaaatgaataaagacattttaaatttaa

SEQ ID NO: 291312 - DNA, 379 bp, Homo sapiens
tggaagatttggaattgggtatttaaagattcacggaaagcaagttgatgaccagaaatcagtgcaaacacatcttctgttaaacccattggtatacacagaatattcctgtgcccacacttaatgtcaatctataattttaaccatttatccaagattctactaagtgtaaaattatttaataatgtctattaaattgatatttatatcttgcatcctatatcatgtcaatatgtgatatagaaaagagatacgtgaattttttagctaagcttgacagattgaaagacaagtgtcatttttttttgtagagggtgatatataccatgtaaatgaataaagacattttaaatttaaaatcactgtttttattataagt

SEQ ID NO: 291313 - DNA, 424 bp, Homo sapiens
ctactgcactccttcgacctcctgaaggcagtttgccttgaattctcacccaaaaatactgtcctggcaacgtggcagccttacactagtaagtattttctcagtgtaaaaatactctgacacgatcaattacgtttagtgggggggaaaaagttataaagtttataacctcataagaaagtaattagtctttatgatagtaaatagtgtttgtgaatatttatgatctacagtgaatcttgtactctccaaataaacaatgtattgaaagtaatttcaaggtatatggtaagttaatgtaaagagccattatgagctaaaggaaaagaaaaagctcaagggaaaattcaggaagtaaataactgctggatagagatttctgaagattaagaataataatgacttttaaaatcaagacttttaa

SEQ ID NO: 291314 - DNA, 955 bp, Homo sapiens
  misc_feature (2)..(2): n is a, c, g, or t
  misc_feature (10)..(10): n is a, c, g, or t
  misc_feature (14)..(14): n is a, c, g, or t
cngccgtgtntttntgttcgtaaggggaggggacccctctccagaaaatgaccagcccacatgactagcacgctgagctctgcagggaccagtgccaggcactggggggtggaagtgtggtgacacagtgaatgggaggtggaggagggttgcagctcccacctcagtttagtttttaattcagggttttcaacctgtaacacattaaagctgtaattagcaatgaggctgtattttcattctgaagcttgtaacctccccattttagcactacagaattttcaagatttcaatatccaacaactagatagattaggacctctatccgagatgctttttccctgcccaaccctgtggccttcagggctcagagcagcaaaggcctgaagagtgagctctgggggttgttggtgtgggttgggagagagctgtgtgcagaagtctggaaacctgggtcctagtcccagctcttccatgggatccccctgtcaccctgagcaaatcagttgcttcctggacttgtgttacttcatctaattctcatgtggattggacgacttctgctccctttccagttctggcatctccccagtatggaagtcccggtggtctccccaagaagtccccaagacaatctcgccaaaggcacctcctatcctgctgcagtttcccagctgcagcctaggcaggggatgcacagcccaggcgaggaagcctggcttctctgtgagcacatacgtgggtcctcggcagctccctccaggctgtctgggcctccagacctgcacagggtgctcctgccacctcccacctctctgagggctgaggtgagacttctcctgggatgacaatttgctgagagagtgcagcttttgtgaattaaacttgaagtccaggcagaattctaatgcaataagctaaatgttcttgcaatttaagaagtgttcattcttta

SEQ ID NO: 291315 - DNA, 2391 bp, Homo sapiens
tgcgccgggggtgtgtacgccatgagggggaggaagccgagaagcacctcccactgaagccggcggtaaccgccccacgcgagaccacccaccagccaggagcggtcgcaggacccgcagcggcgcgaggccttgtttacaccgactgccgccactgcgttggccaaccgctcctccgtcacgcgcttcgctcgtcacgcatctcgcggcttcctggccggcgggctgcaaacgtcacacgacggccccgcccccttggccagccaactggacagcggagcacgatgattgataggccaataagatatgcaaatgatctccttaccttattggttggaggcctcaggaccacagatgacctcagagagctggccctttaagaatgccctttgggctctgtgcccacagccccctggagctgagcagaggcaccaggccctgctccatggagccttcagtctcctgggaagctgtgcctgtctggctctggcactgaccacatcctctcggccatttctgaagtgcactcctcccagcccagctccagaatggccctgccccccagccccctggccatggaatatgtcaatgactttgacttgatgaagtttgaggtaaagcgggaaccctctgagggccgacctggcccccctacagcctcactgggctccacaccttacagctcagtgcctccttcacccaccttcagtgaaccaggcatggtgggggcaaccgagggcacccggccaggcctggaggagctgtactggctggctaccctgcagcagcagctgggggctggggaggcattggggctgagtcctgaagaggccatggagctgctgcagggtcagggcccagtccctgttgatgggccccatggctactacccagggagcccagaggagacaggagcccagcacgtccagctggcagagcggttttccgacgcggcgctggtctcgatgtctgtgcgggagctaaaccggcagctgcggggctgcgggcgcgacgaggcgctgcggctgaagcagaggcgccgcacgctgaagaaccgcggctacgcgcaggcctgtcgctccaagcggctgcagcagcggcgcgggctggaggccgagcgcgcccgcctggccgcccagctggacgcgctgcgggccgaggtggcccgcctggcccgggagcgcgatctctacaaggctcgctgtgaccggctaacctcgagcggccccgggtccggggacccctcccacctcttcctctgagccgttcagagcaccttgtggtgtagtgggggctgggtggggtggctccgcccaggaggcggctgcacggttctctgcatcgttaccagagcgccttctggtcctagccacgccctgtatgaccgcgcaaatatccccaaagcttttgggtcctcaagtcatgcccgaatttagatgctggtcattttctggagaggggtcccctccccttacgaacacaaaaacccagcccacatgactagcacgctgagctctgcagggaccagtgccaggcactggggggtggaagtgtggtgacacagtgaatgggaggtggaggagggttgcagctcccacctcagtttagtttttaattcagggttttcaacctgtaacacattaaagctgtaattagcaatgaggctgtattttcattctgaagcttgtaacctccccattttagcactacagaattttcaagatttcaatatccaacaactagatagattaggacctctatccgagatgctttttccctgcccaaccctgtggccttcagggctcagagcagcaaaggcctgaagagtgagctctgggggttgttggtgtgggttgggagagagctgtgtgcagaagtctggaaacctgggtcctagtcccagctcttccatgggatccccctgtcaccctgagcaaatcagttgcttcctggacttgtgttacttcatctaattctcatgtggattggacgacttctgctccctttccagttctggcatctccccagtatggaagtcccggtggtctccccaagaagtccccaagacaatctcgccaaaggcacctcctatcctgctgcagtttcccagctgcagcctaggcaggggatgcacagcccaggcgaggaagcctggcttctctgtgagcacatacgtgggtcctcggcagctccctccaggctgtctgggcctccagacctgcacagggtgctcctgccacctcccacctctctgagggctgaggtgagacttctcctgggatgacaatttgctgagagagtgcagcttttgtgaattaaacttgaagtccaggcagaattctaatgcaataagctaaatgttcttgcaatttaagaagtgttcattcttta

SEQ ID NO: 291316 - DNA, 1657 bp, Homo sapiens
tgcgccgggggtgtgtacgccatgagggggaggaagccgagaagcacctcccactgaagccggcggtaaccgccccacgcgagaccacccaccagccaggagcggtcgcaggacccgcagcggcgcgaggccttgtttacaccgactgccgccactgcgttggccaaccgctcctccgtcacgcgcttcgctcgtcacgcatctcgcggcttcctggccggcgggctgcaaacgtcacacgacggccccgcccccttggccagccaactggacagcggagcacgatgattgataggccaataagatatgcaaatgatctccttaccttattggttggaggcctcaggaccacagatgacctcagagagctggccctttaagaatgccctttgggctctgtgcccacagccccctggagctgagcagaggcaccaggccctgctccatggagccttcagtctcctgggaagctgtgcctgtctggctctggcactgaccacatcctctcggccatttctgaagtgcactcctcccagcccagctccagaatggccctgccccccagccccctggccatggaatatgtcaatgactttgacttgatgaagtttgaggtaaagcgggaaccctctgagggccgacctggcccccctacagcctcactgggctccacaccttacagctcagtgcctccttcacccaccttcagtgaaccaggcatggtgggggcaaccgagggcacccggccaggcctggaggagctgtactggctggctaccctgcagcagcagctgggggctggggaggcattggggctgagtcctgaagaggccatggagctgctgcagggtcagggcccagtccctgttgatgggccccatggctactacccagggagcccagaggagacaggagcccagcacgtccagctggcagagcggttttccgacgcggcgctggtctcgatgtctgtgcgggagctaaaccggcagctgcggggctgcgggcgcgacgaggcgctgcggctgaagcagaggcgccgcacgctgaagaaccgcggctacgcgcaggcctgtcgctccaagcggctgcagcagcggcgcgggctggaggccgagcgcgcccgcctggccgcccagctggacgcgctgcgggccgaggtggcccgcctggcccgggagcgcgatctctacaaggctcgctgtgaccggctaacctcgagcggccccgggtccggggacccctcccacctcttcctctgagccgttcagagcaccttgtggtgtagtgggggctgggtggggtggctccgcccaggaggcggctgcacggttctctgcatcgttaccagagcgccttctggtcctagccacgccctgtatgaccgcgcaaatatccccaaagcttttgggtcctcaagtcatgcccgaatttagatgctggtcattttctggagaggggtcccctccccttacgaacacaaaaacccagcccacatgactagcacgctgagctctgcagggaccagtgccaggcactggggggtggaagtgtggtgacacagtgaatgggaggtggaggagggttgcagctcccacctcagtttagtttttaattcagggttttcaacctgtaacacattaaagctgtaattagc

SEQ ID NO: 291317 - DNA, 1839 bp, Homo sapiens
aaacaggacgagcctgggggctccaggcctggacggaggaagaagccagctatacggggtttctccatgctggccaagctggtctccaactcctgacctcgtgatccgcctgccttggcctcccaaagtgctggaatttacaggcgtgagccaccacgcccggcctggtcattctttctctccacaatccaatgaggaaactcatctgcccacccaactaccatcataaagtcctcaggtgatttctcaagctatacctccattgggacatctctctccaacctgagaccactggatatcacccacaatgctatatagcacctcaaactcagcatatctatgatgggtgtctgctcagcatccactcgccttttctgctggcagagcggttttccgacgcggcgctggtctcgatgtctgtgcgggagctaaaccggcagctgcggggctgcgggcgcgacgaggcgctgcggctgaagcagaggcgccgcacgctgaagaaccgcggctacgcgcaggcctgtcgctccaagcggctgcagcagcggcgcgggctggaggccgagcgcgcccgcctggccgcccagctggacgcgctgcgggccgaggtggcccgcctggcccgggagcgcgatctctacaaggctcgctgtgaccggctaacctcgagcggccccgggtccggggacccctcccacctcttcctctgagccgttcagagcaccttgtggtgtagtgggggctgggtggggtggctccgcccaggaggcggctgcacggttctctgcatcgttaccagagcgccttctggtcctagccacgccctgtatgaccgcgcaaatatccccaaagcttttgggtcctcaagtcatgcccgaatttagatgctggtcattttctggagaggggtcccctccccttacgaacacaaaaacccagcccacatgactagcacgctgagctctgcagggaccagtgccaggcactggggggtggaagtgtggtgacacagtgaatgggaggtggaggagggttgcagctcccacctcagtttagtttttaattcagggttttcaacctgtaacacattaaagctgtaattagcaatgaggctgtattttcattctgaagcttgtaacctccccattttagcactacagaattttcaagatttcaatatccaacaactagatagattaggacctctatccgagatgctttttccctgcccaaccctgtggccttcagggctcagagcagcaaaggcctgaagagtgagctctgggggttgttggtgtgggttgggagagagctgtgtgcagaagtctggaaacctgggtcctagtcccagctcttccatgggatccccctgtcaccctgagcaaatcagttgcttcctggacttgtgttacttcatctaattctcatgtggattggacgacttctgctccctttccagttctggcatctccccagtatggaagtcccggtggtctccccaagaagtccccaagacaatctcgccaaaggcacctcctatcctgctgcagtttcccagctgcagcctaggcaggggatgcacagcccaggcgaggaagcctggcttctctgtgagcacatacgtgggtcctcggcagctccctccaggctgtctgggcctccagacctgcacagggtgctcctgccacctcccacctctctgagggctgaggtgagacttctcctgggatgacaatttgctgagagagtgcagcttttgtgaattaaacttgaagtccaggcagaattctaatgcaataagctaaatgttcttgcaatttaagaagtgttcattcttta

SEQ ID NO: 291318 - DNA, 1711 bp, Homo sapiens
ggagggttgggggctgtctgggtgcgggtccactggacacacccgggcctggagctggatgccggggatcccagagacgagcccggggtttaggtgcgcgacgggctcgcctgaccgtggccggccctgcaccgtggggcgcccgcctgactggagcaacggtcagctggggggcccggggagcgtcggggcctggggcgggctctggaccgaaacagactgcgtggaagggcgagccttccggtgaagctggcagagcggttttccgacgcggcgctggtctcgatgtctgtgcgggagctaaaccggcagctgcggggctgcgggcgcgacgaggcgctgcggctgaagcagaggcgccgcacgctgaagaaccgcggctacgcgcaggcctgtcgctccaagcggctgcagcagcggcgcgggctggaggccgagcgcgcccgcctggccgcccagctggacgcgctgcgggccgaggtggcccgcctggcccgggagcgcgatctctacaaggctcgctgtgaccggctaacctcgagcggccccgggtccggggacccctcccacctcttcctctgagccgttcagagcaccttgtggtgtagtgggggctgggtggggtggctccgcccaggaggcggctgcacggttctctgcatcgttaccagagcgccttctggtcctagccacgccctgtatgaccgcgcaaatatccccaaagcttttgggtcctcaagtcatgcccgaatttagatgctggtcattttctggagaggggtcccctccccttacgaacacaaaaacccagcccacatgactagcacgctgagctctgcagggaccagtgccaggcactggggggtggaagtgtggtgacacagtgaatgggaggtggaggagggttgcagctcccacctcagtttagtttttaattcagggttttcaacctgtaacacattaaagctgtaattagcaatgaggctgtattttcattctgaagcttgtaacctccccattttagcactacagaattttcaagatttcaatatccaacaactagatagattaggacctctatccgagatgctttttccctgcccaaccctgtggccttcagggctcagagcagcaaaggcctgaagagtgagctctgggggttgttggtgtgggttgggagagagctgtgtgcagaagtctggaaacctgggtcctagtcccagctcttccatgggatccccctgtcaccctgagcaaatcagttgcttcctggacttgtgttacttcatctaattctcatgtggattggacgacttctgctccctttccagttctggcatctccccagtatggaagtcccggtggtctccccaagaagtccccaagacaatctcgccaaaggcacctcctatcctgctgcagtttcccagctgcagcctaggcaggggatgcacagcccaggcgaggaagcctggcttctctgtgagcacatacgtgggtcctcggcagctccctccaggctgtctgggcctccagacctgcacagggtgctcctgccacctcccacctctctgagggctgaggtgagacttctcctgggatgacaatttgctgagagagtgcagcttttgtgaattaaacttgaagtccaggcagaattctaatgcaataagctaaatgttcttgcaatttaagaagtgttcattcttta

SEQ ID NO: 291319 - DNA, 1757 bp, Homo sapiens
tgcgccgggggtgtgtacgccatgagggggaggaagccgagaagcacctcccactgaagccggcggtaaccgccccacgcgagaccacccaccagccaggagcggtcgcaggacccgcagcggcgcgaggccttgtttacaccgactgccgccactgcgttggccaaccgctcctccgtcacgcgcttcgctcgtcacgcatctcgcggcttcctggccggcgggctgcaaacgtcacacgacggccccgcccccttggccagccaactggacagcggagcacgatgattgatagctggcagagcggttttccgacgcggcgctggtctcgatgtctgtgcgggagctaaaccggcagctgcggggctgcgggcgcgacgaggcgctgcggctgaagcagaggcgccgcacgctgaagaaccgcggctacgcgcaggcctgtcgctccaagcggctgcagcagcggcgcgggctggaggccgagcgcgcccgcctggccgcccagctggacgcgctgcgggccgaggtggcccgcctggcccgggagcgcgatctctacaaggctcgctgtgaccggctaacctcgagcggccccgggtccggggacccctcccacctcttcctctgagccgttcagagcaccttgtggtgtagtgggggctgggtggggtggctccgcccaggaggcggctgcacggttctctgcatcgttaccagagcgccttctggtcctagccacgccctgtatgaccgcgcaaatatccccaaagcttttgggtcctcaagtcatgcccgaatttagatgctggtcattttctggagaggggtcccctccccttacgaacacaaaaacccagcccacatgactagcacgctgagctctgcagggaccagtgccaggcactggggggtggaagtgtggtgacacagtgaatgggaggtggaggagggttgcagctcccacctcagtttagtttttaattcagggttttcaacctgtaacacattaaagctgtaattagcaatgaggctgtattttcattctgaagcttgtaacctccccattttagcactacagaattttcaagatttcaatatccaacaactagatagattaggacctctatccgagatgctttttccctgcccaaccctgtggccttcagggctcagagcagcaaaggcctgaagagtgagctctgggggttgttggtgtgggttgggagagagctgtgtgcagaagtctggaaacctgggtcctagtcccagctcttccatgggatccccctgtcaccctgagcaaatcagttgcttcctggacttgtgttacttcatctaattctcatgtggattggacgacttctgctccctttccagttctggcatctccccagtatggaagtcccggtggtctccccaagaagtccccaagacaatctcgccaaaggcacctcctatcctgctgcagtttcccagctgcagcctaggcaggggatgcacagcccaggcgaggaagcctggcttctctgtgagcacatacgtgggtcctcggcagctccctccaggctgtctgggcctccagacctgcacagggtgctcctgccacctcccacctctctgagggctgaggtgagacttctcctgggatgacaatttgctgagagagtgcagcttttgtgaattaaacttgaagtccaggcagaattctaatgcaataagctaaatgttcttgcaatttaagaagtgttcattcttta

SEQ ID NO: 291320 - DNA, 498 bp, Homo sapiens
aaacaggacgagcctgggggctccaggcctggacggaggaagaagccagctatacggggtttctccatgctggccaagctggtctccaactcctgacctcgtgatccgcctgccttggcctcccaaagtgctggaatttacaggcgtgagccaccacgcccggcctggtcattctttctctccacaatccaatgaggaaactcatctgcccacccaactaccatcataaagtcctcaggtgcactcctcccagcccagctccagaatggccctgccccccagccccctggccatggaatatgtcaatgactttgacttgatgaagtttgaggtaaagcgggaaccctctgagggccgacctggcccccctacagcctcatggggggtggaagtgtggtgacacagtgaatgggaggtggaggagggttgcagctcccacctcagtttagtttttaattcagggttttcaacctgtaacacattaaagctgtaattagc

SEQ ID NO: 291321 - DNA, 534 bp, Homo sapiens
gggttgcttccatttgggattactataaataaacttgtcataaatatttatgtgccagtcattggatggacaagtttgaattttcttggaaaaatagctaggagtagagttgctgggtcatatgttaagcttatatttttatataaggagctgctaacctgttttccaaagtggtttgagacaggattttgctgtgttgcccagcctggagtgcacagaataagagaataaaccaagaaacaggaagacgtgatccaggcaacaggatattccagtataggtgagaaataagaaagtctccaagatgataatgaagggaaatcctagggtgatagctggcctggcagcaggcctagggagcaatcagtaaggctggagccagaggacaaaagcctccaggagggaggtacccaagaaataagatgaaatgaatacaggaaaaatctacacttttagtgaatgatggagaataaattcatgattggaacatagaaaactaagcaaataaatcccaattttgtttttaggtataat

SEQ ID NO: 291322 - DNA, 441 bp, Homo sapiens
ctcaggaaactactggaggatgtggtgcaccagaataagagaataaaccaagaaacaggaagacgtgatccaggcaacaggatattccagtatagtgttggaaacagaagcccagtagtgaaagctacagctgccatatacttgcagtggaatcacaggagcaatcacaggtctttacactccaggaaaaacagaatcttttaatcagcaaaatccatcatattacttaagtcacagatgctcaccaaggagaagaggtcattctgtaatccaagtcgatccacagggggcagagaaaggtcacgaatgcctggtaataaactttccagcatggcagagctgtactgggtccgataaaacccaactgttcctaagtttaactgcaaagatatccagtaagtactattaaacagctccattaattttttaaatcaacctttt

SEQ ID NO: 291323 - DNA, 545 bp, Homo sapiens
gggttgcttccatttgggattactataaataaacttgtcataaatatttatgtgccagtcattggatggacaagtttgaattttcttggaaaaatagctaggagtagagttgctgggtcatatgttaagcttatatttttatataaggagctgctaacctgttttccaaagtggtttgagacaggattttgctgtgttgcccagcctggagtgcacagaataagagaataaaccaagaaacaggaagacgtgatccaggcaacaggatattccagtatagacactccaggaaaaacagaatcttttaatcagcaaaatccatcatattacttaagtcacagatgctcaccaaggagaagaggtcattctgtaatccaagtcgatccacagggggcagagaaaggtcacgaatgcctggtaataaactttccagcatggcagagctgtactgggtccgataaaacccaactgttcctaagtttaactgcaaagatatccagtaagtactattaaacagctccattaattttttaaatcaacctttt

SEQ ID NO: 291324 - DNA, 4576 bp, Homo sapiens
  misc_feature (2)..(2): n is a, c, g, or t
  misc_feature (572)..(572): n is a, c, g, or t
ancaatataatctggcgaatgcaattgaggctgccgatgcctacacagtgtttgctccaaacaacaatgccatcgagaattacatcagggagaagaaagtcttgtctctagaggaggacgtcctccggtatcatgtggtcctggaggagaaactcctgaagaatgacctgcacaatggcatgcatcgtgagaccatgctgggtttctcctatttccttagcttctttctccataatgaccagctctatgtaaatgaggctccaataaactacaccaatgtagccactgataagggagtgatccatggcttgggaaaagttctggaaattcagaagaacagatgtgataataatgacactactattatacgaggaagatgtaggacatgctcctcagagctgacctgcccattcggaactaaatctctaggtaatgagaagaggagatgcatctatacctcctatttcatgggaagacgaaccctgtttattgggtgccagccaaaatgtgtgagaaccgtcattacgagagaatgctgtgccggcttctttggcccccaatgccagccctgnccagggaatgcccagaatgtctgctttggtaatggcatctgtttggatggagtgaatggcacaggtgtgtgtgagtgtggggagggcttcagcggcacagcctgcgagacctgcaccgagggcaagtacggcatccactgtgaccaagcatgttcttgtgtccatgggagatgcaaccaaggacccttgggagatggctcctgtgactgtgatgttggctggcgaggagtgcattgtgacaatgcaaccacagaagacaactgcaatgggacatgccataccagcgccaactgcctcaccaactcagatggtacagcttcatgcaagtgtgcagcaggattccaaggaaacgggaccatctgcacagcaatcaatgcctgtgagatcagcaatggaggttgctctgccaaggctgactgtaagagaaccaccccaggaaggcgagtgtgcacgtgcaaagcaggctacacgggtgatggcattgtgtgcctggaaatcaacccgtgtttggagaaccatggtggctgtgacaagaatgcggagtgcacacagacaggacccaaccaggctgcctgtaactgtttgccagcatacactggagatggaaaggtctgcacactcatcaatgtctgcttaactaaaaatggcggctgtagtgaatttgccatctgcaaccacactgggcaagtagaaaggacttgtacttgcaagccaaactacattggagatggatttacctgccgcggcagcatttatcaggagcttcccaagaacccgaaaacttcccagtatttcttccagttgcaggagcatttcgtgaaagatctggtcggcccaggccccttcactgtttttgcacctttatctgcagcctttgatgaggaagctcgggttaaagactgggacaaatacggtttaatgccccaggttcttcggtaccatgtggtcgcctgccaccagctgcttctggaaaacctgaaattgatctcaaatgctacttccctccaaggagagccaatagtcatctccgtctctcagagcacggtgtatataaataataaggctaagatcatatccagtgatatcatcagtactaatgggattgttcatatcatagacaaattgctatctcccaaaaatttgcttatcactcccaaagacaactctggaagaattctgcaaaatcttacgactttggcaacaaacaatggctacatcaaatttagcaacttaatacaggactcaggtttgctgagtgtcatcaccgatcccatccacaccccagtcactctcttctggcccaccgaccaagccctccatgccctacctgctgaacaacaggacttcctgttcaaccaagacaacaaggacaagctgaaggagtatttgaagtttcatgtgatacgagatgccaaggttttagctgtggatcttcccacatccactgcctggaagaccctgcaaggttcagagctgagtgtgaaatgtggagctggcagggacatcggtgacctctttctgaatggccaaacctgcagaattgtgcagcgggagctcttgtttgacctgggtgtggcctacggcattgactgtctgctgattgatcccaccctggggggccgctgtgacacctttactactttcgatgcctcgggggagtgtgggagctgtgtcaatactcccagctgcccaaggtggagtaaaccaaagggtgtgaagcagaagtgtctctacaacctgcccttcaagaggaacctggaaggctgccgggagcggtgcagcctggtgatacagatccccaggtgctgcaagggctacttcgggcgagactgtcaggcctgccctggaggaccagatgccccgtgtaataaccggggtgtctgccttgatcagtactcggccaccggagagtgtaaatgcaacaccggcttcaatgggacggcgtgtgagatgtgctggccggggagattcgggcctgattgtctgccctgtggctgctcagaccacggacagtgcgatgatggcatcacgggctccgggcagtgcctctgtgaaacggggtggacaggcccctcgtgtgacactcaggcagttttgcctgcagtgtgtacgcctccttgttctgctcatgccacctgtaaggagaacaacacgtgtgagtgtaacctggattatgaaggtgacggaatcacatgcacagttgtggatttctgcaaacaggacaacgggggctgtgcaaaggtggccagatgctcccagaagggcacgaaggtctcctgcagctgccagaagggatacaaaggggacgggcacagctgcacagagatagacccctgtgcagacggccttaacggagggtgtcacgagcacgccacctgtaagatgacaggcccgggcaagcacaagtgtgagtgtaaaagtcactatgtcggagatgggctgaactgtgagccggagcagctgcccattgaccgctgcttacaggacaatgggcagtgccatgcagacgccaaatgtgtcgacctccacttccaggataccactgttggggtgttccatctacgctccccactgggccagtataagctgacctttgacaaagccagagaggcctgtgccaacgaagctgcgaccatggcaacctacaaccagctctcctatgcccagaaggccaagtaccacctgtgctcagcaggctggctggagaccgggcgggttgcctaccccacagccttcgcctcccagaactgtggctctggtgtggttgggatagtggactatggacctagacccaacaagagtgaaatgtgggatgtcttctgctatcggatgaaagatgtgaactgcacctgcaaggtgggctatgtgggagatggcttctcatgcagtgggaacctgctgcaggtcctgatgtccttcccctcactcacaaacttcctgacggaagtgctggcctattccaacagctcagctcgaggccgtgcatttctagaacacctgactgacctgtccatccgcggcaccctctttgtgccacagaacagtgggctgggggagaatgagaccttgtctgggcgggacatcgagcaccacctcgccaatgtcagcatgtttttctacaatgaccttgtcaatggcaccaccctgcaaacgaggctgggaagcaagctgctcatcactgccagccaggacccactccaaccgacggagaccaggtttgttgatggaagagccattctgcagtgggacatctttgcctccaatgggatcattcatgtcatttccaggcctttaaaagcaccccctgcccccgtgaccttgacccacactggcttgggagcagggatcttctttgccatcatcctggtgactggggctgttgccttggctgcttactcctactttcggataaaccggagaacaatcggcttccagcattttgagtcggaagaggacattaatgttgcagctcttggcaagcagcagcctgagaatatctcgaaccccttgtatgagagcacaacctcagctcccccagaaccttcctacgaccccttcacggactctgaagaacggcagcttgagggcaatgaccccttgaggacactgtgagggcctggacgggagatgccagccatcactcactgccacctgggcccatcaactgtgaattctcagcaccagttgccttttaggaacgtaaagtcctttaagcactcagaagccatacctcatctctctggctgatctgggggttgtttctgtgggtgagagatgtgttgctgtgcccacccagtacagcttcctcctctgaccctttggctcttcttcctttgtactcttcagctggcacctgctccattctgccctacatgatgggtaactgtgatctttcttccctgttagattgtaagcctccgtctttgtatcccagcccctagcccagtgcctgacacaggaactgtgcacaataaaggtttatggaacagaaacaaagtcaacag

SEQ ID NO: 291325 - DNA, 442 bp, Homo sapiens
cttgctagattctgtctcctgcacccctgccctttttgtgattcaagacccctgttaaagactatggattcccctagaagtaggttggagaattaagtgcaataaagcaaaccctagtaaatgacaaatgagttattgaacatgggttagaatctgacgatttgcaggtgattttcccacttagcatgttcttgtgtccatgggagatgcaaccaaggacccttgggagatggctcctgtgactgtgatgttggctggcgaggagtgcattgtgacaatggtaagagtgaggcctccagtatttataatctgctctaagctttgcttctcagcagctacatttttctttctaaaatataaatgacacctttttttacttcttctggcaataaacatgattctttcttgcagcaaaaagtttgtaaaataaagaaaagcagaa

SEQ ID NO: 291326 - DNA, 3938 bp, Homo sapiens
tggctttgagcttcatggcagccagtataaaaaaggattgacatgacctcatagttttatatcgctcacatgatacatatcacttccaaagaagtagcttttctgagcacaaaatactaaaaatcctcaggtgagatttagtaagagggctaagacagcaactggttctctttttcagcaaccacagaagacaactgcaatgggacatgccataccagcgccaactgcctcaccaactcagatggtacagcttcatgcaagtgtgcagcaggattccaaggaaacgggaccatctgcacagcaatcaatgcctgtgagatcagcaatggaggttgctctgccaaggctgactgtaagagaaccaccccaggaaggcgagtgtgcacgtgcaaagcaggctacacgggtgatggcattgtgtgcctggaaatcaacccgtgtttggagaaccatggtggctgtgacaagaatgcggagtgcacacagacaggacccaaccaggctgcctgtaactgtttgccagcatacactggagatggaaaggtctgcacactcatcaatgtctgcttaactaaaaatggcggctgtagtgaatttgccatctgcaaccacactgggcaagtagaaaggacttgtacttgcaagccaaactacattggagatggatttacctgccgcggcagcatttatcaggagcttcccaagaacccgaaaacttcccagtatttcttccagttgcaggagcatttcgtgaaagatctggtcggcccaggccccttcactgtttttgcacctttatctgcagcctttgatgaggaagctcgggttaaagactgggacaaatacggtttaatgccccaggttcttcggtaccatgtggtcgcctgccaccagctgcttctggaaaacctgaaattgatctcaaatgctacttccctccaaggagagccaatagtcatctccgtctctcagagcacggtgtatataaataataaggctaagatcatatccagtgatatcatcagtactaatgggattgttcatatcatagacaaattgctatctcccaaaaatttgcttatcactcccaaagacaactctggaagaattctgcaaaatcttacgactttggcaacaaacaatggctacatcaaatttagcaacttaatacaggactcaggtttgctgagtgtcatcaccgatcccatccacaccccagtcactctcttctggcccaccgaccaagccctccatgccctacctgctgaacaacaggacttcctgttcaaccaagacaacaaggacaagctgaaggagtatttgaagtttcatgtgatacgagatgccaaggttttagctgtggatcttcccacatccactgcctggaagaccctgcaaggttcagagctgagtgtgaaatgtggagctggcagggacatcggtgacctctttctgaatggccaaacctgcagaattgtgcagcgggagctcttgtttgacctgggtgtggcctacggcattgactgtctgctgattgatcccaccctggggggccgctgtgacacctttactactttcgatgcctcgggggagtgtgggagctgtgtcaatactcccagctgcccaaggtggagtaaaccaaagggtgtgaagcagaagtgtctctacaacctgcccttcaagaggaacctggaaggctgccgggagcggtgcagcctggtgatacagatccccaggtgctgcaagggctacttcgggcgagactgtcaggcctgccctggaggaccagatgccccgtgtaataaccggggtgtctgccttgatcagtactcggccaccggagagtgtaaatgcaacaccggcttcaatgggacggcgtgtgagatgtgctggccggggagattcgggcctgattgtctgccctgtggctgctcagaccacggacagtgcgatgatggcatcacgggctccgggcagtgcctctgtgaaacggggtggacaggcccctcgtgtgacactcaggcagttttgcctgcagtgtgtacgcctccttgttctgctcatgccacctgtaaggagaacaacacgtgtgagtgtaacctggattatgaaggtgacggaatcacatgcacagttgtggatttctgcaaacaggacaacgggggctgtgcaaaggtggccagatgctcccagaagggcacgaaggtctcctgcagctgccagaagggatacaaaggggacgggcacagctgcacagagatagacccctgtgcagacggccttaacggagggtgtcacgagcacgccacctgtaagatgacaggcccgggcaagcacaagtgtgagtgtaaaagtcactatgtcggagatgggctgaactgtgagccggagcagctgcccattgaccgctgcttacaggacaatgggcagtgccatgcagacgccaaatgtgtcgacctccacttccaggataccactgttggggtgttccatctacgctccccactgggccagtataagctgacctttgacaaagccagagaggcctgtgccaacgaagctgcgaccatggcaacctacaaccagctctcctatgcccagaaggccaagtaccacctgtgctcagcaggctggctggagaccgggcgggttgcctaccccacagccttcgcctcccagaactgtggctctggtgtggttgggatagtggactatggacctagacccaacaagagtgaaatgtgggatgtcttctgctatcggatgaaagatgtgaactgcacctgcaaggtgggctatgtgggagatggcttctcatgcagtgggaacctgctgcaggtcctgatgtccttcccctcactcacaaacttcctgacggaagtgctggcctattccaacagctcagctcgaggccgtgcatttctagaacacctgactgacctgtccatccgcggcaccctctttgtgccacagaacagtgggctgggggagaatgagaccttgtctgggcgggacatcgagcaccacctcgccaatgtcagcatgtttttctacaatgaccttgtcaatggcaccaccctgcaaacgaggctgggaagcaagctgctcatcactgccagccaggacccactccaaccgacggagaccaggtttgttgatggaagagccattctgcagtgggacatctttgcctccaatgggatcattcatgtcatttccaggcctttaaaagcaccccctgcccccgtgaccttgacccacactggcttgggagcagggatcttctttgccatcatcctggtgactggggctgttgccttggctgcttactcctactttcggataaaccggagaacaatcggcttccagcattttgagtcggaagaggacattaatgttgcagctcttggcaagcagcagcctgagaatatctcgaaccccttgtatgagagcacaacctcagctcccccagaaccttcctacgaccccttcacggactctgaagaacggcagcttgagggcaatgaccccttgaggacactgtgagggcctggacgggagatgccagccatcactcactgccacctgggcccatcaactgtgaattctcagcaccagttgccttttaggaacgtaaagtcctttaagcactcagaagccatacctcatctctctggctgatctgggggttgtttctgtgggtgagagatgtgttgctgtgcccacccagtacagcttcctcctctgaccctttggctcttcttcctttgtactcttcagctggcacctgctccattctgccctacatgatgggtaactgtgatctttcttccctgttagattgtaagcctccgtctttgtatcccagcccctagcccagtgcctgacacaggaactgtgcacaataaaggtttatggaacagaaacaaagtcaacag

SEQ ID NO: 291327 - DNA, 1736 bp, Homo sapiens
caagaaagagaggacacttttgttcacccagtggctcaatcaatcagtcaacatctaatgaccacctactgtgtgccaggcacagaggtgcaataggcaaagtgagactttatgggttttatggcctaataggggaatcagacattaaccaagtgatgccacaacacatgaacttgcagctgacccatggccctgtctgtatccctgcaggccaagtaccacctgtgctcagcaggctggctggagaccgggcgggttgcctaccccacagccttcgcctcccagaactgtggctctggtgtggttgggatagtggactatggacctagacccaacaagagtgaaatgtgggatgtcttctgctatcggatgaaagatgtgaactgcacctgcaaggtgggctatgtgggagatggcttctcatgcagtgggaacctgctgcaggtcctgatgtccttcccctcactcacaaacttcctgacggattcactgaggaaaggaaaagtcctcaaactctcccacggcgcaggcagaagacacagcaaaggagcagcaggctgagttggctcacaccatgaatattcacagatgggtgatgccctgggaccttcttcagccacccaggtccctgcacaccagggctggcccctctgatgacttccttcttctccccaggaagtgctggcctattccaacagctcagctcgaggccgtgcatttctagaacacctgactgacctgtccatccgcggcaccctctttgtgccacagaacagtgggctgggggagaatgagaccttgtctgggcgggacatcgagcaccacctcgccaatgtcagcatgtttttctacaatgaccttgtcaatggcaccaccctgcaaacgaggctgggaagcaagctgctcatcactgccagccaggacccactccaaccgacggagaccaggtttgttgatggaagagccattctgcagtgggacatctttgcctccaatgggatcattcatgtcatttccaggcctttaaaagcaccccctgcccccgtgaccttgacccacactggcttgggagcagggatcttctttgccatcatcctggtgactggggctgttgccttggctgcttactcctactttcggataaaccggagaacaatcggcttccagcattttgagtcggaagaggacattaatgttgcagctcttggcaagcagcagcctgagaatatctcgaaccccttgtatgagagcacaacctcagctcccccagaaccttcctacgaccccttcacggactctgaagaacggcagcttgagggcaatgaccccttgaggacactgtgagggcctggacgggagatgccagccatcactcactgccacctgggcccatcaactgtgaattctcagcaccagttgccttttaggaacgtaaagtcctttaagcactcagaagccatacctcatctctctggctgatctgggggttgtttctgtgggtgagagatgtgttgctgtgcccacccagtacagcttcctcctctgaccctttggctcttcttcctttgtactcttcagctggcacctgctccattctgccctacatgatgggtaactgtgatctttcttccctgttagattgtaagcctccgtctttgtatcccagcccctagcccagtgcctgacacaggaactgtgcacaataaaggtttatggaacagaaacaaagtcaacag

SEQ ID NO: 291328 - DNA, 4833 bp, Homo sapiens
  misc_feature (2)..(2): n is a, c, g, or t
  misc_feature (572)..(572): n is a, c, g, or t
ancaatataatctggcgaatgcaattgaggctgccgatgcctacacagtgtttgctccaaacaacaatgccatcgagaattacatcagggagaagaaagtcttgtctctagaggaggacgtcctccggtatcatgtggtcctggaggagaaactcctgaagaatgacctgcacaatggcatgcatcgtgagaccatgctgggtttctcctatttccttagcttctttctccataatgaccagctctatgtaaatgaggctccaataaactacaccaatgtagccactgataagggagtgatccatggcttgggaaaagttctggaaattcagaagaacagatgtgataataatgacactactattatacgaggaagatgtaggacatgctcctcagagctgacctgcccattcggaactaaatctctaggtaatgagaagaggagatgcatctatacctcctatttcatgggaagacgaaccctgtttattgggtgccagccaaaatgtgtgagaaccgtcattacgagagaatgctgtgccggcttctttggcccccaatgccagccctgnccagggaatgcccagaatgtctgctttggtaatggcatctgtttggatggagtgaatggcacaggtgtgtgtgagtgtggggagggcttcagcggcacagcctgcgagacctgcaccgagggcaagtacggcatccactgtgaccaagcatgttcttgtgtccatgggagatgcaaccaaggacccttgggagatggctcctgtgactgtgatgttggctggcgaggagtgcattgtgacaatgcaaccacagaagacaactgcaatgggacatgccataccagcgccaactgcctcaccaactcagatggtacagcttcatgcaagtgtgcagcaggattccaaggaaacgggaccatctgcacagcaatcaatgcctgtgagatcagcaatggaggttgctctgccaaggctgactgtaagagaaccaccccaggaaggcgagtgtgcacgtgcaaagcaggctacacgggtgatggcattgtgtgcctggaaatcaacccgtgtttggagaaccatggtggctgtgacaagaatgcggagtgcacacagacaggacccaaccaggctgcctgtaactgtttgccagcatacactggagatggaaaggtctgcacactcatcaatgtctgcttaactaaaaatggcggctgtagtgaatttgccatctgcaaccacactgggcaagtagaaaggacttgtacttgcaagccaaactacattggagatggatttacctgccgcggcagcatttatcaggagcttcccaagaacccgaaaacttcccagtatttcttccagttgcaggagcatttcgtgaaagatctggtcggcccaggccccttcactgtttttgcacctttatctgcagcctttgatgaggaagctcgggttaaagactgggacaaatacggtttaatgccccaggttcttcggtaccatgtggtcgcctgccaccagctgcttctggaaaacctgaaattgatctcaaatgctacttccctccaaggagagccaatagtcatctccgtctctcagagcacggtgtatataaataataaggctaagatcatatccagtgatatcatcagtactaatgggattgttcatatcatagacaaattgctatctcccaaaaatttgcttatcactcccaaagacaactctggaagaattctgcaaaatcttacgactttggcaacaaacaatggctacatcaaatttagcaacttaatacaggactcaggtttgctgagtgtcatcaccgatcccatccacaccccagtcactctcttctggcccaccgaccaagccctccatgccctacctgctgaacaacaggacttcctgttcaaccaagacaacaaggacaagctgaaggagtatttgaagtttcatgtgatacgagatgccaaggttttagctgtggatcttcccacatccactgcctggaagaccctgcaaggttcagagctgagtgtgaaatgtggagctggcagggacatcggtgacctctttctgaatggccaaacctgcagaattgtgcagcgggagctcttgtttgacctgggtgtggcctacggcattgactgtctgctgattgatcccaccctggggggccgctgtgacacctttactactttcgatgcctcgggggagtgtgggagctgtgtcaatactcccagctgcccaaggtggagtaaaccaaagggtgtgaagcagaagtgtctctacaacctgcccttcaagaggaacctggaaggctgccgggagcggtgcagcctggtgatacagatccccaggtgctgcaagggctacttcgggcgagactgtcaggcctgccctggaggaccagatgccccgtgtaataaccggggtgtctgccttgatcagtactcggccaccggagagtgtaaatgcaacaccggcttcaatgggacggcgtgtgagatgtgctggccggggagattcgggcctgattgtctgccctgtggctgctcagaccacggacagtgcgatgatggcatcacgggctccgggcagtgcctctgtgaaacggggtggacaggcccctcgtgtgacactcaggcagttttgcctgcagtgtgtacgcctccttgttctgctcatgccacctgtaaggagaacaacacgtgtgagtgtaacctggattatgaaggtgacggaatcacatgcacagttgtggatttctgcaaacaggacaacgggggctgtgcaaaggtggccagatgctcccagaagggcacgaaggtctcctgcagctgccagaagggatacaaaggggacgggcacagctgcacagagatagacccctgtgcagacggccttaacggagggtgtcacgagcacgccacctgtaagatgacaggcccgggcaagcacaagtgtgagtgtaaaagtcactatgtcggagatgggctgaactgtgagccggagcagctgcccattgaccgctgcttacaggacaatgggcagtgccatgcagacgccaaatgtgtcgacctccacttccaggataccactgttggggtgttccatctacgctccccactgggccagtataagctgacctttgacaaagccagagaggcctgtgccaacgaagctgcgaccatggcaacctacaaccagctctcctatgcccagaaggccaagtaccacctgtgctcagcaggctggctggagaccgggcgggttgcctaccccacagccttcgcctcccagaactgtggctctggtgtggttgggatagtggactatggacctagacccaacaagagtgaaatgtgggatgtcttctgctatcggatgaaagatgtgaactgcacctgcaaggtgggctatgtgggagatggcttctcatgcagtgggaacctgctgcaggtcctgatgtccttcccctcactcacaaacttcctgacggaagtgctggcctattccaacagctcagctcgaggccgtgcatttctagaacacctgactgacctgtccatccgcggcaccctctttgtgccacagaacagtgggctgggggagaatgagaccttgtctgggcgggacatcgagcaccacctcgccaatgtcagcatgtttttctacaatgaccttgtcaatggcaccaccctgcaaacgaggctgggaagcaagctgctcatcactgccagccaggacccactccaaccgacggagaccaggtttgttgatggaagagccattctgcagtgggacatctttgcctccaatgggatcattcatgtcatttccaggcctttaaaagcaccccctgcccccgtgaccttgacccacactggcttgggagcagggatcttctttgccatcatcctggtgactggggctgttgccttggctgcttactcctactttcggataaaccggagaacaatcggcttccagcattttgagtcggaagaggacattaatgttgcagctcttggcaagcagcagcctgagaatatctcgaaccccttgtatgagagcacaacctcagctcccccagaaccttcctacgaccccttcacgatgaagaaactgcagccgagttgggatgatttgtcttgggccacccagcttcaagcaggagagactaaaacaggtggccctacccccagcccatcctgcctcccaacacaaggcagcagcacaaacaaacacgcccagcacatacgtgttcacagtgctcagggagagtcatgcctcagaccagtggccaccagaaagattcaactaggactcaacacacagaatgccctgcccccttacaaccctctcttttccaggactctgaagaacggcagcttgagggcaatgaccccttgaggacactgtgagggcctggacgggagatgccagccatcactcactgccacctgggcccatcaactgtgaattctcagcaccagttgccttttaggaacgtaaagtcctttaagcactcagaagccatacctcatctctctggctgatctgggggttgtttctgtgggtgagagatgtgttgctgtgcccacccagtacagcttcctcctctgaccctttggctcttcttcctttgtactcttcagctggcacctgctccattctgccctacatgatgggtaactgtgatctttcttccctgttagattgtaagcctccgtctttgtatcccagcccctagcccagtgcctgacacaggaactgtgcacaataaaggtttatggaacagaaacaaagtcaacag

SEQ ID NO: 291329 - DNA, 423 bp, Homo sapiens
gtgaatcatctctcaacaaagtactgttaaaaaaggaaaagctcccagaggcaaagggtggcttgctttacctgccaacttggctgagacgctcctgctttggggatgctcctggctttcatgcttgtctttccaaacagtcggaagaggacattaatgttgcagctcttggcaagcagcagcctgagaatatctcgaaccccttgtatgagagcacaacctcagctcccccagaaccttcctacgaccccttcacggtgagtttgcattcttatctaggaataggttcccttggggtacaggggaatgatgtcttttaggaaatttcagtggagatctttgtaccaaagaaggttcatttctagaatgtatgtcaggtaacaagcctaaaagccagttttgcaagctgactgaagccagtgt

SEQ ID NO: 291330 - DNA, 442 bp, Homo sapiens
atctaaaggttggtaaattttattatatgtgaatcatctctcaacaaagtactgttaaaaaaggaaaagctcccagaggcaaagggtggcttgctttacctgccaacttggctgagacgctcctgctttggggatgctcctggctttcatgcttgtctttccaaacagtcggaagaggacattaatgttgcagctcttggcaagcagcagcctgagaatatctcgaaccccttgtatgagagcacaacctcagctcccccagaaccttcctacgaccccttcacggtgagtttgcattcttatctaggaataggttcccttggggtacaggggaatgatgtcttttaggaaatttcagtggagatctttgtaccaaagaaggttcatttctagaatgtatgtcaggtaacaagcctaaaagccagttttgcaagctgactga

SEQ ID NO: 291331 - DNA, 444 bp, Homo sapiens
ttttgtggtataaagttttaattgatagcccctaaagaacattttttctcatataaatctcaatgacattgcagagatcatgtcttactataaaagagtaattctagaatcccagaatctccaaggctagaaaagaccttagcaaatcaccccatcttcctgctgtacaggggcacttatgaacacagtggtcgtccagagagagtcttggaaagtctccttagatgggttttaactcttcacaccatgggtacagaatgaaagtggcccctttctttgcagttttgcctgcagtgtgtacgcctccttgttctgctcatgccacctgtaaggagaacaacacgtgtgagtgtaacctggattatgaaggtgacggaatcacatgcacaggtaagccacctttgtgcacaggtgaaatagcagcatggtgtgggagaggagcag

SEQ ID NO: 291332 - DNA, 4469 bp, Homo sapiens
  misc_feature (2)..(2): n is a, c, g, or t
  misc_feature (572)..(572): n is a, c, g, or t
ancaatataatctggcgaatgcaattgaggctgccgatgcctacacagtgtttgctccaaacaacaatgccatcgagaattacatcagggagaagaaagtcttgtctctagaggaggacgtcctccggtatcatgtggtcctggaggagaaactcctgaagaatgacctgcacaatggcatgcatcgtgagaccatgctgggtttctcctatttccttagcttctttctccataatgaccagctctatgtaaatgaggctccaataaactacaccaatgtagccactgataagggagtgatccatggcttgggaaaagttctggaaattcagaagaacagatgtgataataatgacactactattatacgaggaagatgtaggacatgctcctcagagctgacctgcccattcggaactaaatctctaggtaatgagaagaggagatgcatctatacctcctatttcatgggaagacgaaccctgtttattgggtgccagccaaaatgtgtgagaaccgtcattacgagagaatgctgtgccggcttctttggcccccaatgccagccctgnccagggaatgcccagaatgtctgctttggtaatggcatctgtttggatggagtgaatggcacaggtgtgtgtgagtgtggggagggcttcagcggcacagcctgcgagacctgcaccgagggcaagtacggcatccactgtgaccaagcatgttcttgtgtccatgggagatgcaaccaaggacccttgggagatggctcctgtgactgtgatgttggctggcgaggagtgcattgtgacaatgcaaccacagaagacaactgcaatgggacatgccataccagcgccaactgcctcaccaactcagatggtacagcttcatgcaagtgtgcagcaggattccaaggaaacgggaccatctgcacagcaatcaatgcctgtgagatcagcaatggaggttgctctgccaaggctgactgtaagagaaccaccccaggaaggcgagtgtgcacgtgcaaagcaggctacacgggtgatggcattgtgtgcctggaaatcaacccgtgtttggagaaccatggtggctgtgacaagaatgcggagtgcacacagacaggacccaaccaggctgcctgtaactgtttgccagcatacactggagatggaaaggtctgcacactcatcaatgtctgcttaactaaaaatggcggctgtagtgaatttgccatctgcaaccacactgggcaagtagaaaggacttgtacttgcaagccaaactacattggagatggatttacctgccgcggcagcatttatcaggagcttcccaagaacccgaaaacttcccagtatttcttccagttgcaggagcatttcgtgaaagatctggtcggcccaggccccttcactgtttttgcacctttatctgcagcctttgatgaggaagctcgggttaaagactgggacaaatacggtttaatgccccaggttcttcggtaccatgtggtcgcctgccaccagctgcttctggaaaacctgaaattgatctcaaatgctacttccctccaaggagagccaatagtcatctccgtctctcagagcacggtgtatataaataataaggctaagatcatatccagtgatatcatcagtactaatgggattgttcatatcatagacaaattgctatctcccaaaaatttgcttatcactcccaaagacaactctggaagaattctgcaaaatcttacgactttggcaacaaacaatggctacatcaaatttagcaacttaatacaggactcaggtttgctgagtgtcatcaccgatcccatccacaccccagtcactctcttctggcccaccgaccaagccctccatgccctacctgctgaacaacaggacttcctgttcaaccaagacaacaaggacaagctgaaggagtatttgaagtttcatgtgatacgagatgccaaggttttagctgtggatcttcccacatccactgcctggaagaccctgcaaggttcagagctgagtgtgaaatgtggagctggcagggacatcggtgacctctttctgaatggccaaacctgcagaattgtgcagcgggagctcttgtttgacctgggtgtggcctacggcattgactgtctgctgattgatcccaccctggggggccgctgtgacacctttactactttcgatgcctcgggggagtgtgggagctgtgtcaatactcccagctgcccaaggtggagtaaaccaaagggtgtgaagcagaagtgtctctacaacctgcccttcaagaggaacctggaaggctgccgggagcggtgcagcctggtgatacagatccccaggtgctgcaagggctacttcgggcgagactgtcaggcctgccctggaggaccagatgccccgtgtaataaccggggtgtctgccttgatcagtactcggccaccggagagtgtaaatgcaacaccggcttcaatgggacggcgtgtgagatgtgctggccggggagattcgggcctgattgtctgccctgtggctgctcagaccacggacagtgcgatgatggcatcacgggctccgggcagtgcctctgtgaaacggggtggacaggcccctcgtgtgacactcaggcagttttgcctgcagtgtgtacgcctccttgttctgctcatgccacctgtaaggagaacaacacgtgtgagtgtaacctggattatgaaggtgacggaatcacatgcacagttgtggatttctgcaaacaggacaacgggggctgtgcaaaggtggccagatgctcccagaagggcacgaaggtctcctgcagctgccagaagggatacaaaggggacgggcacagctgcacagagatagacccctgtgcagacggccttaacggagggtgtcacgagcacgccacctgtaagatgacaggcccgggcaagcacaagtgtgagtgtaaaagtcactatgtcggagatgggctgaactgtgagccggagcagctgcccattgaccgctgcttacaggacaatgggcagtgccatgcagacgccaaatgtgtcgacctccacttccaggataccactgttggggtgttccatctacgctccccactgggccagtataagctgacctttgacaaagccagagaggcctgtgccaacgaagctgcgaccatggcaacctacaaccagctctcctatgcccagaaggccaagtaccacctgtgctcagcaggctggctggagaccgggcgggttgcctaccccacagccttcgcctcccagaactgtggctctggtgtggttgggatagtggactatggacctagacccaacaagagtgaaatgtgggatgtcttctgctatcggatgaaaggaagtgctggcctattccaacagctcagctcgaggccgtgcatttctagaacacctgactgacctgtccatccgcggcaccctctttgtgccacagaacagtgggctgggggagaatgagaccttgtctgggcgggacatcgagcaccacctcgccaatgtcagcatgtttttctacaatgaccttgtcaatggcaccaccctgcaaacgaggctgggaagcaagctgctcatcactgccagccaggacccactccaaccgacggagaccaggtttgttgatggaagagccattctgcagtgggacatctttgcctccaatgggatcattcatgtcatttccaggcctttaaaagcaccccctgcccccgtgaccttgacccacactggcttgggagcagggatcttctttgccatcatcctggtgactggggctgttgccttggctgcttactcctactttcggataaaccggagaacaatcggcttccagcattttgagtcggaagaggacattaatgttgcagctcttggcaagcagcagcctgagaatatctcgaaccccttgtatgagagcacaacctcagctcccccagaaccttcctacgaccccttcacggactctgaagaacggcagcttgagggcaatgaccccttgaggacactgtgagggcctggacgggagatgccagccatcactcactgccacctgggcccatcaactgtgaattctcagcaccagttgccttttaggaacgtaaagtcctttaagcactcagaagccatacctcatctctctggctgatctgggggttgtttctgtgggtgagagatgtgttgctgtgcccacccagtacagcttcctcctctgaccctttggctcttcttcctttgtactcttcagctggcacctgctccattctgccctacatgatgggtaactgtgatctttcttccctgttagattgtaagcctccgtctttgtatcccagcccctagcccagtgcctgacacaggaactgtgcacaataaaggtttatggaacagaaacaaagtcaacag

SEQ ID NO: 291333 - DNA, 2191 bp, Homo sapiens
tgtggtataaagttttaattgatagcccctaaagaacattttttctcatataaatctcaatgacattgcagagatcatgtcttactataaaagagtaattctagaatcccagaatctccaaggctagaaaagaccttagcaaatcaccccatcttcctgctgtacaggggcacttatgaacacagtggtcgtccagagagagtcttggaaagtctccttagatgggttttaactcttcacaccatgggtacagaatgaaagtggcccctttctttgcagttttgcctgcagtgtgtacgcctccttgttctgctcatgccacctgtaaggagaacaacacgtgtgagtgtaacctggattatgaaggtgacggaatcacatgcacagttgtggatttctgcaaacaggacaacgggggctgtgcaaaggtggccagatgctcccagaagggcacgaaggtctcctgcagctgccagaagggatacaaaggggacgggcacagctgcacagagatagacccctgtgcagacggccttaacggagggtgtcacgagcacgccacctgtaagatgacaggcccgggcaagcacaagtgtgagtgtaaaagtcactatgtcggagatgggctgaactgtgagccggagcagctgcccattgaccgctgcttacaggacaatgggcagtgccatgcagacgccaaatgtgtcgacctccacttccaggataccactgttggggtgttccatctacgctccccactgggccagtataagctgacctttgacaaagccagagaggcctgtgccaacgaagctgcgaccatggcaacctacaaccagctctcctatgcccagaaggccaagtaccacctgtgctcagcaggctggctggagaccgggcgggttgcctaccccacagccttcgcctcccagaactgtggctctggtgtggttgggatagtggactatggacctagacccaacaagagtgaaatgtgggatgtcttctgctatcggatgaaagatgtgaactgcacctgcaaggtgggctatgtgggagatggcttctcatgcagtgggaacctgctgcaggtcctgatgtccttcccctcactcacaaacttcctgacggaagtgctggcctattccaacagctcagctcgaggccgtgcatttctagaacacctgactgacctgtccatccgcggcaccctctttgtgccacagaacagtgggctgggggagaatgagaccttgtctgggcgggacatcgagcaccacctcgccaatgtcagcatgtttttctacaatgaccttgtcaatggcaccaccctgcaaacgaggctgggaagcaagctgctcatcactgccagccaggacccactccaaccgacggagaccaggtttgttgatggaagagccattctgcagtgggacatctttgcctccaatgggatcattcatgtcatttccaggcctttaaaagcaccccctgcccccgtgaccttgacccacactggcttgggagcagggatcttctttgccatcatcctggtgactggggctgttgccttggctgcttactcctactttcggataaaccggagaacaatcggcttccagcattttgagtcggaagaggacattaatgttgcagctcttggcaagcagcagcctgagaatatctcgaaccccttgtatgagagcacaacctcagctcccccagaaccttcctacgaccccttcacggactctgaagaacggcagcttgagggcaatgaccccttgaggacactgtgagggcctggacgggagatgccagccatcactcactgccacctgggcccatcaactgtgaattctcagcaccagttgccttttaggaacgtaaagtcctttaagcactcagaagccatacctcatctctctggctgatctgggggttgtttctgtgggtgagagatgtgttgctgtgcccacccagtacagcttcctcctctgaccctttggctcttcttcctttgtactcttcagctggcacctgctccattctgccctacatgatgggtaactgtgatctttcttccctgttagattgtaagcctccgtctttgtatcccagcccctagcccagtgcctgacacaggaactgtgcacaataaaggtttatggaacagaaacaaagtcaacag

SEQ ID NO: 291334 - DNA, 757 bp, Homo sapiens
  misc_feature (2)..(2): n is a, c, g, or t
  misc_feature (572)..(572): n is a, c, g, or t
ancaatataatctggcgaatgcaattgaggctgccgatgcctacacagtgtttgctccaaacaacaatgccatcgagaattacatcagggagaagaaagtcttgtctctagaggaggacgtcctccggtatcatgtggtcctggaggagaaactcctgaagaatgacctgcacaatggcatgcatcgtgagaccatgctgggtttctcctatttccttagcttctttctccataatgaccagctctatgtaaatgaggctccaataaactacaccaatgtagccactgataagggagtgatccatggcttgggaaaagttctggaaattcagaagaacagatgtgataataatgacactactattatacgaggaagatgtaggacatgctcctcagagctgacctgcccattcggaactaaatctctaggtaatgagaagaggagatgcatctatacctcctatttcatgggaagacgaaccctgtttattgggtgccagccaaaatgtgtgagaaccgtcattacgagagaatgctgtgccggcttctttggcccccaatgccagccctgnccagggaatgcccagaatgtctgctttggtaatggcatctgtttggatggagtgaatggcacaggtgtgtgtgagtgtggggagggcttcagcggcacagcctgcgagacctgcaccgagggcaagtacggcatccactgtgaccaaggtgagcaccgtcctctccacagaggatcttgggctgc

SEQ ID NO: 291335 - DNA, 1180 bp, Homo sapiens
caatgatcaatgcaacagcaaataagaatctctagaacctaaatacctttttttttgctagactcagccaatttttcaagaaaccctattaccttttaatgtttccttcaatgagatcaagagctaatactttttctttgttcaatttcagagatcaatagctattcaaaagtagcacaccaaaaaggcgacagggtttcctgaaaaattagccagttctaggtgtaatggttagaaatgtacaaattaatcctagaatgacttgtcttaccatatagcaaagaagtcactaaggattaattgatcaaagatgagacaatttgagcatcaataagaaaaataactacaatggactgaaacacataccttttaaatccacagctcattaagaatgggactaaaaaggccaggcgtggtggctcacgcctgtaatgccagcactttgggagggtgaggcaggtggatcacctgaggtcgggagctcgagaccagcctgaccaacatggcgaaaccccatctctactaaaaatacaaaattggccgggcatgttggcacatgcctgtaatctcagctactcaggaggctgaggcaggagaatcgcttgaacctgggaggcagaggttgccgtgagccaagatcaggccattgcactccagcctgggtgacagagcgagactccctctcaaacaaacaaaaaaaagaaaacattgttcctttccacttaatactaaaggaaagaaggatcaagtttttgctctattacattcctacatacaaaatccttaaaaatgtagatttttgtctgataagttattttttaaatcaatatcaggaaaacaaatattatacagtgatgacattaaaaatactatgtaaaaaattagtattttaagccatttatttaccaattttgcatttttttctggatgaaagatttcaaacatgtcccagttttcacatcataaagttgtaggttgggtatcccagctgtgccatctttagaagctgcaataaaatttctttttttcagtaattgccttgtaacatttgtaaagggattatttttcttatttattaagtttgatatggattactatcaaatgggttaaatcatgaaagcttgcctctgtgttaccaaaataaataaataaataaatgaaaggttacataacccactca

SEQ ID NO: 291336 - DNA, 1173 bp, Homo sapiens
gtagtcctttgttacatgcatgagtcagtgaacagggaatgggtgaatgacatttgtgggtaggttatttctagaagttaggtgggcagctcggaaggcagatgcacttctacagactattccttggggccacacgtaggttcttgaatcccgaatggaaaggggagattgataactggtgtgtttatgttcttacaagtcttctgccttttaaaatccagtcccaggacatcaaagctctgcagaaagaactcgagcaatttgccaagctcctgaagcagaagaggatcaccctgggatatacacaggccgatgtggggctcaccctgggggttctatttgggaaggtattcagccaaacgaccatctgccgctttgaggctctgcagcttagcttcaagaacatgtgtaagctgcggcccttgctgcagaagtgggtggaggaagctgacaacaatgaaaatcttcaggagatatgcaaagcagaaaccctcgtgcaggcccgaaagagaaagcgaaccagtatcgagaaccgagtgagaggcaacctggagaatttgttcctgcagtgcccgaaacccacactgcagcagatcagccacatcgcccagcagcttgggctcgagaaggatgtggtccgagtgtggttctgtaaccggcgccagaagggcaagcgatcaagcagcgactatgcacaacgagaggattttgaggctgctgggtctcctttctcagggggaccagtgtcctttcctctggccccagggccccattttggtaccccaggctatgggagccctcacttcactgcactgtactcctcggtccctttccctgagggggaagcctttccccctgtctctgtcaccactctgggctctcccatgcattcaaactgaggtgcctgcccttctaggaatgggggacagggggaggggaggagctagggaaagaaaacctggagtttgtgccagggtttttgggattaagttcttcattcactaaggaaggaattgggaacacaaagggtgggggcaggggagtttggggcaactggttggagggaaggtgaagttcaatgatgctcttgattttaatcccacatcatgtatcacttttttcttaaataaagaagcttgggacacagtagatagacacacttatcttggtttg

SEQ ID NO: 291337 - DNA, 723 bp, Homo sapiens
  misc_feature (2)..(2): n is a, c, g, or t
  misc_feature (5)..(5): n is a, c, g, or t
  misc_feature (7)..(8): n is a, c, g, or t
  misc_feature (10)..(13): n is a, c, g, or t
  misc_feature (18)..(18): n is a, c, g, or t
  misc_feature (21)..(21): n is a, c, g, or t
gncancnntnnnnacctncanagatatgcaaagcagaaaccctcgtgcaggcccgaaagagaaagcgaaccagtatcgagaaccgagtgagaggcaacctggagaatttgttcctgcagtgcccgaaacccacactgcagcagatcagccacatcgcccagcagcttgggctcgagaaggatgtggtccgagtgtggttctgtaaccggcgccagaagggcaagcgatcaagcagcgactatgcacaacgagaggattttgaggctgctgggtctcctttctcagggggaccagtgtcctttcctctggccccagggccccattttggtaccccaggctatgggagccctcacttcactgcactgtactcctcggtccctttccctgagggggaagcctttccccctgtctctgtcaccactctgggctctcccatgcattcaaactgaggtgcctgcccttctaggaatgggggacagggggaggggaggagctagggaaagaaaacctggagtttgtgccagggtttttgggattaagttcttcattcactaaggaaggaattgggaacacaaagggtgggggcaggggagtttggggcaactggttggagggaaggtgaagttcaatgatgctcttgattttaatcccacatcatgtatcacttttttcttaaataaagaagcttgggacacagtagatagacacacttatcttggtttg

SEQ ID NO: 291338 - DNA, 1614 bp, Homo sapiens
tattcaaatttccaaacctgggattcttttccacaagtggaggtaataattgtcaattcacaggtgattatgatttaaagagattacttttgaagagttcctaacacattcagtcaacatttaatgatgcttcaggcactgtgttcattgctagtgagcgtatgacacacacagccatacggtcacagagctttcaatgaaaagtagcataattgctcatttcaccaggcccccggcttggggcgccttccttccccatggcgggacacctggcttcggatttcgccttctcgccccctccaggcggtgggggtgatgggccatgggggcggagccgggctgggttgatcctctgacctggctaagcttccaaggccctcctggagggccaggaatcgggccgggggttgggccaggctctgaggtgtgggggattcccccttgccccccgccgtatgagttatgtggggggatggcgtactgtgggcctcaggttggagtggggctagtgccccaaggcggcttggagacctctcagcctgagggcgaagcaggagtcggggtggagaagcaactccgatggggcctccccggagccctgcaccgtcacccctggtgccgtgaagctggagaaggagaagctggagcaaaacccggagaagtcccaggacatcaaagctctgcagaaagaactcgagcaatttgccaagctcctgaagcagaagaggatcaccctgggatatacacaggccgatgtggggctcaccctgggggttctatttgggaaggtattcagccaaacgaccatctgccgctttgaggctctgcagcttagcttcaagaacatgtgtaagctgcggcccttgctgcagaagtgggtggaggaagctgacaacaatgaaaatcttcaggagatatgcaaagcagaaaccctcgtgcaggcccgaaagagaaagcgaaccagtatcgagaaccgagtgagaggcaacctggagaatttgttcctgcagtgcccgaaacccacactgcagcagatcagccacatcgcccagcagcttgggctcgagaaggatgtggtccgagtgtggttctgtaaccggcgccagaagggcaagcgatcaagcagcgactatgcacaacgagaggattttgaggctgctgggtctcctttctcagggggaccagtgtcctttcctctggccccagggccccattttggtaccccaggctatgggagccctcacttcactgcactgtactcctcggtccctttccctgagggggaagcctttccccctgtctctgtcaccactctgggctctcccatgcattcaaactgaggtgcctgcccttctaggaatgggggacagggggaggggaggagctagggaaagaaaacctggagtttgtgccagggtttttgggattaagttcttcattcactaaggaaggaattgggaacacaaagggtgggggcaggggagtttggggcaactggttggagggaaggtgaagttcaatgatgctcttgattttaatcccacatcatgtatcacttttttcttaaataaagaagcttgggacacagtagatagacacacttatcttggtttg

SEQ ID NO: 291339 - DNA, 844 bp, Homo sapiens
acgagcgtagcttccttgtcgtgtggcctcagtccttcgccgtccctcgccgtccttcgccatcgcacgccaccgcaccccatctctcgaaatctgcagacatcttgatttttcccacgctgtctgtcaggtctccgccgccactcgacgccagggcgccgggccttgtgggctgtgctgcacctcggacggcttcgcaccagccagcgccctctctctcctgcagcactctgatctgcaccccctgaggggcttccactgtccgcggggtgagaatgcccctgggagtgtcacatgactgccgccccatgtgtgtgagaggcgtcctctgggagagcatggatcctgaggtcccaggattgtcagctgacctctgtcctgtgtgcccagtggccccaggtgacgtgtcttcaagaagaggctgagctgcggtgcttgtaaggtctcagccttagatccaaggacagtccaaggaagtcctaagaccatggagttggtgatctgggatctgggtttgctgatatttctcaccgtgaatctcttggtggtgtttgtgggcacgagaggggcagagaatggagagtgaggctaccacatgaagcgtcaccagagctgctccctgctgcctgctcagagcaccccggatccactgttcaatctgcacaagattcggggtccagacatgggagacttcagctgcctcagaggaccgtggacagggaaggccagcctcgcatccctctgtccatgcctggaatgactttaataaccaagagttttatttttgaatttgtagctgtcgttcactttttacccacccattcaataaaccttacagaattgc

SEQ ID NO: 291340 - DNA, 994 bp, Homo sapiens
acgagcgtagcttccttgtcgtgtggcctcagtccttcgccgtccctcgccgtccttcgccatcgcacgccaccgcaccccatctctcgaaatctgcagacatcttgatttttcccacgctgtctgtcaggtctccgccgccactcgacgccagggcgccgggccttgtgggctgtgctgcacctcggacggcttcgcaccagccagcgccctctctctcctgcagcactctgatctgcaccccctgaggggcttccactgtccgcggggtgagaatgcccctgggagtgtcacatgactgccgccccatgtgtgtgagaggcgtcctctgggagagcatggatcctgaggtcccaggattgtcagctgacctctgtcctgtgtgcccagtggccccaggtgacgtgtcttcaagaagaggctgagctgcggtgcttgtaagagtcatgtgctgttcctggggcttggatgatgtaggggaagcaaggtgaaagtggtatcccgtggttccacgttctgtcctgctgtggggctgtccctcacatgctttcagtggctgttgcagaggaagagcctccggaaatctgcgtgggtctcagccttagatccaaggacagtccaaggaagtcctaagaccatggagttggtgatctgggatctgggtttgctgatatttctcaccgtgaatctcttggtggtgtttgtgggcacgagaggggcagagaatggagagtgaggctaccacatgaagcgtcaccagagctgctccctgctgcctgctcagagcaccccggatccactgttcaatctgcacaagattcggggtccagacatgggagacttcagctgcctcagaggaccgtggacagggaaggccagcctcgcatccctctgtccatgcctggaatgactttaataaccaagagttttatttttgaatttgtagctgtcgttcactttttacccacccattcaataaaccttacagaattgc

SEQ ID NO: 291341 - DNA, 2189 bp, Homo sapiens
acgagcgtagcttccttgtcgtgtggcctcagtccttcgccgtccctcgccgtccttcgccatcgcacgccaccgcaccccatctctcgaaatctgcagacatcttgatttttcccacgctgtctgtcaggtctccgccgccactcgacgccagggcgccgggccttgtgggctgtgctgcacctcggacggcttcgcaccagccagcgccctctctctcctgcagcactctgatctgcaccccctgaggggcttccactgtccgcggggtgagaatgcccctgggagtgtcacatgactgccgccccatgtgtgtgagaggcgtcctctgggagagcatggatcctgaggtcccaggaacatcccgagagccaagttcccagatgccagccaagggccatctgacctgttttgaatctcaatttcctgatacagaaaacaaaggattgtcagctgacctctgtcctgtgtgcccagtggccccaggtgacgtgtcttcaagaagaggctgagctgcggtgcttgtaaggggtctcattctgtcacccaggctggagtgcagtggtgcaatgatggctcactgcagcctcgacctgggctcaagtgatcctccacctcagcttcctgagtagctgggaccacagagtcatgtgctgttcctggggcttggatgatgtaggggaagcaaggtgaaagtggtatcccgtggttccacgttctgtcctgctgtggggctgtccctcacatgctttcagtggctgttgcagaggaagagcctccggaaatctgcgtgggtaaagtgagctccccgggggaaccgtcctcctcccttgagcgctggtgtgtccatagtgtgctgtgatctggattagcagtgagtttttctttcagggtgtgtgtgtatgatgttaggaccatatgctcctgaccttttccaacccaaaagcgtttccatttttttaatgctggaagtgtcttaactccttttggggtcttagaaggacacacggtggccgtggctgggcctctgctcagctgggctgctctccctgcctcaggcccttgacaccagcctccctcccttgctggctctctttctgtccttccctgctcttgtatccaaaagtgatcatgggttgcctgtgtcccgatcattaacagtgcaggggtaggagtgctgaaagacatcttccctgcgttggtccagccttccctttcaaaccctggagctttcccacgctgcagcctttttccaactaggctttcagagcttgggcctttgtgggcccatgtgatgtggtgactagacccaccccctgacttctgagggttcattttgtcttttcatgttagggatcctcctgccagaaaccagtctgcatttctctctgggccccacgctggaatgaattcagatagcagtgaagggcacacgtgagaactgcgaatcacgggctttgcttcatgaaatgtgaaatccacattgtttccacaggcaccatcagtaatgtcgaacaaatggagaaagttgcaggtggggctaggaaagctgtattcctgtggattactctagctggtcatttgccccgattgtgaactgcttgaaagaaaaacgaaacttctaagatgtttgtcctttcatgtcctttctgttgggattttttatttggtgtgcgtgaatgaggagcttcgccctgcttgaatgggacccctctcagtggtgtcagcttggggaggaggagatggccctggagactaaatacttgtatgctttcttaccctcttaggtctcagccttagatccaaggacagtccaaggaagtcctaagaccatggagttggtgatctgggatctgggtttgctgatatttctcaccgtgaatctcttggtggtgtttgtgggcacgagaggggcagagaatggagagtgaggctaccacatgaagcgtcaccagagctgctccctgctgcctgctcagagcaccccggatccactgttcaatctgcacaagattcggggtccagacatgggagacttcagctgcctcagaggaccgtggacagggaaggccagcctcgcatccctctgtccatgcctggaatgactttaataaccaagagttttatttttgaatttgtagctgtcgttcactttttacccacccattcaataaaccttacagaattgc

SEQ ID NO: 291342 - DNA, 2611 bp, Homo sapiens
gcccctgcattcgaaagtgatcatgagctgcccgtgccctggtcattggtagtgcagggagaggaactgccgagagcacttccccgtgtttggagggtccactcctgtctcttccaaaccctggagctttcccacacctcctccctcccaccacgtcttagatggctcctggtgcctggcatcatctagtgggttgtgttgctcttctccctggcccagggcagttattgtgagacatgagggaagggtgtggggtgatgggtttggcctcatggagcagaagggctgggtgtggagctgagatagggctgccctgctccttcctcccggaagctttctctgcctccacacctctccttccacgtccttatccagcccctgcaccaagctgaacctgtggaaattgttgcctgacttgtttcctggctctctttgctgtggtctcaagggcagtgtctgaattttgttccctactttgttatgtctgccagatggtcagtattctgacagtgtgggacaaaggaaaaacggcagcctgggcaaccccgcctctataagaactaaaaaattagccaggcatggcggtgcatgcccctgtagtcctagcttctcaggaggctgaggcaggaggctctcttgagcccgggaggacaaggctgcagtgagccatgaccatgccactgcactcagcctgggcaacagagtgagaccctgtctcaagaaagaaaaacgagaaagggagagtccctccactgtaaggagatcgggttcattacattttggggtgttggagaaaaatactgagtcagcacctgtgtgggattggtgggagcagatttggtgttttccaccccttcacaggattctgaggtaactcatttctgttggccttggccttgtatggggaggatttccctccagccttgtatggggaggatttcccttgtatggggaggattttccctccagcttgtgggaaaggaatcaaggaccagagacaggcaggggagaagatcactgagggatttacggcagcagcctctgcacggcttccccacgacctccccagctgcttgctggacgctgctggagaaacagcacatcccaagatcatcatggccccagcatcctcttgaacttagtaacagttggcctgacagatgaagcggatatcatccctgccttagaagttctctagcccctttcttagagataagctgctatttcattcctaaaagaagtcatggctgttcaggtgagaagaacggtttagtcagcatctatgcaacactgtagagatgcttagtgagaggtgttgcaggagagtggcagaccgcagggcccgaggtaaggtttcttgtccatctctggaattttggctttttgcaccctgtaaagtcacgtcccctttttttctggtgctttggtggtgacgtagggagaggtgaggatgagaagaggagccatgtcctatggattcccagatccagactcctcttccctgggaaagctggattggagctggcccctccttctgtgccttcgggctgtggaggaggaggcccctgcagggagctgcctggggcgagcgctgggggcttttcctgcagtgcattagcagcatgtcataatggaaagtggctggatttctttccagttgtaatcaatggttaagatttaacctagcaacattgtaggggtacacagccaaatgattcaggaaaaaagatgcaggttgagtctggaggaatccctgtgccagcttcctcatgctccctccctctctcagaaatcacatggaacccattctcccctcagcagtgaaaatgcattcagcctgtgtgcagtgtttctgcccagggaagcccagtagggcctccatgcccggggtgtttactgggatctggttatgtagacaccacctgcctagcacgcaccaaaattccagactttcaggaaaacaggtgcctgtgccacattatttgcacggagagactgtgtccagtgaacggttctgatcagtaaactgttgactaggaacatcccgagagccaagttcccagatgccagccaagggccatctgacctgttttgaatctcaatttcctgatacagaaaacaaaggattgtcagctgacctctgtcctgtgtgcccagtggccccaggtgacgtgtcttcaagaagaggctgagctgcggtgcttgtaaggtctcagccttagatccaaggacagtccaaggaagtcctaagaccatggagttggtgatctgggatctgggtttgctgatatttctcaccgtgaatctcttggtggtgtttgtgggcacgagaggggcagagaatggagagtgaggctaccacatgaagcgtcaccagagctgctccctgctgcctgctcagagcaccccggatccactgttcaatctgcacaagattcggggtccagacatgggagacttcagctgcctcagaggaccgtggacagggaaggccagcctcgcatccctctgtccatgcctggaatgactttaataaccaagagttttatttttgaatttgtagctgtcgttcactttttacccacccattcaataaaccttacagaattgc

SEQ ID NO: 291343 - DNA, 959 bp, Homo sapiens
acgagcgtagcttccttgtcgtgtggcctcagtccttcgccgtccctcgccgtccttcgccatcgcacgccaccgcaccccatctctcgaaatctgcagacatcttgatttttcccacgctgtctgtcaggtctccgccgccactcgacgccagggcgccgggccttgtgggctgtgctgcacctcggacggcttcgcaccagccagcgccctctctctcctgcagcactctgatctgcaccccctgaggggcttccactgtccgcggggtgagaatgcccctgggagtgtcacatgactgccgccccatgtgtgtgagaggcgtcctctgggagagcatggatcctgaggtcccaggattgtcagctgacctctgtcctgtgtgcccagtggccccaggtgacgtgtcttcaagaagaggctgagctgcggtgcttgtaaggggtctcattctgtcacccaggctggagtgcagtggtgcaatgatggctcactgcagcctcgacctgggctcaagtgatcctccacctcagcttcctgagtagctgggaccacaggtctcagccttagatccaaggacagtccaaggaagtcctaagaccatggagttggtgatctgggatctgggtttgctgatatttctcaccgtgaatctcttggtggtgtttgtgggcacgagaggggcagagaatggagagtgaggctaccacatgaagcgtcaccagagctgctccctgctgcctgctcagagcaccccggatccactgttcaatctgcacaagattcggggtccagacatgggagacttcagctgcctcagaggaccgtggacagggaaggccagcctcgcatccctctgtccatgcctggaatgactttaataaccaagagttttatttttgaatttgtagctgtcgttcactttttacccacccattcaataaaccttacagaattgc

SEQ ID NO: 291344 - DNA, 908 bp, Homo sapiens
  misc_feature (855)..(855): n is a, c, g, or t
  misc_feature (861)..(861): n is a, c, g, or t
  misc_feature (880)..(880): n is a, c, g, or t
acgagcgtagcttccttgtcgtgtggcctcagtccttcgccgtccctcgccgtccttcgccatcgcacgccaccgcaccccatctctcgaaatctgcagacatcttgatttttcccacgctgtctgtcaggtctccgccgccactcgacgccagggcgccgggccttgtgggctgtgctgcacctcggacggcttcgcaccagccagcgccctctctctcctgcagcactctgatctgcaccccctgaggggcttccactgtccgcggggtgagaatgcccctgggagtgtcacatgactgccgccccatgtgtgtgagaggcgtcctctgggagagcatggatcctgaggtcccaggattgtcagctgacctctgtcctgtgtgcccagtggccccaggtgacgtgtcttcaagaagaggctgagctgcggtgcttgtaaggtctcagccttagatccaaggacagtccaaggaagtcctaagaccatggagttggtgatctgggatctgggtttgctgatatttctcaccgtgaatctcttggtggtgtttgtgggcacgagaggggcagagaatggagagtgaggctaccacatgaagcgtcaccagagctgctccctgctgcctgctcagagcaccccggatccactgttcaatctgcacaagattcggggtccagacatgggagacttcagctgcctcagaggaccgtggacagggaaggccagcctcgcatccctctgtccatgcctggaatgactttaataaccaagagttttatttttgaatttgtagctgtcgttcactttttacccacccattcaataaaccttacagaattgcaaaaaaaaaanggcggngcaaaaacccagggccaantacgtacagttctgacaagggccatagg

SEQ ID NO: 291345 - DNA, 1164 bp, Homo sapiens
acgagcgtagcttccttgtcgtgtggcctcagtccttcgccgtccctcgccgtccttcgccatcgcacgccaccgcaccccatctctcgaaatctgcagacatcttgatttttcccacgctgtctgtcaggtctccgccgccactcgacgccagggcgccgggtgagtccacagcagggcgcatggtcggctccactctcaccatcgggggaaactgaggccccggggaaggcggccagagaggtcaggccctgtccttggtgcagtgtctcgtcctctttgccggagtgagccccccaggattcgcgtgtcctcgggaaagacactggcaggccttgtgggctgtgctgcacctcggacggcttcgcaccagccagcgccctctctctcctgcagcactctgatctgcaccccctgaggggcttccactgtccgcggggtgagaatgcccctgggagtgtcacatgactgccgccccatgtgtgtgagaggcgtcctctgggagagcatggatcctgaggtcccaggattgtcagctgacctctgtcctgtgtgcccagtggccccaggtgacgtgtcttcaagaagaggctgagctgcggtgcttgtaagagtcatgtgctgttcctggggcttggatgatgtaggggaagcaaggtgaaagtggtatcccgtggttccacgttctgtcctgctgtggggctgtccctcacatgctttcagtggctgttgcagaggaagagcctccggaaatctgcgtgggtctcagccttagatccaaggacagtccaaggaagtcctaagaccatggagttggtgatctgggatctgggtttgctgatatttctcaccgtgaatctcttggtggtgtttgtgggcacgagaggggcagagaatggagagtgaggctaccacatgaagcgtcaccagagctgctccctgctgcctgctcagagcaccccggatccactgttcaatctgcacaagattcggggtccagacatgggagacttcagctgcctcagaggaccgtggacagggaaggccagcctcgcatccctctgtccatgcctggaatgactttaataaccaagagttttatttttgaatttgtagctgtcgttcactttttacccacccattcaataaaccttacagaattgc

SEQ ID NO: 291346 - DNA, 3996 bp, Homo sapiens
gcccctgcattcgaaagtgatcatgagctgcccgtgccctggtcattggtagtgcagggagaggaactgccgagagcacttccccgtgtttggagggtccactcctgtctcttccaaaccctggagctttcccacacctcctccctcccaccacgtcttagatggctcctggtgcctggcatcatctagtgggttgtgttgctcttctccctggcccagggcagttattgtgagacatgagggaagggtgtggggtgatgggtttggcctcatggagcagaagggctgggtgtggagctgagatagggctgccctgctccttcctcccggaagctttctctgcctccacacctctccttccacgtccttatccagcccctgcaccaagctgaacctgtggaaattgttgcctgacttgtttcctggctctctttgctgtggtctcaagggcagtgtctgaattttgttccctactttgttatgtctgccagatggtcagtattctgacagtgtgggacaaaggaaaaacggcagcctgggcaaccccgcctctataagaactaaaaaattagccaggcatggcggtgcatgcccctgtagtcctagcttctcaggaggctgaggcaggaggctctcttgagcccgggaggacaaggctgcagtgagccatgaccatgccactgcactcagcctgggcaacagagtgagaccctgtctcaagaaagaaaaacgagaaagggagagtccctccactgtaaggagatcgggttcattacattttggggtgttggagaaaaatactgagtcagcacctgtgtgggattggtgggagcagatttggtgttttccaccccttcacaggattctgaggtaactcatttctgttggccttggccttgtatggggaggatttccctccagccttgtatggggaggatttcccttgtatggggaggattttccctccagcttgtgggaaaggaatcaaggaccagagacaggcaggggagaagatcactgagggatttacggcagcagcctctgcacggcttccccacgacctccccagctgcttgctggacgctgctggagaaacagcacatcccaagatcatcatggccccagcatcctcttgaacttagtaacagttggcctgacagatgaagcggatatcatccctgccttagaagttctctagcccctttcttagagataagctgctatttcattcctaaaagaagtcatggctgttcaggtgagaagaacggtttagtcagcatctatgcaacactgtagagatgcttagtgagaggtgttgcaggagagtggcagaccgcagggcccgaggtaaggtttcttgtccatctctggaattttggctttttgcaccctgtaaagtcacgtcccctttttttctggtgctttggtggtgacgtagggagaggtgaggatgagaagaggagccatgtcctatggattcccagatccagactcctcttccctgggaaagctggattggagctggcccctccttctgtgccttcgggctgtggaggaggaggcccctgcagggagctgcctggggcgagcgctgggggcttttcctgcagtgcattagcagcatgtcataatggaaagtggctggatttctttccagttgtaatcaatggttaagatttaacctagcaacattgtaggggtacacagccaaatgattcaggaaaaaagatgcaggttgagtctggaggaatccctgtgccagcttcctcatgctccctccctctctcagaaatcacatggaacccattctcccctcagcagtgaaaatgcattcagcctgtgtgcagtgtttctgcccagggaagcccagtagggcctccatgcccggggtgtttactgggatctggttatgtagacaccacctgcctagcacgcaccaaaattccagactttcaggaaaacaggtgcctgtgccacattatttgcacggagagactgtgtccagtgaacggttctgatcagtaaactgttgactaggaacatcccgagagccaagttcccagatgccagccaagggccatctgacctgttttgaatctcaatttcctgatacagaaaacaaaggattgtcagctgacctctgtcctgtgtgcccagtggccccaggtgacgtgtcttcaagaagaggctgagctgcggtgcttgtaaggggtctcattctgtcacccaggctggagtgcagtggtgcaatgatggctcactgcagcctcgacctgggctcaagtgatcctccacctcagcttcctgagtagctgggaccacagatgggtccgctgtgtgcagaggctccatgggatgtgttgtcttcatagtagcaggtcgctggaccatgggtccgcaaggtgggatttttggactgttgtctggaatatgtttctttgcatcctgcagagtcatgtgctgttcctggggcttggatgatgtaggggaagcaaggtgaaagtggtatcccgtggttccacgttctgtcctgctgtggggctgtccctcacatgctttcagtggctgttgcagaggaagagcctccggaaatctgcgtgggtaaagtgagctccccgggggaaccgtcctcctcccttgagcgctggtgtgtccatagtgtgctgtgatctggattagcagtgagtttttctttcagggtgtgtgtgtatgatgttaggaccatatgctcctgaccttttccaacccaaaagcgtttccatttttttaatgctggaagtgtcttaactccttttggggtcttagaaggacacacggtggccgtggctgggcctctgctcagctgggctgctctccctgcctcaggcccttgacaccagcctccctcccttgctggctctctttctgtccttccctgctcttgtatccaaaagtgatcatgggttgcctgtgtcccgatcattaacagtgcaggggtaggagtgctgaaagacatcttccctgcgttggtccagccttccctttcaaaccctggagctttcccacgctgcagcctttttccaactaggctttcagagcttgggcctttgtgggcccatgtgatgtggtgactagacccaccccctgacttctgagggttcattttgtcttttcatgttagggatcctcctgccagaaaccagtctgcatttctctctgggccccacgctggaatgaattcagatagcagtgaagggcacacgtgagaactgcgaatcacgggctttgcttcatgaaatgtgaaatccacattgtttccacaggcaccatcagtaatgtcgaacaaatggagaaagttgcaggtggggctaggaaagctgtattcctgtggattactctagctggtcatttgccccgattgtgaactgcttgaaagaaaaacgaaacttctaagatgtttgtcctttcatgtcctttctgttgggattttttatttggtgtgcgtgaatgaggagcttcgccctgcttgaatgggacccctctcagtggtgtcagcttggggaggaggagatggccctggagactaaatacttgtatgctttcttaccctcttaggtctcagccttagatccaaggacagtccaaggaagtcctaagaccatggagttggtgatctgggatctgggtttgctgatatttctcaccgtgaatctcttggtggtgtttgtgggcacgagaggggcagagaatggagagtgaggctaccacatgaagcgtcaccagagctgctccctgctgcctgctcagagcaccccggatccactgttcaatctgcacaagattcggggtccagacatgggagacttcagctgcctcagaggaccgtggacagggaaggccagcctcgcatccctctgtccatgcctggaatgactttaataaccaagagttttatttttgaatttgtagctgtcgttcactttttacccacccattcaataaaccttacagaattgc

SEQ ID NO: 291347 - DNA, 1014 bp, Homo sapiens
acgagcgtagcttccttgtcgtgtggcctcagtccttcgccgtccctcgccgtccttcgccatcgcacgccaccgcaccccatctctcgaaatctgcagacatcttgatttttcccacgctgtctgtcaggtctccgccgccactcgacgccagggcgccgggtgagtccacagcagggcgcatggtcggctccactctcaccatcgggggaaactgaggccccggggaaggcggccagagaggtcaggccctgtccttggtgcagtgtctcgtcctctttgccggagtgagccccccaggattcgcgtgtcctcgggaaagacactggcaggccttgtgggctgtgctgcacctcggacggcttcgcaccagccagcgccctctctctcctgcagcactctgatctgcaccccctgaggggcttccactgtccgcggggtgagaatgcccctgggagtgtcacatgactgccgccccatgtgtgtgagaggcgtcctctgggagagcatggatcctgaggtcccaggattgtcagctgacctctgtcctgtgtgcccagtggccccaggtgacgtgtcttcaagaagaggctgagctgcggtgcttgtaaggtctcagccttagatccaaggacagtccaaggaagtcctaagaccatggagttggtgatctgggatctgggtttgctgatatttctcaccgtgaatctcttggtggtgtttgtgggcacgagaggggcagagaatggagagtgaggctaccacatgaagcgtcaccagagctgctccctgctgcctgctcagagcaccccggatccactgttcaatctgcacaagattcggggtccagacatgggagacttcagctgcctcagaggaccgtggacagggaaggccagcctcgcatccctctgtccatgcctggaatgactttaataaccaagagttttatttttgaatttgtagctgtcgttcactttttacccacccattcaataaaccttacagaattgc

SEQ ID NO: 291348 - DNA, 2102 bp, Homo sapiens
acgagcgtagcttccttgtcgtgtggcctcagtccttcgccgtccctcgccgtccttcgccatcgcacgccaccgcaccccatctctcgaaatctgcagacatcttgatttttcccacgctgtctgtcaggtctccgccgccactcgacgccagggcgccgggccttgtgggctgtgctgcacctcggacggcttcgcaccagccagcgccctctctctcctgcagcactctgatctgcaccccctgaggggcttccactgtccgcggggtgagaatgcccctgggagtgtcacatgactgccgccccatgtgtgtgagaggcgtcctctgggagagcatggatcctgaggtcccaggattgtcagctgacctctgtcctgtgtgcccagtggccccaggtgacgtgtcttcaagaagaggctgagctgcggtgcttgtaaggggtctcattctgtcacccaggctggagtgcagtggtgcaatgatggctcactgcagcctcgacctgggctcaagtgatcctccacctcagcttcctgagtagctgggaccacagagtcatgtgctgttcctggggcttggatgatgtaggggaagcaaggtgaaagtggtatcccgtggttccacgttctgtcctgctgtggggctgtccctcacatgctttcagtggctgttgcagaggaagagcctccggaaatctgcgtgggtaaagtgagctccccgggggaaccgtcctcctcccttgagcgctggtgtgtccatagtgtgctgtgatctggattagcagtgagtttttctttcagggtgtgtgtgtatgatgttaggaccatatgctcctgaccttttccaacccaaaagcgtttccatttttttaatgctggaagtgtcttaactccttttggggtcttagaaggacacacggtggccgtggctgggcctctgctcagctgggctgctctccctgcctcaggcccttgacaccagcctccctcccttgctggctctctttctgtccttccctgctcttgtatccaaaagtgatcatgggttgcctgtgtcccgatcattaacagtgcaggggtaggagtgctgaaagacatcttccctgcgttggtccagccttccctttcaaaccctggagctttcccacgctgcagcctttttccaactaggctttcagagcttgggcctttgtgggcccatgtgatgtggtgactagacccaccccctgacttctgagggttcattttgtcttttcatgttagggatcctcctgccagaaaccagtctgcatttctctctgggccccacgctggaatgaattcagatagcagtgaagggcacacgtgagaactgcgaatcacgggctttgcttcatgaaatgtgaaatccacattgtttccacaggcaccatcagtaatgtcgaacaaatggagaaagttgcaggtggggctaggaaagctgtattcctgtggattactctagctggtcatttgccccgattgtgaactgcttgaaagaaaaacgaaacttctaagatgtttgtcctttcatgtcctttctgttgggattttttatttggtgtgcgtgaatgaggagcttcgccctgcttgaatgggacccctctcagtggtgtcagcttggggaggaggagatggccctggagactaaatacttgtatgctttcttaccctcttaggtctcagccttagatccaaggacagtccaaggaagtcctaagaccatggagttggtgatctgggatctgggtttgctgatatttctcaccgtgaatctcttggtggtgtttgtgggcacgagaggggcagagaatggagagtgaggctaccacatgaagcgtcaccagagctgctccctgctgcctgctcagagcaccccggatccactgttcaatctgcacaagattcggggtccagacatgggagacttcagctgcctcagaggaccgtggacagggaaggccagcctcgcatccctctgtccatgcctggaatgactttaataaccaagagttttatttttgaatttgtagctgtcgttcactttttacccacccattcaataaaccttacagaattgc

SEQ ID NO: 291349 - DNA, 2085 bp, Homo sapiens
acgagcgtagcttccttgtcgtgtggcctcagtccttcgccgtccctcgccgtccttcgccatcgcacgccaccgcaccccatctctcgaaatctgcagacatcttgatttttcccacgctgtctgtcaggtctccgccgccactcgacgccagggcgccgggtgagtccacagcagggcgcatggtcggctccactctcaccatcgggggaaactgaggccccggggaaggcggccagagaggtcaggccctgtccttggtgcagtgtctcgtcctctttgccggagtgagccccccaggattcgcgtgtcctcgggaaagacactggcaggccttgtgggctgtgctgcacctcggacggcttcgcaccagccagcgccctctctctcctgcagcactctgatctgcaccccctgaggggcttccactgtccgcggggtgagaatgcccctgggattgtcagctgacctctgtcctgtgtgcccagtggccccaggtgacgtgtcttcaagaagaggctgagctgcggtgcttgtaagagtcatgtgctgttcctggggcttggatgatgtaggggaagcaaggtgaaagtggtatcccgtggttccacgttctgtcctgctgtggggctgtccctcacatgctttcagtggctgttgcagaggaagagcctccggaaatctgcgtgggtaaagtgagctccccgggggaaccgtcctcctcccttgagcgctggtgtgtccatagtgtgctgtgatctggattagcagtgagtttttctttcagggtgtgtgtgtatgatgttaggaccatatgctcctgaccttttccaacccaaaagcgtttccatttttttaatgctggaagtgtcttaactccttttggggtcttagaaggacacacggtggccgtggctgggcctctgctcagctgggctgctctccctgcctcaggcccttgacaccagcctccctcccttgctggctctctttctgtccttccctgctcttgtatccaaaagtgatcatgggttgcctgtgtcccgatcattaacagtgcaggggtaggagtgctgaaagacatcttccctgcgttggtccagccttccctttcaaaccctggagctttcccacgctgcagcctttttccaactaggctttcagagcttgggcctttgtgggcccatgtgatgtggtgactagacccaccccctgacttctgagggttcattttgtcttttcatgttagggatcctcctgccagaaaccagtctgcatttctctctgggccccacgctggaatgaattcagatagcagtgaagggcacacgtgagaactgcgaatcacgggctttgcttcatgaaatgtgaaatccacattgtttccacaggcaccatcagtaatgtcgaacaaatggagaaagttgcaggtggggctaggaaagctgtattcctgtggattactctagctggtcatttgccccgattgtgaactgcttgaaagaaaaacgaaacttctaagatgtttgtcctttcatgtcctttctgttgggattttttatttggtgtgcgtgaatgaggagcttcgccctgcttgaatgggacccctctcagtggtgtcagcttggggaggaggagatggccctggagactaaatacttgtatgctttcttaccctcttaggtctcagccttagatccaaggacagtccaaggaagtcctaagaccatggagttggtgatctgggatctgggtttgctgatatttctcaccgtgaatctcttggtggtgtttgtgggcacgagaggggcagagaatggagagtgaggctaccacatgaagcgtcaccagagctgctccctgctgcctgctcagagcaccccggatccactgttcaatctgcacaagattcggggtccagacatgggagacttcagctgcctcagaggaccgtggacagggaaggccagcctcgcatccctctgtccatgcctggaatgactttaataaccaagagttttatttttgaatttgtagctgtcgttcactttttacccacccattcaataaaccttacagaattgc

SEQ ID NO: 291350 - DNA, 2149 bp, Homo sapiens
acgagcgtagcttccttgtcgtgtggcctcagtccttcgccgtccctcgccgtccttcgccatcgcacgccaccgcaccccatctctcgaaatctgcagacatcttgatttttcccacgctgtctgtcaggtctccgccgccactcgacgccagggcgccgggtgagtccacagcagggcgcatggtcggctccactctcaccatcgggggaaactgaggccccggggaaggcggccagagaggtcaggccctgtccttggtgcagtgtctcgtcctctttgccggagtgagccccccaggattcgcgtgtcctcgggaaagacactggcaggagtgtcacatgactgccgccccatgtgtgtgagaggcgtcctctgggagagcatggatcctgaggtcccaggattgtcagctgacctctgtcctgtgtgcccagtggccccaggtgacgtgtcttcaagaagaggctgagctgcggtgcttgtaaggggtctcattctgtcacccaggctggagtgcagtggtgcaatgatggctcactgcagcctcgacctgggctcaagtgatcctccacctcagcttcctgagtagctgggaccacagagtcatgtgctgttcctggggcttggatgatgtaggggaagcaaggtgaaagtggtatcccgtggttccacgttctgtcctgctgtggggctgtccctcacatgctttcagtggctgttgcagaggaagagcctccggaaatctgcgtgggtaaagtgagctccccgggggaaccgtcctcctcccttgagcgctggtgtgtccatagtgtgctgtgatctggattagcagtgagtttttctttcagggtgtgtgtgtatgatgttaggaccatatgctcctgaccttttccaacccaaaagcgtttccatttttttaatgctggaagtgtcttaactccttttggggtcttagaaggacacacggtggccgtggctgggcctctgctcagctgggctgctctccctgcctcaggcccttgacaccagcctccctcccttgctggctctctttctgtccttccctgctcttgtatccaaaagtgatcatgggttgcctgtgtcccgatcattaacagtgcaggggtaggagtgctgaaagacatcttccctgcgttggtccagccttccctttcaaaccctggagctttcccacgctgcagcctttttccaactaggctttcagagcttgggcctttgtgggcccatgtgatgtggtgactagacccaccccctgacttctgagggttcattttgtcttttcatgttagggatcctcctgccagaaaccagtctgcatttctctctgggccccacgctggaatgaattcagatagcagtgaagggcacacgtgagaactgcgaatcacgggctttgcttcatgaaatgtgaaatccacattgtttccacaggcaccatcagtaatgtcgaacaaatggagaaagttgcaggtggggctaggaaagctgtattcctgtggattactctagctggtcatttgccccgattgtgaactgcttgaaagaaaaacgaaacttctaagatgtttgtcctttcatgtcctttctgttgggattttttatttggtgtgcgtgaatgaggagcttcgccctgcttgaatgggacccctctcagtggtgtcagcttggggaggaggagatggccctggagactaaatacttgtatgctttcttaccctcttaggtctcagccttagatccaaggacagtccaaggaagtcctaagaccatggagttggtgatctgggatctgggtttgctgatatttctcaccgtgaatctcttggtggtgtttgtgggcacgagaggggcagagaatggagagtgaggctaccacatgaagcgtcaccagagctgctccctgctgcctgctcagagcaccccggatccactgttcaatctgcacaagattcggggtccagacatgggagacttcagctgcctcagaggaccgtggacagggaaggccagcctcgcatccctctgtccatgcctggaatgactttaataaccaagagttttatttttgaatttgtagctgtcgttcactttttacccacccattcaataaaccttacagaattgc

SEQ ID NO: 291351 - DNA, 2049 bp, Homo sapiens
ccacattttctttttccattcatctgttgatggagacttagattgtttccgtatcttggcgattgggagtaatgccgcagtgaatattggagtgcagatgtctttatgaggtgtgatttgatctccattgagtatgtgtccagaagagggatagctgggtctatgtaatgtatactgataagcagcacagagtgggcacataggatagcatagatgccatttttctcacagatagtttgccgacctcttcctagagttacgtttttcttgttcctgagacaataatgtggctgtaagtactaatagagacagtggcatttgtgggttgcttatgatctgccagcccctgcgttaagtgttctctgtgtctgtttcagatgggtccgctgtgtgcagaggctccatgggatgtgttgtcttcatagtagcaggtcgctggaccatgggtccgcaaggtgggatttttggactgttgtctggaatatgtttctttgcatcctgcagagtcatgtgctgttcctggggcttggatgatgtaggggaagcaaggtgaaagtggtatcccgtggttccacgttctgtcctgctgtggggctgtccctcacatgctttcagtggctgttgcagaggaagagcctccggaaatctgcgtgggtaaagtgagctccccgggggaaccgtcctcctcccttgagcgctggtgtgtccatagtgtgctgtgatctggattagcagtgagtttttctttcagggtgtgtgtgtatgatgttaggaccatatgctcctgaccttttccaacccaaaagcgtttccatttttttaatgctggaagtgtcttaactccttttggggtcttagaaggacacacggtggccgtggctgggcctctgctcagctgggctgctctccctgcctcaggcccttgacaccagcctccctcccttgctggctctctttctgtccttccctgctcttgtatccaaaagtgatcatgggttgcctgtgtcccgatcattaacagtgcaggggtaggagtgctgaaagacatcttccctgcgttggtccagccttccctttcaaaccctggagctttcccacgctgcagcctttttccaactaggctttcagagcttgggcctttgtgggcccatgtgatgtggtgactagacccaccccctgacttctgagggttcattttgtcttttcatgttagggatcctcctgccagaaaccagtctgcatttctctctgggccccacgctggaatgaattcagatagcagtgaagggcacacgtgagaactgcgaatcacgggctttgcttcatgaaatgtgaaatccacattgtttccacaggcaccatcagtaatgtcgaacaaatggagaaagttgcaggtggggctaggaaagctgtattcctgtggattactctagctggtcatttgccccgattgtgaactgcttgaaagaaaaacgaaacttctaagatgtttgtcctttcatgtcctttctgttgggattttttatttggtgtgcgtgaatgaggagcttcgccctgcttgaatgggacccctctcagtggtgtcagcttggggaggaggagatggccctggagactaaatacttgtatgctttcttaccctcttaggtctcagccttagatccaaggacagtccaaggaagtcctaagaccatggagttggtgatctgggatctgggtttgctgatatttctcaccgtgaatctcttggtggtgtttgtgggcacgagaggggcagagaatggagagtgaggctaccacatgaagcgtcaccagagctgctccctgctgcctgctcagagcaccccggatccactgttcaatctgcacaagattcggggtccagacatgggagacttcagctgcctcagaggaccgtggacagggaaggccagcctcgcatccctctgtccatgcctggaatgactttaataaccaagagttttatttttgaatttgtagctgtcgttcactttttacccacccattcaataaaccttacagaattgc

SEQ ID NO: 291352 - DNA, 2804 bp, Homo sapiens
gcccctgcattcgaaagtgatcatgagctgcccgtgccctggtcattggtagtgcagggagaggaactgccgagagcacttccccgtgtttggagggtccactcctgtctcttccaaaccctggagctttcccacacctcctccctcccaccacgtcttagatggctcctggtgcctggcatcatctagtgggttgtgttgctcttctccctggcccagggcagttattgtgagacatgagggaagggtgtggggtgatgggtttggcctcatggagcagaagggctgggtgtggagctgagatagggctgccctgctccttcctcccggaagctttctctgcctccacacctctccttccacgtccttatccagcccctgcaccaagctgaacctgtggaaattgttgcctgacttgtttcctggctctctttgctgtggtctcaagggcagtgtctgaattttgttccctactttgttatgtctgccagatggtcagtattctgacagtgtgggacaaaggaaaaacggcagcctgggcaaccccgcctctataagaactaaaaaattagccaggcatggcggtgcatgcccctgtagtcctagcttctcaggaggctgaggcaggaggctctcttgagcccgggaggacaaggctgcagtgagccatgaccatgccactgcactcagcctgggcaacagagtgagaccctgtctcaagaaagaaaaacgagaaagggagagtccctccactgtaaggagatcgggttcattacattttggggtgttggagaaaaatactgagtcagcacctgtgtgggattggtgggagcagatttggtgttttccaccccttcacaggattctgaggtaactcatttctgttggccttggccttgtatggggaggatttccctccagccttgtatggggaggatttcccttgtatggggaggattttccctccagcttgtgggaaaggaatcaaggaccagagacaggcaggggagaagatcactgagggatttacggcagcagcctctgcacggcttccccacgacctccccagctgcttgctggacgctgctggagaaacagcacatcccaagatcatcatggccccagcatcctcttgaacttagtaacagttggcctgacagatgaagcggatatcatccctgccttagaagttctctagcccctttcttagagataagctgctatttcattcctaaaagaagtcatggctgttcaggtgagaagaacggtttagtcagcatctatgcaacactgtagagatgcttagtgagaggtgttgcaggagagtggcagaccgcagggcccgaggtaaggtttcttgtccatctctggaattttggctttttgcaccctgtaaagtcacgtcccctttttttctggtgctttggtggtgacgtagggagaggtgaggatgagaagaggagccatgtcctatggattcccagatccagactcctcttccctgggaaagctggattggagctggcccctccttctgtgccttcgggctgtggaggaggaggcccctgcagggagctgcctggggcgagcgctgggggcttttcctgcagtgcattagcagcatgtcataatggaaagtggctggatttctttccagttgtaatcaatggttaagatttaacctagcaacattgtaggggtacacagccaaatgattcaggaaaaaagatgcaggttgagtctggaggaatccctgtgccagcttcctcatgctccctccctctctcagaaatcacatggaacccattctcccctcagcagtgaaaatgcattcagcctgtgtgcagtgtttctgcccagggaagcccagtagggcctccatgcccggggtgtttactgggatctggttatgtagacaccacctgcctagcacgcaccaaaattccagactttcaggaaaacaggtgcctgtgccacattatttgcacggagagactgtgtccagtgaacggttctgatcagtaaactgttgactaggaacatcccgagagccaagttcccagatgccagccaagggccatctgacctgttttgaatctcaatttcctgatacagaaaacaaaggattgtcagctgacctctgtcctgtgtgcccagtggccccaggtgacgtgtcttcaagaagaggctgagctgcggtgcttgtaaggggtctcattctgtcacccaggctggagtgcagtggtgcaatgatggctcactgcagcctcgacctgggctcaagtgatcctccacctcagcttcctgagtagctgggaccacagatgggtccgctgtgtgcagaggctccatgggatgtgttgtcttcatagtagcaggtcgctggaccatgggtccgcaaggtctcagccttagatccaaggacagtccaaggaagtcctaagaccatggagttggtgatctgggatctgggtttgctgatatttctcaccgtgaatctcttggtggtgtttgtgggcacgagaggggcagagaatggagagtgaggctaccacatgaagcgtcaccagagctgctccctgctgcctgctcagagcaccccggatccactgttcaatctgcacaagattcggggtccagacatgggagacttcagctgcctcagaggaccgtggacagggaaggccagcctcgcatccctctgtccatgcctggaatgactttaataaccaagagttttatttttgaatttgtagctgtcgttcactttttacccacccattcaataaaccttacagaattgc

SEQ ID NO: 291353 - DNA, 931 bp, Homo sapiens
acgagcgtagcttccttgtcgtgtggcctcagtccttcgccgtccctcgccgtccttcgccatcgcacgccaccgcaccccatctctcgaaatctgcagacatcttgatttttcccacgctgtctgtcaggtctccgccgccactcgacgccagggcgccgggccttgtgggctgtgctgcacctcggacggcttcgcaccagccagcgccctctctctcctgcagcactctgatctgcaccccctgaggggcttccactgtccgcggggtgagaatgcccctgggagtgtcacatgactgccgccccatgtgtgtgagaggcgtcctctgggagagcatggatcctgaggtcccaggaacatcccgagagccaagttcccagatgccagccaagggccatctgacctgttttgaatctcaatttcctgatacagaaaacaaaggattgtcagctgacctctgtcctgtgtgcccagtggccccaggtgacgtgtcttcaagaagaggctgagctgcggtgcttgtaaggtctcagccttagatccaaggacagtccaaggaagtcctaagaccatggagttggtgatctgggatctgggtttgctgatatttctcaccgtgaatctcttggtggtgtttgtgggcacgagaggggcagagaatggagagtgaggctaccacatgaagcgtcaccagagctgctccctgctgcctgctcagagcaccccggatccactgttcaatctgcacaagattcggggtccagacatgggagacttcagctgcctcagaggaccgtggacagggaaggccagcctcgcatccctctgtccatgcctggaatgactttaataaccaagagttttatttttgaatttgtagctgtcgttcactttttacccacccattcaataaaccttacagaattgc

SEQ ID NO: 291354 - DNA, 922 bp, Homo sapiens
acgagcgtagcttccttgtcgtgtggcctcagtccttcgccgtccctcgccgtccttcgccatcgcacgccaccgcaccccatctctcgaaatctgcagacatcttgatttttcccacgctgtctgtcaggtctccgccgccactcgacgccagggcgccgggccttgtgggctgtgctgcacctcggacggcttcgcaccagccagcgccctctctctcctgcagcactctgatctgcaccccctgaggggcttccactgtccgcggggtgagaatgcccctgggagtgtcacatgactgccgccccatgtgtgtgagaggcgtcctctgggagagcatggatcctgaggtcccaggattgtcagctgacctctgtcctgtgtgcccagtggccccaggtgacgtgtcttcaagaagaggctgagctgcggtgcttgtaagatgggtccgctgtgtgcagaggctccatgggatgtgttgtcttcatagtagcaggtcgctggaccatgggtccgcaaggtctcagccttagatccaaggacagtccaaggaagtcctaagaccatggagttggtgatctgggatctgggtttgctgatatttctcaccgtgaatctcttggtggtgtttgtgggcacgagaggggcagagaatggagagtgaggctaccacatgaagcgtcaccagagctgctccctgctgcctgctcagagcaccccggatccactgttcaatctgcacaagattcggggtccagacatgggagacttcagctgcctcagaggaccgtggacagggaaggccagcctcgcatccctctgtccatgcctggaatgactttaataaccaagagttttatttttgaatttgtagctgtcgttcactttttacccacccattcaataaaccttacagaattgc

SEQ ID NO: 291355 - DNA, 1037 bp, Homo sapiens
acgagcgtagcttccttgtcgtgtggcctcagtccttcgccgtccctcgccgtccttcgccatcgcacgccaccgcaccccatctctcgaaatctgcagacatcttgatttttcccacgctgtctgtcaggtctccgccgccactcgacgccagggcgccgggccttgtgggctgtgctgcacctcggacggcttcgcaccagccagcgccctctctctcctgcagcactctgatctgcaccccctgaggggcttccactgtccgcggggtgagaatgcccctgggagtgtcacatgactgccgccccatgtgtgtgagaggcgtcctctgggagagcatggatcctgaggtcccaggattgtcagctgacctctgtcctgtgtgcccagtggccccaggtgacgtgtcttcaagaagaggctgagctgcggtgcttgtaaggggtctcattctgtcacccaggctggagtgcagtggtgcaatgatggctcactgcagcctcgacctgggctcaagtgatcctccacctcagcttcctgagtagctgggaccacagatgggtccgctgtgtgcagaggctccatgggatgtgttgtcttcatagtagcaggtcgctggaccatgggtccgcaaggtctcagccttagatccaaggacagtccaaggaagtcctaagaccatggagttggtgatctgggatctgggtttgctgatatttctcaccgtgaatctcttggtggtgtttgtgggcacgagaggggcagagaatggagagtgaggctaccacatgaagcgtcaccagagctgctccctgctgcctgctcagagcaccccggatccactgttcaatctgcacaagattcggggtccagacatgggagacttcagctgcctcagaggaccgtggacagggaaggccagcctcgcatccctctgtccatgcctggaatgactttaataaccaagagttttatttttgaatttgtagctgtcgttcactttttacccacccattcaataaaccttacagaattgc

SEQ ID NO: 291356 - DNA, 4101 bp, Homo sapiens
gcccctgcattcgaaagtgatcatgagctgcccgtgccctggtcattggtagtgcagggagaggaactgccgagagcacttccccgtgtttggagggtccactcctgtctcttccaaaccctggagctttcccacacctcctccctcccaccacgtcttagatggctcctggtgcctggcatcatctagtgggttgtgttgctcttctccctggcccagggcagttattgtgagacatgagggaagggtgtggggtgatgggtttggcctcatggagcagaagggctgggtgtggagctgagatagggctgccctgctccttcctcccggaagctttctctgcctccacacctctccttccacgtccttatccagcccctgcaccaagctgaacctgtggaaattgttgcctgacttgtttcctggctctctttgctgtggtctcaagggcagtgtctgaattttgttccctactttgttatgtctgccagatggtcagtattctgacagtgtgggacaaaggaaaaacggcagcctgggcaaccccgcctctataagaactaaaaaattagccaggcatggcggtgcatgcccctgtagtcctagcttctcaggaggctgaggcaggaggctctcttgagcccgggaggacaaggctgcagtgagccatgaccatgccactgcactcagcctgggcaacagagtgagaccctgtctcaagaaagaaaaacgagaaagggagagtccctccactgtaaggagatcgggttcattacattttggggtgttggagaaaaatactgagtcagcacctgtgtgggattggtgggagcagatttggtgttttccaccccttcacaggattctgaggtaactcatttctgttggccttggccttgtatggggaggatttccctccagccttgtatggggaggatttcccttgtatggggaggattttccctccagcttgtgggaaaggaatcaaggaccagagacaggcaggggagaagatcactgagggatttacggcagcagcctctgcacggcttccccacgacctccccagctgcttgctggacgctgctggagaaacagcacatcccaagatcatcatggccccagcatcctcttgaacttagtaacagttggcctgacagatgaagcggatatcatccctgccttagaagttctctagcccctttcttagagataagctgctatttcattcctaaaagaagtcatggctgttcaggtgagaagaacggtttagtcagcatctatgcaacactgtagagatgcttagtgagaggtgttgcaggagagtggcagaccgcagggcccgaggtaaggtttcttgtccatctctggaattttggctttttgcaccctgtaaagtcacgtcccctttttttctggtgctttggtggtgacgtagggagaggtgaggatgagaagaggagccatgtcctatggattcccagatccagactcctcttccctgggaaagctggattggagctggcccctccttctgtgccttcgggctgtggaggaggaggcccctgcagggagctgcctggggcgagcgctgggggcttttcctgcagtgcattagcagcatgtcataatggaaagtggctggatttctttccagttgtaatcaatggttaagatttaacctagcaacattgtaggggtacacagccaaatgattcaggaaaaaagatgcaggttgagtctggaggaatccctgtgccagcttcctcatgctccctccctctctcagaaatcacatggaacccattctcccctcagcagtgaaaatgcattcagcctgtgtgcagtgtttctgcccagggaagcccagtagggcctccatgcccggggtgtttactgggatctggttatgtagacaccacctgcctagcacgcaccaaaattccagactttcaggaaaacaggtgcctgtgccacattatttgcacggagagactgtgtccagtgaacggttctgatcagtaaactgttgactaggaacatcccgagagccaagttcccagatgccagccaagggccatctgacctgttttgaatctcaatttcctgatacagaaaacaaaggattgtcagctgacctctgtcctgtgtgcccagtggccccaggtgacgtgtcttcaagaagaggctgagctgcggtgcttgtaaggggtctcattctgtcacccaggctggagtgcagtggtgcaatgatggctcactgcagcctcgacctgggctcaagtgatcctccacctcagcttcctgagtagctgggaccacagatgggtccgctgtgtgcagaggctccatgggatgtgttgtcttcatagtagcaggtcgctggaccatgggtccgcaaggtgggatttttggactgttgtctggaatatgtttctttgcatcctgcagagtcatgtgctgttcctggggcttggatgatgtaggggaagcaaggtgaaagtggtatcccgtggttccacgttctgtcctgctgtggggctgtccctcacatgctttcagtggctgttgcagaggaagagcctccggaaatctgcgtgggtaaagtgagctccccgggggaaccgtcctcctcccttgagcgctggtgtgtccatagtgtgctgtgatctggattagcagtgagtttttctttcagggtgtgtgtgtatgatgttaggaccatatgctcctgaccttttccaacccaaaagcgtttccatttttttaatgctggaagtgtcttaactccttttggggtcttagaaggacacacggtggccgtggctgggcctctgctcagctgggctgctctccctgcctcaggcccttgacaccagcctccctcccttgctggctctctttctgtccttccctgctcttgtatccaaaagtgatcatgggttgcctgtgtcccgatcattaacagtgcaggggtaggagtgctgaaagacatcttccctgcgttggtccagccttccctttcaaaccctggagctttcccacgctgcagcctttttccaactaggctttcagagcttgggcctttgtgggcccatgtgatgtggtgactagacccaccccctgacttctgagggttcattttgtcttttcatgttagggatcctcctgccagaaaccagtctgcatttctctctgggccccacgctggaatgaattcagatagcagtgaagggcacacgtgagaactgcgaatcacgggctttgcttcatgaaatgtgaaatccacattgtttccacaggcaccatcagtaatgtcgaacaaatggagaaagttgcaggtggggctaggaaagctgtattcctgtggattactctagctggtcatttgccccgattgtgaactgcttgaaagaaaaacgaaacttctaagatgtttgtcctttcatgtcctttctgttgggattttttatttggtgtgcgtgaatgaggagcttcgccctgcttgaatgggacccctctcagtggtgtcagcttggggaggaggagatggccctggagactaaatacttgtatgctttcttaccctcttaggtctcagccttagatccaaggacagtccaaggaagtcctaagaccatggagttggtgatctgggatctgggtttgctgatatttctcaccgtggtgagttgatgccaagagccagaacccacagccagaggctcagctggtccgtgtttatgcagatgggaacctcaaatcactggtctcacttgtcctttgtttcagaatctcttggtggtgtttgtgggcacgagaggggcagagaatggagagtgaggctaccacatgaagcgtcaccagagctgctccctgctgcctgctcagagcaccccggatccactgttcaatctgcacaagattcggggtccagacatgggagacttcagctgcctcagaggaccgtggacagggaaggccagcctcgcatccctctgtccatgcctggaatgactttaataaccaagagttttatttttgaatttgtagctgtcgttcactttttacccacccattcaataaaccttacagaattgc

SEQ ID NO: 291357 - DNA, 1219 bp, Homo sapiens
acgagcgtagcttccttgtcgtgtggcctcagtccttcgccgtccctcgccgtccttcgccatcgcacgccaccgcaccccatctctcgaaatctgcagacatcttgatttttcccacgctgtctgtcaggtctccgccgccactcgacgccagggcgccgggtgagtccacagcagggcgcatggtcggctccactctcaccatcgggggaaactgaggccccggggaaggcggccagagaggtcaggccctgtccttggtgcagtgtctcgtcctctttgccggagtgagccccccaggattcgcgtgtcctcgggaaagacactggcaggccttgtgggctgtgctgcacctcggacggcttcgcaccagccagcgccctctctctcctgcagcactctgatctgcaccccctgaggggcttccactgtccgcggggtgagaatgcccctgggagtgtcacatgactgccgccccatgtgtgtgagaggcgtcctctgggagagcatggatcctgaggtcccaggattgtcagctgacctctgtcctgtgtgcccagtggccccaggtgacgtgtcttcaagaagaggctgagctgcggtgcttgtaagagtcatgtgctgttcctggggcttggatgatgtaggggaagcaaggtgaaagtggtatcccgtggttccacgttctgtcctgctgtggggctgtccctcacatgctttcagtggctgttgcagaggaagagcctccggaaatctgcgtgggtctcagccttagatccaaggacagtccaaggaagtcctaagaccatggagttggtgatctgggatctgggtttgctgatatttctcaccgtgaatctcttggtggtgtttgtgggcacgagaggggcagagaatggagagtgaggctaccacatgaagcgtcaccagagctgctccctgctgcctgctcagagcaccccggatccactgttcaatctgcacaagattcggggtccagacatgggagacttcagctgcctcagaggaccgtggacagggaaggccagcctcgcatccctctgtccatgcctggaatgactttaataaccaagagttttatttttgaatttgtagctgtcgttctctctccactcccgggagtggagagagaacggtgcaatggctgatgacaggcctgcctgcttagaaggcttaaaatctcgaatctgtttctgtg

SEQ ID NO: 291358 - DNA, 2849 bp, Homo sapiens
gcccctgcattcgaaagtgatcatgagctgcccgtgccctggtcattggtagtgcagggagaggaactgccgagagcacttccccgtgtttggagggtccactcctgtctcttccaaaccctggagctttcccacacctcctccctcccaccacgtcttagatggctcctggtgcctggcatcatctagtgggttgtgttgctcttctccctggcccagggcagttattgtgagacatgagggaagggtgtggggtgatgggtttggcctcatggagcagaagggctgggtgtggagctgagatagggctgccctgctccttcctcccggaagctttctctgcctccacacctctccttccacgtccttatccagcccctgcaccaagctgaacctgtggaaattgttgcctgacttgtttcctggctctctttgctgtggtctcaagggcagtgtctgaattttgttccctactttgttatgtctgccagatggtcagtattctgacagtgtgggacaaaggaaaaacggcagcctgggcaaccccgcctctataagaactaaaaaattagccaggcatggcggtgcatgcccctgtagtcctagcttctcaggaggctgaggcaggaggctctcttgagcccgggaggacaaggctgcagtgagccatgaccatgccactgcactcagcctgggcaacagagtgagaccctgtctcaagaaagaaaaacgagaaagggagagtccctccactgtaaggagatcgggttcattacattttggggtgttggagaaaaatactgagtcagcacctgtgtgggattggtgggagcagatttggtgttttccaccccttcacaggattctgaggtaactcatttctgttggccttggccttgtatggggaggatttccctccagccttgtatggggaggatttcccttgtatggggaggattttccctccagcttgtgggaaaggaatcaaggaccagagacaggcaggggagaagatcactgagggatttacggcagcagcctctgcacggcttccccacgacctccccagctgcttgctggacgctgctggagaaacagcacatcccaagatcatcatggccccagcatcctcttgaacttagtaacagttggcctgacagatgaagcggatatcatccctgccttagaagttctctagcccctttcttagagataagctgctatttcattcctaaaagaagtcatggctgttcaggtgagaagaacggtttagtcagcatctatgcaacactgtagagatgcttagtgagaggtgttgcaggagagtggcagaccgcagggcccgaggtaaggtttcttgtccatctctggaattttggctttttgcaccctgtaaagtcacgtcccctttttttctggtgctttggtggtgacgtagggagaggtgaggatgagaagaggagccatgtcctatggattcccagatccagactcctcttccctgggaaagctggattggagctggcccctccttctgtgccttcgggctgtggaggaggaggcccctgcagggagctgcctggggcgagcgctgggggcttttcctgcagtgcattagcagcatgtcataatggaaagtggctggatttctttccagttgtaatcaatggttaagatttaacctagcaacattgtaggggtacacagccaaatgattcaggaaaaaagatgcaggttgagtctggaggaatccctgtgccagcttcctcatgctccctccctctctcagaaatcacatggaacccattctcccctcagcagtgaaaatgcattcagcctgtgtgcagtgtttctgcccagggaagcccagtagggcctccatgcccggggtgtttactgggatctggttatgtagacaccacctgcctagcacgcaccaaaattccagactttcaggaaaacaggtgcctgtgccacattatttgcacggagagactgtgtccagtgaacggttctgatcagtaaactgttgactaggaacatcccgagagccaagttcccagatgccagccaagggccatctgacctgttttgaatctcaatttcctgatacagaaaacaaaggattgtcagctgacctctgtcctgtgtgcccagtggccccaggtgacgtgtcttcaagaagaggctgagctgcggtgcttgtaaggggtctcattctgtcacccaggctggagtgcagtggtgcaatgatggctcactgcagcctcgacctgggctcaagtgatcctccacctcagcttcctgagtagctgggaccacagatgggtccgctgtgtgcagaggctccatgggatgtgttgtcttcatagtagcaggtcgctggaccatgggtccgcaaggtgggatttttggactgttgtctggaatatgtttctttgcatcctgcagagtcatgtgctgttcctggggcttggatgatgtaggggaagcaaggtgaaagtggtatcccgtggttccacgttctgtcctgctgtggggctgtccctcacatgctttcagtggctgttgcagaggaagagcctccggaaatctgcgtgggtaaagtgagctccccgggggaaccgtcctcctcccttgagcgctggtgtgtccatagtgtgctgtgaacctccagtgaccccagagactttgctgtaattatctgccctactgaccctaaagaccttcctagaagtcaagagctagccttgagactgtgctatacacacacagctgagagccaagcccagttctctgggttgtgctttactccacgcatcaataaataattttgaaggcctcaaaaa

SEQ ID NO: 291359 - DNA, 320 bp, Homo sapiens
acaccacctgcctagcacgcaccaaaattccagactttcaggaaaacaggtgcctgtgccacattatttgcacggagagactgtgtccagtgaacggttctgatcagtaaactgttgactaggaacatcccgagagccaagttcccagatgccagccaagggccatctgacctgttttgaatctcaatttcctgatacagaaaacaaaggtagggcataattgatttttacagacgtgaccccatgatcctgctctctagtccccagatttttccagggcttttgtcagaggtgtttcccctttgattccccttggtggt

SEQ ID NO: 291360 - DNA, 493 bp, Homo sapiens
cgctggtggtttgtttatggaagagatactattactatctgaccaatggaattcgcaaagacatgattgcccctgaggagggtgaagtgatggttcggatttcaaagctgatttctaacacgctgctgacgagtcccttcctggagcccctgatggtggtcctcgtgcaggagaaggagaatgactattactgtagcctcatgaaaagcatcgttgattacatcctcatggacccaatggagagaaaacggctctttattgagagcatcccccgcttgtttcctcaaagagtgatccgggcccctgtgccctggcacagtgtctacaggagcgccaagaagtggaacgaggagcatctgcacacggtgaaccccatgatgctcaggctgaaagaactgtggtttgcagaattcagagacctcaggtttgttcgaacagcagaaatactagcgggaaaattgcctctgcagcctcaggaattttgggatgtgat

SEQ ID NO: 291361 - DNA, 4353 bp, Homo sapiens
  misc_feature (1188)..(1188): n is a, c, g, or t
cgctggtggtttgtttatggaagagatactattactatctgaccaatggaattcgcaaagacatgattgcccctgaggagggtgaagtgatggttcggatttcaaagctgatttctaacacgctgctgacgagtcccttcctggagcccctgatggtggtcctcgtgcaggagaaggagaatgactattactgtagcctcatgaaaagcatcgttgattacatcctcatggacccaatggagagaaaacggctctttattgagagcatcccccgcttgtttcctcaaagagtgatccgggcccctgtgccctggcacagtgtctacaggagcgccaagaagtggaacgaggagcatctgcacacggtgaaccccatgatgctcaggctgaaagaactgtggtttgcagagtaagaagtccctccctttttttttcattccctttcttgaccacatccacgtgtaagcaagcctattctgctgtgcacagtgggggtagccctgacagcatagagaaatgaaagaaaaaaaaatctaggccaaatatgcatgtgaattataagtgacacctttccttgcaggcttacgtggccctcctttgtgtccccagggcaccctgtgcctgtctctaagcactggaatatcctgcttaattgcacagacttggagccagcctgctcaggtctaactcctagctctgctgctttacaggcatatatgtggtcgcatcacttttctgtgccttgcttcctttacctctaaatttgcgataatgttaataagagtttccacttcataggattgataagaggaataaataacttactacatccaaagcacttagaacagtatctaatataacttaagcaccagtaattgttaatttggcattacctccattacaacatcaccctcagtttttgtttttgagacagagtttggctcttgttacccaggctggagtgcaatggcgcgatcttggctcactgcagcctccgcctcccgggttcaagcgattctcctgtctcaacctcccgagtagctgggattacaggcatgcgccaccatgcctggctaattttgcatctttagtcaagatggggtttctccatgttggtcaggctggtctcgaactctcgatctcaggtgatctgccagcctcagcctcccaaagtgctgggattagagncatgggccatcgcacccagctcacccttggttataatagaacatttacttatttgtctccctttagcctatgaagtgtgtgcgggcttgggttttattccttttttttttttttttttgagacgaatctcaccctgtcacccaggctggagtgcagtggcataatctcgattcactgcaacctcctcctcccaagctgaagcaatcctcccacctcagtctcccaagttagctgagtagttgggaccacagacccacaccaccacacccagctaattttttgtattttttgatagagacggagtttcaccatgttgtccagactggtctcaaactcctaagctcaagcaatccacccacatcggcaccccaaagttctgggattacaggtgtaagccaccacgcccggacggtcttattcctttatgtaactcagtgccagtacagggctggcaagcagtgatctctcaggtatatttatcaataattaaatttgcgaaactccgtctcaaaaaaaaaaaaattgtaggagtccagatgagacagaagccaccttttttcattctttcattttaaaaaaaagtgagatatccacattccataaaattcaccctttgaaagtacacaatgcaagtttttaatatattcacaagtttgtttaatccttaccactgtctaattcaagagtattatcattaccccaaaaagaaacccgggaggcagaggtttcagtgagctgagatggcgtcaccgcactcctgcctgggcgacagagcgagactccatctccaaaaaaaaaaaaagaaaaaagaaaaaaaaaaaaagacctactttgtgagagagtatagtgtcctccatgatgtcaacctcaatgaatcagataggtcccaagccatatctgtgggttaataatccatcatgaatcaattgccattaacttgccaagaactttttttcaatttcagtttgaagtttcactcttctgtgtgcttatttgtttgttggtttgttatgttttagccactgtaggcttctagagagaataaccattcctttcctggcccacgccctttccagtttgctttccagggtagagttactaattaaattccagacacttattaacaaacttttattactagacaggatcatgcacatggatgtaactccttttagctccatcttttcctcactccctctgattggttggtatgaccaaagggccattgtccagttccatatagggaagggatctgtggggtcttgctggctagctccctcacccttccaccttctcactctctccatgcattatgtatgcttcacatgggccttgctcatgtgaaacgaatgcccaggagttcaaggttgcagtgcaaggaggcccaagcattcttctctttgcaatctggtacttacagggttctaagtactccattaaaactgggtgtgtgggaggagaagaaacactgggcagctctcctacaaccagtatccctaggaaggaaatggaagaaaagaccctgtaatttggatgactatgtatggggacagctgaaatacataccacttaagttctccttcactgctgctgctgctgatcggcaatgtgtgaaagcagctgagccaggagagcccagcatgcacgcggctgccactgcaatggcaggtaccagggccggtactacatttgatgaattacaatgccaagaagacatggtttgtaccaggtttgaaaacaaggcctatgtgaataccaatgactttacgagacaataaggaaaaacaacgtagactgagttccccatctagtgacacccacagccctagcttcctccttaagcccctcagactgttttatctctgaactggttagtgaagacttaaaaacatagtcctgcaggttgactaagaaaaatctttaagaatggcaactggtgggtgttaccttcactcactgcaagatctgccgtatatatggtttaaaaagaattttaaaagttagttaaggtcaatcatggtggctcacacctataattttagagctttgggaggtcgagaagcacgaggattgcttgaggccaggagttcaatatcagtttgggcaatatggcgagacctcatctctacaaaattaaattagctggggtggtggcacacgtctgtagtcctagctactcaggaggctgaggcaggaggatcgcttgagcccagaagttcaagggtgcagtgagctatgattgcaccattgcacctccagcctgggcaacagagtgagactctgtcaaaaaaaaaaaaaaaaaaagttggtagggaaaagctaacaagagacttttgaaaatagaaaatagagtaaatagcattattcaagacacagaaagaaagcaggaaagcatatttgtgagaaataattattaaaggggctaggcacagtggctcacacctgtaatcccagcactttggtaggccaagatggctggatcacctgaggtcaggcgttcaataccagcctggccaacatggtgaaaccccgtctctactaaaaatacaaaaaattagccgagatggctggatcatctgaggtcaggagttcaataccagcctggccaacgtggtgaaaccccgtgtactaaaatataaaatacaaaaaattagctgggattacaggcacacaccacaatgccaggctatttttttgtattttcagtagagacagggcttttgccatgtcgcccaggctggtctcgaactcctgagctcaggcaatccactccccctttggcctcccaaagtgctgggattacaggcgccaccgcgcctggccaaaaggcatttcattctttttattttattttattattatactttaagttttagggtacatgtgcacaacgtgcaggtttgttacatacgtatacatgtgccatgttggtgtgctgcacccattaactcatcatttacattaggtgtatctcctaatgctatccttcccccccccaccctccccaccccacgacaggcccaggtgtgtgatgttccctttcctgtgtccaagtgttctcattgttcaattccgacctatgagtgagaacgaaggcatttcattcttgatgatggtggtggtgatgatgttgatgacaattatattaataaagccattgctgtg

SEQ ID NO: 291362 - DNA, 2621 bp, Homo sapiens
ggtcgctgggatattcagttaagggagcttcactttggagatatatcctgaatataaccccttgaccccagacaaatgatttagaccataaagaaatattcacgcagcccagaattgtgcttctaacaagagcacgaagagctgctttgtaggagaatcacttgaacccgggaggcagaggtttcagtgagctgagatggcgtcaccgcactcctgcctgggcgacagagcgagactccatctccaaaaaaaaaaaaagaaaaaagaaaaaaaaaaaaagacctactttgtgagagagtatagtgtcctccatgatgtcaacctcaatgaatcagataggtcccaagccatatctgtgggttaataatccatcatgaatcaattgccattaacttgccaagaactttttttcaatttcagtttgaagtttcactcttctgtgtgcttatttgtttgttggtttgttatgttttagccactgtaggcttctagagagaataaccattcctttcctggcccacgccctttccagtttgctttccagggtagagttactaattaaattccagacacttattaacaaacttttattactagacaggatcatgcacatggatgtaactccttttagctccatcttttcctcactccctctgattggttggtatgaccaaagggccattgtccagttccatatagggaagggatctgtggggtcttgctggctagctccctcacccttccaccttctcactctctccatgcattatgtatgcttcacatgggccttgctcatgtgaaacgaatgcccaggagttcaaggttgcagtgcaaggaggcccaagcattcttctctttgcaatctggtacttacagggttctaagtactccattaaaactgggtgtgtgggaggagaagaaacactgggcagctctcctacaaccagtatccctaggaaggaaatggaagaaaagaccctgtaatttggatgactatgtatggggacagctgaaatacataccacttaagttctccttcactgctgctgctgctgatcggcaatgtgtgaaagcagctgagccaggagagcccagcatgcacgcggctgccactgcaatggcaggtaccagggccggtactacatttgatgaattacaatgccaagaagacatggtttgtaccaggtttgaaaacaaggcctatgtgaataccaatgactttacgagacaataaggaaaaacaacgtagactgagttccccatctagtgacacccacagccctagcttcctccttaagcccctcagactgttttatctctgaactggttagtgaagacttaaaaacatagtcctgcaggttgactaagaaaaatctttaagaatggcaactggtgggtgttaccttcactcactgcaagatctgccgtatatatggtttaaaaagaattttaaaagttagttaaggtcaatcatggtggctcacacctataattttagagctttgggaggtcgagaagcacgaggattgcttgaggccaggagttcaatatcagtttgggcaatatggcgagacctcatctctacaaaattaaattagctggggtggtggcacacgtctgtagtcctagctactcaggaggctgaggcaggaggatcgcttgagcccagaagttcaagggtgcagtgagctatgattgcaccattgcacctccagcctgggcaacagagtgagactctgtcaaaaaaaaaaaaaaaaaaagttggtagggaaaagctaacaagagacttttgaaaatagaaaatagagtaaatagcattattcaagacacagaaagaaagcaggaaagcatatttgtgagaaataattattaaaggggctaggcacagtggctcacacctgtaatcccagcactttggtaggccaagatggctggatcacctgaggtcaggcgttcaataccagcctggccaacatggtgaaaccccgtctctactaaaaatacaaaaaattagccgagatggctggatcatctgaggtcaggagttcaataccagcctggccaacgtggtgaaaccccgtgtactaaaatataaaatacaaaaaattagctgggattacaggcacacaccacaatgccaggctatttttttgtattttcagtagagacagggcttttgccatgtcgcccaggctggtctcgaactcctgagctcaggcaatccactccccctttggcctcccaaagtgctgggattacaggcgccaccgcgcctggccaaaaggcatttcattctttttattttattttattattatactttaagttttagggtacatgtgcacaacgtgcaggtttgttacatacgtatacatgtgccatgttggtgtgctgcacccattaactcatcatttacattaggtgtatctcctaatgctatccttcccccccccaccctccccaccccacgacaggcccaggtgtgtgatgttccctttcctgtgtccaagtgttctcattgttcaattccgacctatgagtgagaacgaaggcatttcattcttgatgatggtggtggtgatgatgttgatgacaattatattaataaagccattgctgtg

SEQ ID NO: 291363 - DNA, 5568 bp, Homo sapiens
gctgaaatactgacattgaatattatatgaaatagtgaactgccatctttcatggttgtcaaatgctagggttaaagctgactcaaaatgttcacagatatattctgaagtatttacaattaaatgacatattgttttggagttgatagtggctgaatctgagtgatgggtacgtggaggttccttatattatgctctctacttttgtctgggcttggatttttccttataaaaagtaaaaaacaagtacttagacataggcctaactaataatgataggatgtggaatgtgatgaataacttattttgtaacagaaatagtattcattttacctgcctttatttactcttttacaattgccaagttgcattaatatgttctgtttaaaaaaatagtgtgatatcattttaaaaagtcactgcatctatggtactgacattctttccctcttacagattgtcctgggtcacataatgccagctgagcgtaaaaagccagcaagtatggaagaaaaagactctttaccaaacaacaaggaaaaagactgcagtgaaaggcggacagtgagcagcaaggagaggccaaaagacgatatcaagctcactgccaagaaggaggtcagcaaggcccctgaagacaagaagaagagactggaagatgataagagaaaaaaggaagacaaggaacgcaagaaaaaagacgaagaaaaggtgaaggcagaggaagaatcaaagaaaaaagaagaggaagaaaaaaagaaacatcaagaggaagagagaaagaagcaagaagagcaggccaaacgtcagcaagaagaagaagcagctgctcagatgaaagaaaaagaagaatccattcagcttcatcaggaagcttgggaacgacatcatttaagaaaggaacttcgtagcaaaaaccaaaatgctccggacagccgaccagaggaaaacttcttcagccgcctcgactcaagtttgaagaaaaatactgcttttgtcaagaaactaaaaactattacagaacaacagagagactccttgtcccatgattttaatggcctaaatttaagcaaatacattgcagaagctgtagcttccatcgtggaagcaaaactaaaaatctctgatgtgaactgtgctgtgcacctctgctctctctttcaccagcgttatgctgactttgccccatcacttcttcaggtctggaaaaaacattttgaagcaaggaaagaggagaaaacacctaacatcaccaagttaagaactgatttgcgttttattgcagaattgacaatagttgggattttcactgacaaggaaggtctttccttaatctatgaacagctaaaaaatattattaatgctgatcgggagtcccacactcatgtctctgtagtgattagtttctgtcgacattgtggagatgatattgctggacttgtaccaaggaaagtaaagagtgctgcagagaagtttaatttgagttttcctcctagtgagataattagtccagagaaacaacagcccttccagaatcttttaaaagagtactttacgtctttgaccaaacacctgaaaagggaccacagggagctccagaatactgagagacaaaacaggcgcattctacattctaaaggggagctcagtgaagatagacataaacagtatgaggaatttgctatgtcttaccagaagctgctggcaaattctcaatccttagcagaccttttggatgaaaatatgccagatcttcctcaagacaaaccaacaccagaagaacatgggcctggaattgatatattcacacctggtaaacctggagaatatgacttggaaggtggtatatgggaagatgaagatgctcggaatttttatgagaacctcattgatttgaaggcttttgtcccagccatcttgtttaaagacaatgaaaaaagttgtcagaataaagagtccaacaaagatgataccaaagaggcaaaagaatctaaggagaataaggaggtatcaagtcccgatgatttggaacttgagttggagaatctagaaattaatgatgacaccttagaattagagggtggagatgaagctgaagatcttacaaagaaacttcttgatgaacaagaacaagaagatgaggaagccagcactggatctcatctcaagctcatagtagatgctttcctacagcagttacccaactgtgtcaaccgagatctgatagacaaggcagcaatggatttttgcatgaacatgaacacaaaagcaaacaggaagaagttggtacgggcactcttcatagttcctagacaaaggttggatttgctaccattttatgcaagattggttgctacattgcatccctgcatgtctgatgtagcagaggatctttgttccatgctgaggggggatttcagatttcatgtacggaaaaaggaccagatcaatattgaaacaaagaataaaactgttcgttttataggagaactaactaagtttaagatgttcaccaaaaatgacacactgcattgtttaaagatgcttctgtcagacttctctcatcaccatattgaaatggcatgcaccctgctggagacatgtggacggtttcttttcagatctccagaatctcacctgaggaccagtgtacttttggagcaaatgatgagaaagaagcaagcaatgcatcttgatgcgagatacgtcacaatggtagagaatgcatattactactgcaacccacctccagctgaaaaaaccgtgaaaaagaaacgtcctcctctccaggaatatgtccggaaacttttgtacaaggatctctctaaggttaccaccgagaaggttttgagacagatgcgaaagctgccctggcaggaccaagaagtgaaagactatgttatttgttgtatgataaacatctggaatgtgaaatataatagtattcattgtgtagccaacctcttagcaggactagtgctctaccaagaggatgttgggatccacgttgtggatggagtgttagaagatattcgattaggaatggaggttaatcaacctaaatttaatcagaggcgcatcagcagtgccaagttcttaggagaactttacaattaccgaatggtggaatcagctgttattttcagaactctgtattcttttacctcatttggtgttaatcctgatggctctccaagttccctggacccacctgagcatcttttcagaattagactcgtatgcactattctggacacatgtggccagtactttgacagaggttccagtaaacgaaaacttgattgtttccttgtatattttcagcgttatgtttggtggaagaaaagtttggaggtttggacaaaagaccatccatttcctattgatatagattacatgatcagtgatacactagaactgctaagaccaaagatcaaactctgtaattctctggaagaatccatcaggcaggtacaagacttggaacgagaattcttaataaaactaggcctagtaaatgacaaagactcaaaagattctatgacagaaggagaaaatcttgaagaggatgaagaagaagaagaaggtggggctgaaacagaagaacaatctggaaatgaaagtgaagtaaatgagccagaagaagaggagggttctgataatgatgatgatgagggagaagaagaggaggaagagaatacagattaccttacagattccaataaggaaaatgaaaccgatgaagagaatactgaggtaatgattaaaggcggtggacttaagcatgtaccttgtgtagaagatgaggacttcattcaagctctggataaaatgatgctagaaaatctacagcaacgaagtggtgaatctgttaaagtgcaccaactagatgttgccattcctttgcatctcaaaagccagctgaggaaagggcccccactgggaggtggggaaggagaggctgagtctgcagacacaatgccgtttgtcatgttaacaagaaaaggcaataaacagcagtttaagatccttaatgtacccatgtcctctcaacttgctgcaaatcactggaaccagcaacaggcagaacaagaagagaggatgagaatgaaaaagctcacactagatatcaatgaacggcaagaacaagaagattatcaagaaatgttgcagtctcttgcacagcgcccagctccagcaaacaccaatcgtgagaggcggcctcgctaccaacatccgaagggagcacctaatgcagatctaatctttaagactggtgggaggagacgttgatccagcagcacgtgtcatttcattaggtcctgtatctgatgttgtggttagtggagtcctccagcaattgaatgagagcagtggacacatctcagcaggtcggtctagagagttgcgaatctaaacctgggacaggctggggccaggaggcagaaacaccagcctctgccaacaccggaacaagccgacgcttccagacaaggcggaaaaggccttttgtaatggaaatctcgcgagggttaatcttctcttgagaatggcagtcaagaaatgagatggttcacttgactactgagcagttacaccaaggagagcgtgaaggagatgattgagccagagaagaaacgggttgtgatggtaatggtgtgggggaaatgaacttgagctttaaacttgatttgagtttcagtgtctctgaattgaacatcccacgttggaagaagatacatttgggggctccaggactacagtagaaaagtatagagcaagcaggaaaatcttctagtaaaacttacatgcaggacaacaaaatgatgaaagatatccaaataccagataatccaccaggaaggcttttgtttaggaatttgtttcaagaggaacaagggatgagggagaaaaatccgttttatccatcagagtcagtgctataaaattgcctattaaggtaaaagaaaaatgtggagactattttactatacagagagcattaattcagatggcttagaaaagtgataccagcccaagaacagggatctaggtgagcccattgtaagtatcattgaaaacaaaacatgcccgtcaacatgtcacagaaaacgaacgaaggacaacaagaagtggatgagaatattttgttgaccttcatgggtttacagcctctgtctctaaacaaagtatggaaacaagtagagcttttattttgcttttgtttttgttttgttttttttttgttttcccccactaaatagaaatgagggtccttagtctgtttctgacaatctgttaatttcttaggacagctgtctttggtttgctttccagcaggcgtagtatatttagtcggagagcacatctgtatgcgacaacttgattacatctttttttctagctattttgcattttttcttttaccatgtttcagtttctgcatgtagatttaaataaaaaacaaaacttgtaaagttgtaacatttcacatggaaatgctgcccaatcttcaccagcttcagaaatctgacctttgccgatgctgcaataaagtgttgtaattta

SEQ ID NO: 291364 - DNA, 5369 bp, Homo sapiens
gctggtagtggctaccttacgtattgccagtctgaaaaattcgctcttctcatcgactggggaatttgaaagagctgttaagtgaatggcactcatatgagcctttgccccggacccgccaccccagagtcaagctgagggcatcggcatgccgcagggaagacgatcaggactgtttttaatcgggcagtcgcgcggatggccttttccctctcgcctccttccgccccgcccccactctcagcccggccgcgctgattgtcctgggtcacataatgccagctgagcgtaaaaagccagcaagtatggaagaaaaagactctttaccaaacaacaaggaaaaagactgcagtgaaaggcggacagtgagcagcaaggagaggccaaaagacgatatcaagctcactgccaagaaggaggtcagcaaggcccctgaagacaagaagaagagactggaagatgataagagaaaaaaggaagacaaggaacgcaagaaaaaagacgaagaaaaggtgaaggcagaggaagaatcaaagaaaaaagaagaggaagaaaaaaagaaacatcaagaggaagagagaaagaagcaagaagagcaggccaaacgtcagcaagaagaagaagcagctgctcagatgaaagaaaaagaagaatccattcagcttcatcaggaagcttgggaacgacatcatttaagaaaggaacttcgtagcaaaaaccaaaatgctccggacagccgaccagaggaaaacttcttcagccgcctcgactcaagtttgaagaaaaatactgcttttgtcaagaaactaaaaactattacagaacaacagagagactccttgtcccatgattttaatggcctaaatttaagcaaatacattgcagaagctgtagcttccatcgtggaagcaaaactaaaaatctctgatgtgaactgtgctgtgcacctctgctctctctttcaccagcgttatgctgactttgccccatcacttcttcaggtctggaaaaaacattttgaagcaaggaaagaggagaaaacacctaacatcaccaagttaagaactgatttgcgttttattgcagaattgacaatagttgggattttcactgacaaggaaggtctttccttaatctatgaacagctaaaaaatattattaatgctgatcgggagtcccacactcatgtctctgtagtgattagtttctgtcgacattgtggagatgatattgctggacttgtaccaaggaaagtaaagagtgctgcagagaagtttaatttgagttttcctcctagtgagataattagtccagagaaacaacagcccttccagaatcttttaaaagagtactttacgtctttgaccaaacacctgaaaagggaccacagggagctccagaatactgagagacaaaacaggcgcattctacattctaaaggggagctcagtgaagatagacataaacagtatgaggaatttgctatgtcttaccagaagctgctggcaaattctcaatccttagcagaccttttggatgaaaatatgccagatcttcctcaagacaaaccaacaccagaagaacatgggcctggaattgatatattcacacctggtaaacctggagaatatgacttggaaggtggtatatgggaagatgaagatgctcggaatttttatgagaacctcattgatttgaaggcttttgtcccagccatcttgtttaaagacaatgaaaaaagttgtcagaataaagagtccaacaaagatgataccaaagaggcaaaagaatctaaggagaataaggaggtatcaagtcccgatgatttggaacttgagttggagaatctagaaattaatgatgacaccttagaattagagggtggagatgaagctgaagatcttacaaagaaacttcttgatgaacaagaacaagaagatgaggaagccagcactggatctcatctcaagctcatagtagatgctttcctacagcagttacccaactgtgtcaaccgagatctgatagacaaggcagcaatggatttttgcatgaacatgaacacaaaagcaaacaggaagaagttggtacgggcactcttcatagttcctagacaaaggttggatttgctaccattttatgcaagattggttgctacattgcatccctgcatgtctgatgtagcagaggatctttgttccatgctgaggggggatttcagatttcatgtacggaaaaaggaccagatcaatattgaaacaaagaataaaactgttcgttttataggagaactaactaagtttaagatgttcaccaaaaatgacacactgcattgtttaaagatgcttctgtcagacttctctcatcaccatattgaaatggcatgcaccctgctggagacatgtggacggtttcttttcagatctccagaatctcacctgaggaccagtgtacttttggagcaaatgatgagaaagaagcaagcaatgcatcttgatgcgagatacgtcacaatggtagagaatgcatattactactgcaacccacctccagctgaaaaaaccgtgaaaaagaaacgtcctcctctccaggaatatgtccggaaacttttgtacaaggatctctctaaggttaccaccgagaaggttttgagacagatgcgaaagctgccctggcaggaccaagaagtgaaagactatgttatttgttgtatgataaacatctggaatgtgaaatataatagtattcattgtgtagccaacctcttagcaggactagtgctctaccaagaggatgttgggatccacgttgtggatggagtgttagaagatattcgattaggaatggaggttaatcaacctaaatttaatcagaggcgcatcagcagtgccaagttcttaggagaactttacaattaccgaatggtggaatcagctgttattttcagaactctgtattcttttacctcatttggtgttaatcctgatggctctccaagttccctggacccacctgagcatcttttcagaattagactcgtatgcactattctggacacatgtggccagtactttgacagaggttccagtaaacgaaaacttgattgtttccttgtatattttcagcgttatgtttggtggaagaaaagtttggaggtttggacaaaagaccatccatttcctattgatatagattacatgatcagtgatacactagaactgctaagaccaaagatcaaactctgtaattctctggaagaatccatcaggcaggtacaagacttggaacgagaattcttaataaaactaggcctagtaaatgacaaagactcaaaagattctatgacagaaggagaaaatcttgaagaggatgaagaagaagaagaaggtggggctgaaacagaagaacaatctggaaatgaaagtgaagtaaatgagccagaagaagaggagggttctgataatgatgatgatgagggagaagaagaggaggaagagaatacagattaccttacagattccaataaggaaaatgaaaccgatgaagagaatactgaggtaatgattaaaggcggtggacttaagcatgtaccttgtgtagaagatgaggacttcattcaagctctggataaaatgatgctagaaaatctacagcaacgaagtggtgaatctgttaaagtgcaccaactagatgttgccattcctttgcatctcaaaagccagctgaggaaagggcccccactgggaggtggggaaggagaggctgagtctgcagacacaatgccgtttgtcatgttaacaagaaaaggcaataaacagcagtttaagatccttaatgtacccatgtcctctcaacttgctgcaaatcactggaaccagcaacaggcagaacaagaagagaggatgagaatgaaaaagctcacactagatatcaatgaacggcaagaacaagaagattatcaagaaatgttgcagtctcttgcacagcgcccagctccagcaaacaccaatcgtgagaggcggcctcgctaccaacatccgaagggagcacctaatgcagatctaatctttaagactggtgggaggagacgttgatccagcagcacgtgtcatttcattaggtcctgtatctgatgttgtggttagtggagtcctccagcaattgaatgagagcagtggacacatctcagcaggtcggtctagagagttgcgaatctaaacctgggacaggctggggccaggaggcagaaacaccagcctctgccaacaccggaacaagccgacgcttccagacaaggcggaaaaggccttttgtaatggaaatctcgcgagggttaatcttctcttgagaatggcagtcaagaaatgagatggttcacttgactactgagcagttacaccaaggagagcgtgaaggagatgattgagccagagaagaaacgggttgtgatggtaatggtgtgggggaaatgaacttgagctttaaacttgatttgagtttcagtgtctctgaattgaacatcccacgttggaagaagatacatttgggggctccaggactacagtagaaaagtatagagcaagcaggaaaatcttctagtaaaacttacatgcaggacaacaaaatgatgaaagatatccaaataccagataatccaccaggaaggcttttgtttaggaatttgtttcaagaggaacaagggatgagggagaaaaatccgttttatccatcagagtcagtgctataaaattgcctattaaggtaaaagaaaaatgtggagactattttactatacagagagcattaattcagatggcttagaaaagtgataccagcccaagaacagggatctaggtgagcccattgtaagtatcattgaaaacaaaacatgcccgtcaacatgtcacagaaaacgaacgaaggacaacaagaagtggatgagaatattttgttgaccttcatgggtttacagcctctgtctctaaacaaagtatggaaacaagtagagcttttattttgcttttgtttttgttttgttttttttttgttttcccccactaaatagaaatgagggtccttagtctgtttctgacaatctgttaatttcttaggacagctgtctttggtttgctttccagcaggcgtagtatatttagtcggagagcacatctgtatgcgacaacttgattacatctttttttctagctattttgcattttttcttttaccatgtttcagtttctgcatgtagatttaaataaaaaacaaaacttgtaaagttgtaacatttcacatggaaatgctgcccaatcttcaccagcttcagaaatctgacctttgccgatgctgcaataaagtgttgtaattta

SEQ ID NO: 291365 - DNA, 5045 bp, Homo sapiens
gcggccgcctactactactaaattcgcggccgcgtcgaccagtgagcagcaaggagaggccaaaagacgatatcaagctcactgccaagaaggaggtcagcaaggcccctgaagacaagaagaagagactggaagatgataagagaaaaaaggaagacaaggaacgcaagaaaaaagacgaagaaaaggtgaaggcagaggaagaatcaaagaaaaaagaagaggaagaaaaaaagaaacatcaagaggaagagagaaagaagcaagaagagcaggccaaacgtcagcaagaagaagaagcagctgctcagatgaaagaaaaagaagaatccattcagcttcatcaggaagcttgggaacgacatcatttaagaaaggaacttcgtagcaaaaaccaaaatgctccggacagccgaccagaggaaaacttcttcagccgcctcgactcaagtttgaagaaaaatactgcttttgtcaagaaactaaaaactattacagaacaacagagagactccttgtcccatgattttaatggcctaaatttaagcaaatacattgcagaagctgtagcttccatcgtggaagcaaaactaaaaatctctgatgtgaactgtgctgtgcacctctgctctctctttcaccagcgttatgctgactttgccccatcacttcttcaggtctggaaaaaacattttgaagcaaggaaagaggagaaaacacctaacatcaccaagttaagaactgatttgcgttttattgcagaattgacaatagttgggattttcactgacaaggaaggtctttccttaatctatgaacagctaaaaaatattattaatgctgatcgggagtcccacactcatgtctctgtagtgattagtttctgtcgacattgtggagatgatattgctggacttgtaccaaggaaagtaaagagtgctgcagagaagtttaatttgagttttcctcctagtgagataattagtccagagaaacaacagcccttccagaatcttttaaaagagtactttacgtctttgaccaaacacctgaaaagggaccacagggagctccagaatactgagagacaaaacaggcgcattctacattctaaaggggagctcagtgaagatagacataaacagtatgaggaatttgctatgtcttaccagaagctgctggcaaattctcaatccttagcagaccttttggatgaaaatatgccagatcttcctcaagacaaaccaacaccagaagaacatgggcctggaattgatatattcacacctggtaaacctggagaatatgacttggaaggtggtatatgggaagatgaagatgctcggaatttttatgagaacctcattgatttgaaggcttttgtcccagccatcttgtttaaagacaatgaaaaaagttgtcagaataaagagtccaacaaagatgataccaaagaggcaaaagaatctaaggagaataaggaggtatcaagtcccgatgatttggaacttgagttggagaatctagaaattaatgatgacaccttagaattagagggtggagatgaagctgaagatcttacaaagaaacttcttgatgaacaagaacaagaagatgaggaagccagcactggatctcatctcaagctcatagtagatgctttcctacagcagttacccaactgtgtcaaccgagatctgatagacaaggcagcaatggatttttgcatgaacatgaacacaaaagcaaacaggaagaagttggtacgggcactcttcatagttcctagacaaaggttggatttgctaccattttatgcaagattggttgctacattgcatccctgcatgtctgatgtagcagaggatctttgttccatgctgaggggggatttcagatttcatgtacggaaaaaggaccagatcaatattgaaacaaagaataaaactgttcgttttataggagaactaactaagtttaagatgttcaccaaaaatgacacactgcattgtttaaagatgcttctgtcagacttctctcatcaccatattgaaatggcatgcaccctgctggagacatgtggacggtttcttttcagatctccagaatctcacctgaggaccagtgtacttttggagcaaatgatgagaaagaagcaagcaatgcatcttgatgcgagatacgtcacaatggtagagaatgcatattactactgcaacccacctccagctgaaaaaaccgtgaaaaagaaacgtcctcctctccaggaatatgtccggaaacttttgtacaaggatctctctaaggttaccaccgagaaggttttgagacagatgcgaaagctgccctggcaggaccaagaagtgaaagactatgttatttgttgtatgataaacatctggaatgtgaaatataatagtattcattgtgtagccaacctcttagcaggactagtgctctaccaagaggatgttgggatccacgttgtggatggagtgttagaagatattcgattaggaatggaggttaatcaacctaaatttaatcagaggcgcatcagcagtgccaagttcttaggagaactttacaattaccgaatggtggaatcagctgttattttcagaactctgtattcttttacctcatttggtgttaatcctgatggctctccaagttccctggacccacctgagcatcttttcagaattagactcgtatgcactattctggacacatgtggccagtactttgacagaggttccagtaaacgaaaacttgattgtttccttgtatattttcagcgttatgtttggtggaagaaaagtttggaggtttggacaaaagaccatccatttcctattgatatagattacatgatcagtgatacactagaactgctaagaccaaagatcaaactctgtaattctctggaagaatccatcaggcaggtacaagacttggaacgagaattcttaataaaactaggcctagtaaatgacaaagactcaaaagattctatgacagaaggagaaaatcttgaagaggatgaagaagaagaagaaggtggggctgaaacagaagaacaatctggaaatgaaagtgaagtaaatgagccagaagaagaggagggttctgataatgatgatgatgagggagaagaagaggaggaagagaatacagattaccttacagattccaataaggaaaatgaaaccgatgaagagaatactgaggtaatgattaaaggcggtggacttaagcatgtaccttgtgtagaagatgaggacttcattcaagctctggataaaatgatgctagaaaatctacagcaacgaagtggtgaatctgttaaagtgcaccaactagatgttgccattcctttgcatctcaaaagccagctgaggaaagggcccccactgggaggtggggaaggagaggctgagtctgcagacacaatgccgtttgtcatgttaacaagaaaaggcaataaacagcagtttaagatccttaatgtacccatgtcctctcaacttgctgcaaatcactggaaccagcaacaggcagaacaagaagagaggatgagaatgaaaaagctcacactagatatcaatgaacggcaagaacaagaagattatcaagaaatgttgcagtctcttgcacagcgcccagctccagcaaacaccaatcgtgagaggcggcctcgctaccaacatccgaagggagcacctaatgcagatctaatctttaagactggtgggaggagacgttgatccagcagcacgtgtcatttcattaggtcctgtatctgatgttgtggttagtggagtcctccagcaattgaatgagagcagtggacacatctcagcaggtcggtctagagagttgcgaatctaaacctgggacaggctggggccaggaggcagaaacaccagcctctgccaacaccggaacaagccgacgcttccagacaaggcggaaaaggccttttgtaatggaaatctcgcgagggttaatcttctcttgagaatggcagtcaagaaatgagatggttcacttgactactgagcagttacaccaaggagagcgtgaaggagatgattgagccagagaagaaacgggttgtgatggtaatggtgtgggggaaatgaacttgagctttaaacttgatttgagtttcagtgtctctgaattgaacatcccacgttggaagaagatacatttgggggctccaggactacagtagaaaagtatagagcaagcaggaaaatcttctagtaaaacttacatgcaggacaacaaaatgatgaaagatatccaaataccagataatccaccaggaaggcttttgtttaggaatttgtttcaagaggaacaagggatgagggagaaaaatccgttttatccatcagagtcagtgctataaaattgcctattaaggtaaaagaaaaatgtggagactattttactatacagagagcattaattcagatggcttagaaaagtgataccagcccaagaacagggatctaggtgagcccattgtaagtatcattgaaaacaaaacatgcccgtcaacatgtcacagaaaacgaacgaaggacaacaagaagtggatgagaatattttgttgaccttcatgggtttacagcctctgtctctaaacaaagtatggaaacaagtagagcttttattttgcttttgtttttgttttgttttttttttgttttcccccactaaatagaaatgagggtccttagtctgtttctgacaatctgttaatttcttaggacagctgtctttggtttgctttccagcaggcgtagtatatttagtcggagagcacatctgtatgcgacaacttgattacatctttttttctagctattttgcattttttcttttaccatgtttcagtttctgcatgtagatttaaataaaaaacaaaacttgtaaagttgtaacatttcacatggaaatgctgcccaatcttcaccagcttcagaaatctgacctttgccgatgctgcaataaagtgttgtaattta

SEQ ID NO: 291366 - DNA, 1516 bp, Homo sapiens
ctgtgtagtgctctagaggtcccaggattcgtagatccaagaagagaggatgagaatgaaaaagctcacactagatatcaatgaacggcaagaacaagaagattatcaagaaatgttgcagtctcttgcacagcgcccagctccagcaaacaccaatcgtgagaggcggcctcgctaccaacatccgaagggagcacctaatgcagatctaatctttaagactggtgggaggagacgttgatccagcagcacgtgtcatttcattaggtcctgtatctgatgttgtggttagtggagtcctccagcaattgaatgagagcagtggacacatctcagcaggtcggtctagagagttgcgaatctaaacctgggacaggctggggccaggaggcagaaacaccagcctctgccaacaccggaacaagccgacgcttccagacaaggcggaaaaggccttttgtaatggaaatctcgcgagggttaatcttctcttgagaatggcagtcaagaaatgagatggttcacttgactactgagcagttacaccaaggagagcgtgaaggagatgattgagccagagaagaaacgggttgtgatggtaatggtgtgggggaaatgaacttgagctttaaacttgatttgagtttcagtgtctctgaattgaacatcccacgttggaagaagatacatttgggggctccaggactacagtagaaaagtatagagcaagcaggaaaatcttctagtaaaacttacatgcaggacaacaaaatgatgaaagatatccaaataccagataatccaccaggaaggcttttgtttaggaatttgtttcaagaggaacaagggatgagggagaaaaatccgttttatccatcagagtcagtgctataaaattgcctattaaggtaaaagaaaaatgtggagactattttactatacagagagcattaattcagatggcttagaaaagtgataccagcccaagaacagggatctaggtgagcccattgtaagtatcattgaaaacaaaacatgcccgtcaacatgtcacagaaaacgaacgaaggacaacaagaagtggatgagaatattttgttgaccttcatgggtttacagcctctgtctctaaacaaagtatggaaacaagtagagcttttattttgcttttgtttttgttttgttttttttttgttttcccccactaaatagaaatgagggtccttagtctgtttctgacaatctgttaatttcttaggacagctgtctttggtttgctttccagcaggcgtagtatatttagtcggagagcacatctgtatgcgacaacttgattacatctttttttctagctattttgcattttttcttttaccatgtttcagtttctgcatgtagatttaaataaaaaacaaaacttgtaaagttgtaacatttcacatggaaatgctgcccaatcttcaccagcttcagaaatctgacctttgccgatgctgcaataaagtgttgtaattta

SEQ ID NO: 291367 - DNA, 1418 bp, Homo sapiens
cccccactaaatagaaacgggttgtgatggtaatggtgtgggggaaatgaacttgagctttaaacttgatttgagtttcagtgtctctgaattgaacatcccacgttggaagaagatacatttgggctgggaggagacgttgatccagcagcacgtgtcatttcattaggtcctgtatctgatgttgtggttagtggagtcctccagcaattgaatgagagcagtggacacatctcagcaggtcggtctagagagttgcgaatctaaacctgggacaggctggggccaggaggcagaaacaccagcctctgccaacaccggaacaagccgacgcttccagacaaggcggaaaaggccttttgtaatggaaatctcgcgagggttaatcttctcttgagaatggcagtcaagaaatgagatggttcacttgactactgagcagttacaccaaggagagcgtgaaggagatgattgagccagagaagaaacgggttgtgatggtaatggtgtgggggaaatgaacttgagctttaaacttgatttgagtttcagtgtctctgaattgaacatcccacgttggaagaagatacatttgggggctccaggactacagtagaaaagtatagagcaagcaggaaaatcttctagtaaaacttacatgcaggacaacaaaatgatgaaagatatccaaataccagataatccaccaggaaggcttttgtttaggaatttgtttcaagaggaacaagggatgagggagaaaaatccgttttatccatcagagtcagtgctataaaattgcctattaaggtaaaagaaaaatgtggagactattttactatacagagagcattaattcagatggcttagaaaagtgataccagcccaagaacagggatctaggtgagcccattgtaagtatcattgaaaacaaaacatgcccgtcaacatgtcacagaaaacgaacgaaggacaacaagaagtggatgagaatattttgttgaccttcatgggtttacagcctctgtctctaaacaaagtatggaaacaagtagagcttttattttgcttttgtttttgttttgttttttttttgttttcccccactaaatagaaatgagggtccttagtctgtttctgacaatctgttaatttcttaggacagctgtctttggtttgctttccagcaggcgtagtatatttagtcggagagcacatctgtatgcgacaacttgattacatctttttttctagctattttgcattttttcttttaccatgtttcagtttctgcatgtagatttaaataaaaaacaaaacttgtaaagttgtaacatttcacatggaaatgctgcccaatcttcaccagcttcagaaatctgacctttgccgatgctgcaataaagtgttgtaattta

SEQ ID NO: 291368 - DNA, 3943 bp, Homo sapiens
  misc_feature (3943)..(3943): n is a, c, g, or t
ggtggggggaggggaggggagagcccgagcgctggagttggtgctgggaaacccggggctaatgttgacaacaggctcgagattgtcctgggtcacataatgccagctgagcgtaaaaagccagcaagtatggaagaaaaagactctttaccaaacaacaaggaaaaagactgcagtgaaaggcggacagtgagcagcaaggagaggccaaaagacgatatcaagctcactgccaagaaggaggtcagcaaggcccctgaagacaagaagaagagactggaagatgataagagaaaaaaggaagacaaggaacgcaagaaaaaagacgaagaaaaggtgaaggcagaggaagaatcaaagaaaaaagaagaggaagaaaaaaagaaacatcaagaggaagagagaaagaagcaagaagagcaggccaaacgtcagcaagaagaagaagcagctgctcagatgaaagaaaaagaagaatccattcagcttcatcaggaagcttgggaacgacatcatttaagaaaggaacttcgtagcaaaaaccaaaatgctccggacagccgaccagaggaaaacttcttcagccgcctcgactcaagtttgaagaaaaatactgcttttgtcaagaaactaaaaactattacagaacaacagagagactccttgtcccatgattttaatggcctaaatttaagcaaatacattgcagaagctgtagcttccatcgtggaagcaaaactaaaaatctctgatgtgaactgtgctgtgcacctctgctctctctttcaccagcgttatgctgactttgccccatcacttcttcaggtctggaaaaaacattttgaagcaaggaaagaggagaaaacacctaacatcaccaagttaagaactgatttgcgttttattgcagaattgacaatagttgggattttcactgacaaggaaggtctttccttaatctatgaacagctaaaaaatattattaatgctgatcgggagtcccacactcatgtctctgtagtgattagtttctgtcgacattgtggagatgatattgctggacttgtaccaaggaaagtaaagagtgctgcagagaagtttaatttgagttttcctcctagtgagataattagtccagagaaacaacagcccttccagaatcttttaaaagagtactttacgtctttgaccaaacacctgaaaagggaccacagggagctccagaatactgagagacaaaacaggcgcattctacattctaaaggggagctcagtgaagatagacataaacagtatgaggaatttgctatgtcttaccagaagctgctggcaaattctcaatccttagcagaccttttggatgaaaatatgccagatcttcctcaagacaaaccaacaccagaagaacatgggcctggaattgatatattcacacctggtaaacctggagaatatgacttggaaggtggtatatgggaagatgaagatgctcggaatttttatgagaacctcattgatttgaaggcttttgtcccagccatcttgtttaaagacaatgaaaaaagttgtcagaataaagagtccaacaaagatgataccaaagaggcaaaagaatctaaggagaataaggaggtatcaagtcccgatgatttggaacttgagttggagaatctagaaattaatgatgacaccttagaattagagggtggagatgaagctgaagatcttacaaagaaacttcttgatgaacaagaacaagaagatgaggaagccagcactggatctcatctcaagctcatagtagatgctttcctacagcagttacccaactgtgtcaaccgagatctgatagacaaggcagcaatggatttttgcatgaacatgaacacaaaagcaaacaggaagaagttggtacgggcactcttcatagttcctagacaaaggttggatttgctaccattttatgcaagattggttgctacattgcatccctgcatgtctgatgtagcagaggatctttgttccatgctgaggggggatttcagatttcatgtacggaaaaaggaccagatcaatattgaaacaaagaataaaactgttcgttttataggagaactaactaagtttaagatgttcaccaaaaatgacacactgcattgtttaaagatgcttctgtcagacttctctcatcaccatattgaaatggcatgcaccctgctggagacatgtggacggtttcttttcagatctccagaatctcacctgaggaccagtgtacttttggagcaaatgatgagaaagaagcaagcaatgcatcttgatgcgagatacgtcacaatggtagagaatgcatattactactgcaacccacctccagctgaaaaaaccgtgaaaaagaaacgtcctcctctccaggaatatgtccggaaacttttgtacaaggatctctctaaggttaccaccgagaaggttttgagacagatgcgaaagctgccctggcaggaccaagaagtgaaagactatgttatttgttgtatgataaacatctggaatgtgaaatataatagtattcattgtgtagccaacctcttagcaggactagtgctctaccaagaggatgttgggatccacgttgtggatggagtgttagaagatattcgattaggaatggaggttaatcaacctaaatttaatcagaggcgcatcagcagtgccaagttcttaggagaactttacaattaccgaatggtggaatcagctgttattttcagaactctgtattcttttacctcatttggtgttaatcctgatggctctccaagttccctggacccacctgagcatcttttcagaattagactcgtatgcactattctggacacatgtggccagtactttgacagaggttccagtaaacgaaaacttgattgtttccttgtatattttcagcgttatgtttggtggaagaaaagtttggaggtttggacaaaagaccatccatttcctattgatatagattacatgatcagtgatacactagaactgctaagaccaaagatcaaactctgtaattctctggaagaatccatcaggcaggtacaagacttggaacgagaattcttaataaaactaggcctagtaaatgacaaagactcaaaagattctatgacagaaggagaaaatcttgaagaggatgaagaagaagaagaaggtggggctgaaacagaagaacaatctggaaatgaaagtgaagtaaatgagccagaagaagaggagggttctgataatgatgatgatgagggagaagaagaggaggaagagaatacagattaccttacagattccaataaggaaaatgaaaccgatgaagagaatactgaggtaatgattaaaggcggtggacttaagcatgtaccttgtgtagaagatgaggacttcattcaagctctggataaaatgatgctagaaaatctacagcaacgaagtggtgaatctgttaaagtgcaccaactagatgttgccattcctttgcatctcaaaagccagctgaggaaagggcccccactgggaggtggggaaggagaggctgagtctgcagacacaatgccgtttgtcatgttaacaagaaaaggcaataaacagcagtttaagatccttaatgtacccatgtcctctcaacttgctgcaaatcactggaaccagcaacaggcagaacaagaagagaggatgagaatgaaaaatgttgcagtctcttgcacagcgcccagctccagcaaacaccaatcgtgagaggcggcctcgctaccaacatccgaagggagcacctaatgcagatctaatctttaagactggtgggagaggaccttgatccagcagtccgtgccaattcattaggtccttgatcctgatcgttgcgctaagcgtcatcctttcagaaatgccn

SEQ ID NO: 291369 - DNA, 2726 bp, Homo sapiens
ggtggggggaggggaggggagagcccgagcgctggagttggtgctgggaaacccggggctaatgttgacaacaggctcgagattgtcctgggtcacataatgccagctgagcgtaaaaagccagcaagtatggaagaaaaagactctttaccaaacaacaaggaaaaagactgcagtgaaaggcggacagtgagcagcaaggagaggccaaaagacgatatcaagctcactgccaagaaggaggtcagcaaggcccctgaagacaagaagaagagactggaagatgataagagaaaaaaggaagacaaggaacgcaagaaaaaagacgaagaaaaggtgaaggcagaggaagaatcaaagaaaaaagaagaggaagaaaaaaagaaacatcaagaggaagagagaaagaagcaagaagagcaggccaaacgtcagcaagaagaagaagcagctgctcagatgaaagaaaaagaagaatccattcagcttcatcaggaagcttgggaacgacatcatttaagaaaggaacttcgtagcaaaaaccaaaatgctccggacagccgaccagaggaaaacttcttcagccgcctcgactcaagtttgaagaaaaatactgcttttgtcaagaaactaaaaactattacagaacaacagagagactccttgtcccatgattttaatggcctaaatttaagcaaatacattgcagaagctgtagcttccatcgtggaagcaaaactaaaaatctctgatgtgaactgtgctgtgcacctctgctctctctttcaccagcgttatgctgactttgccccatcacttcttcaggtctggaaaaaacattttgaagcaaggaaagaggagaaaacacctaacatcaccaagttaagaactgatttgcgttttattgcagaattgacaatagttgggattttcactgacaaggaaggtctttccttaatctatgaacagctaaaaaatattattaatgctgatcgggagtcccacactcatgtctctgtagtgattagtttctgtcgacattgtggagatgatattgctggacttgtaccaaggaaagtaaagagtgctgcagagaagtttaatttgagttttcctcctagtgagataattagtccagagaaacaacagcccttccagaatcttttaaaagagtactttacgtctttgaccaaacacctgaaaagggaccacagggagctccagaatactgagagacaaaacaggcgcattctacattctaaaggggagctcagtgaagatagacataaacagtatgaggaatttgctatgtcttaccagaagctgctggcaaattctcaatccttagcagaccttttggatgaaaatatgccagatcttcctcaagacaaaccaacaccagaagaacatgggcctggaattgatatattcacacctggtaaacctggagaatatgacttggaaggtggtatatgggaagatgaagatgctcggaatttttatgagaacctcattgatttgaaggcttttgtcccagccatcttgtttaaagacaatgaaaaaagttgtcagaataaagagtccaacaaagatgataccaaagaggcaaaagaatctaaggagaataaggaggtatcaagtcccgatgatttggaacttgagttggagaatctagaaattaatgatgacaccttagaattagagggtggagatgaagctgaagatcttacaaagaaacttcttgatgaacaagaacaagaagatgaggaagccagcactggatctcatctcaagctcatagtagatgctttcctacagcagttacccaactgtgtcaaccgagatctgatagacaaggcagcaatggatttttgcatgaacatgaacacaaaagcaaacaggaagaagttggtacgggcactcttcatagttcctagacaaaggttggatttgctaccattttatgcaagattggttgctacattgcatccctgcatgtctgatgtagcagaggatctttgttccatgctgaggggggatttcagatttcatgtacggaaaaaggaccagatcaatattgaaacaaagaataaaactgttcgttttataggagaactaactaagtttaagatgttcaccaaaaatgacacactgcattgtttaaagatgcttctgtcagacttctctcatcaccatattgaaatggcatgcaccctgctggagacatgtggacggtttcttttcagatctccagaatctcacctgaggaccagtgtacttttggagcaaatgatgagaaagaagcaagcaatgcatcttgatgcgagatacgtcacaatggtagagaatgcatattactactgcaacccacctccagctgaaaaaaccgtgaaaaagaaacgtcctcctctccaggaatatgtccggaaacttttgtacaaggatctctctaaggttaccaccgagaaggttttgagacagatgcgaaagctgccctggcaggaccaagaagtgaaagactatgttatttgttgtatgataaacatctggaatgtgaaatataatagtattcattgtgtagccaacctcttagcaggactagtgctctaccaagaggatgttgggatccacgttgtggatggagtgttagaagatattcgattaggaatggagtatcaaccctaaatttaatcagagcacagatgcagtcgggtccgagctcgatc

SEQ ID NO: 291370 - DNA, 193 bp, Homo sapiens
caaacgtcagcaagaagaagaagcagctgctcagatgaagtaaggcagttgattgtatttattgatgtgagggaatgggaagattggaatattttgggaaaaaaacattatttgaaatatagcgtcctgggtgcagctctttaagaattgggagtatcttaatttacttgttctgttagtttcactgactaga

SEQ ID NO: 291371 - DNA, 306 bp, Homo sapiens
tactttacgtctttgaccaaacacctgaaaagggaccacagggagctccagaatactgagagacaaaacaggtgattttcaaatgtttctcagagttgagaatttattttggagctcatacttaaaaatgtttaaagtcttcatgccactgaaagaacttatggaaaagggctccttacaggtgatttcttaacattccaggaaaatttcaaagtagaacagtctgagtactcatgttttaatgtgagtctacgatagattttgtttctgattttaaaaaaatctgccaagtagatggtgattttt

SEQ ID NO: 291372 - DNA, 5193 bp, Homo sapiens
ggtggggggaggggaggggagagcccgagcgctggagttggtgctgggaaacccggggctaatgttgacaacaggctcgagattgtcctgggtcacataatgccagctgagcgtaaaaagccagcaagtatggaagaaaaagactctttaccaaacaacaaggaaaaagactgcagtgaaaggcggacagtgagcagcaaggagaggccaaaagacgatatcaagctcactgccaagaaggaggtcagcaaggcccctgaagacaagaagaagagactggaagatgataagagaaaaaaggaagacaaggaacgcaagaaaaaagacgaagaaaaggtgaaggcagaggaagaatcaaagaaaaaagaagaggaagaaaaaaagaaacatcaagaggaagagagaaagaagcaagaagagcaggccaaacgtcagcaagaagaagaagcagctgctcagatgaaagaaaaagaagaatccattcagcttcatcaggaagcttgggaacgacatcatttaagaaaggaacttcgtagcaaaaaccaaaatgctccggacagccgaccagaggaaaacttcttcagccgcctcgactcaagtttgaagaaaaatactgcttttgtcaagaaactaaaaactattacagaacaacagagagactccttgtcccatgattttaatggcctaaatttaagcaaatacattgcagaagctgtagcttccatcgtggaagcaaaactaaaaatctctgatgtgaactgtgctgtgcacctctgctctctctttcaccagcgttatgctgactttgccccatcacttcttcaggtctggaaaaaacattttgaagcaaggaaagaggagaaaacacctaacatcaccaagttaagaactgatttgcgttttattgcagaattgacaatagttgggattttcactgacaaggaaggtctttccttaatctatgaacagctaaaaaatattattaatgctgatcgggagtcccacactcatgtctctgtagtgattagtttctgtcgacattgtggagatgatattgctggacttgtaccaaggaaagtaaagagtgctgcagagaagtttaatttgagttttcctcctagtgagataattagtccagagaaacaacagcccttccagaatcttttaaaagagtactttacgtctttgaccaaacacctgaaaagggaccacagggagctccagaatactgagagacaaaacaggcgcattctacattctaaaggggagctcagtgaagatagacataaacagtatgaggaatttgctatgtcttaccagaagctgctggcaaattctcaatccttagcagaccttttggatgaaaatatgccagatcttcctcaagacaaaccaacaccagaagaacatgggcctggaattgatatattcacacctggtaaacctggagaatatgacttggaaggtggtatatgggaagatgaagatgctcggaatttttatgagaacctcattgatttgaaggcttttgtcccagccatcttgtttaaagacaatgaaaaaagttgtcagaataaagagtccaacaaagatgataccaaagaggcaaaagaatctaaggagaataaggaggtatcaagtcccgatgatttggaacttgagttggagaatctagaaattaatgatgacaccttagaattagagggtggagatgaagctgaagatcttacaaagaaacttcttgatgaacaagaacaagaagatgaggaagccagcactggatctcatctcaagctcatagtagatgctttcctacagcagttacccaactgtgtcaaccgagatctgatagacaaggcagcaatggatttttgcatgaacatgaacacaaaagcaaacaggaagaagttggtacgggcactcttcatagttcctagacaaaggttggatttgctaccattttatgcaagattggttgctacattgcatccctgcatgtctgatgtagcagaggatctttgttccatgctgaggggggatttcagatttcatgtacggaaaaaggaccagatcaatattgaaacaaagaataaaactgttcgttttataggagaactaactaagtttaagatgttcaccaaaaatgacacactgcattgtttaaagatgcttctgtcagacttctctcatcaccatattgaaatggcatgcaccctgctggagacatgtggacggtttcttttcagatctccagaatctcacctgaggaccagtgtacttttggagcaaatgatgagaaagaagcaagcaatgcatcttgatgcgagatacgtcacaatggtagagaatgcatattactactgcaacccacctccagctgaaaaaaccgtgaaaaagaaacgtcctcctctccaggaatatgtccggaaacttttgtacaaggatctctctaaggttaccaccgagaaggttttgagacagatgcgaaagctgccctggcaggaccaagaagtgaaagactatgttatttgttgtatgataaacatctggaatgtgaaatataatagtattcattgtgtagccaacctcttagcaggactagtgctctaccaagaggatgttgggatccacgttgtggatggagtgttagaagatattcgattaggaatggaggttaatcaacctaaatttaatcagaggcgcatcagcagtgccaagttcttaggagaactttacaattaccgaatggtggaatcagctgttattttcagaactctgtattcttttacctcatttggtgttaatcctgatggctctccaagttccctggacccacctgagcatcttttcagaattagactcgtatgcactattctggacacatgtggccagtactttgacagaggttccagtaaacgaaaacttgattgtttccttgtatattttcagcgttatgtttggtggaagaaaagtttggaggtttggacaaaagaccatccatttcctattgatatagattacatgatcagtgatacactagaactgctaagaccaaagatcaaactctgtaattctctggaagaatccatcaggcaggtacaagacttggaacgagaattcttaataaaactaggcctagtaaatgacaaagactcaaaagattctatgacagaaggagaaaatcttgaagaggatgaagaagaagaagaaggtggggctgaaacagaagaacaatctggaaatgaaagtgaagtaaatgagccagaagaagaggagggttctgataatgatgatgatgagggagaagaagaggaggaagagaatacagattaccttacagattccaataaggaaaatgaaaccgatgaagagaatactgaggtaatgattaaaggcggtggacttaagcatgtaccttgtgtagaagatgaggacttcattcaagctctggataaaatgatgctagaaaatctacagcaacgaagtggtgaatctgttaaagtgcaccaactagatgttgccattcctttgcatctcaaaagccagctgaggaaagggcccccactgggaggtggggaaggagaggctgagtctgcagacacaatgccgtttgtcatgttaacaagaaaaggcaataaacagcagtttaagatccttaatgtacccatgtcctctcaacttgctgcaaatcactggaaccagcaacaggcagaacaagaagagaggatgagaatgaaaaagctcacactagatatcaatgaacggcaagaacaagaagattatcaagaaatgttgcagtctcttgcacagcgcccagctccagcaaacaccaatcgtgagaggcggcctcgctaccaacatccgaagggagcacctaatgcagatctaatctttaagactggtgggaggagacgttgatccagcagcacgtgtcatttcattaggtcctgtatctgatgttgtggttagtggagtcctccagcaattgaatgagagcagtggacacatctcagcaggtcggtctagagagttgcgaatctaaacctgggacaggctggggccaggaggcagaaacaccagcctctgccaacaccggaacaagccgacgcttccagacaaggcggaaaaggccttttgtaatggaaatctcgcgagggttaatcttctcttgagaatggcagtcaagaaatgagatggttcacttgactactgagcagttacaccaaggagagcgtgaaggagatgattgagccagagaagaaacgggttgtgatggtaatggtgtgggggaaatgaacttgagctttaaacttgatttgagtttcagtgtctctgaattgaacatcccacgttggaagaagatacatttgggggctccaggactacagtagaaaagtatagagcaagcaggaaaatcttctagtaaaacttacatgcaggacaacaaaatgatgaaagatatccaaataccagataatccaccaggaaggcttttgtttaggaatttgtttcaagaggaacaagggatgagggagaaaaatccgttttatccatcagagtcagtgctataaaattgcctattaaggtaaaagaaaaatgtggagactattttactatacagagagcattaattcagatggcttagaaaagtgataccagcccaagaacagggatctaggtgagcccattgtaagtatcattgaaaacaaaacatgcccgtcaacatgtcacagaaaacgaacgaaggacaacaagaagtggatgagaatattttgttgaccttcatgggtttacagcctctgtctctaaacaaagtatggaaacaagtagagcttttattttgcttttgtttttgttttgttttttttttgttttcccccactaaatagaaatgagggtccttagtctgtttctgacaatctgttaatttcttaggacagctgtctttggtttgctttccagcaggcgtagtatatttagtcggagagcacatctgtatgcgacaacttgattacatctttttttctagctattttgcattttttcttttaccatgtttcagtttctgcatgtagatttaaataaaaaacaaaacttgtaaagttgtaacatttcacatggaaatgctgcccaatcttcaccagcttcagaaatctgacctttgccgatgctgcaataaagtgttgtaattta

SEQ ID NO: 291373 - DNA, 535 bp, Homo sapiens
gctggtagtggctaccttacgtattgccagtctgaaaaattcgctcttctcatcgactggggaatttgaaagagctgttaagtgaatggcactcatatgagcctttgccccggacccgccaccccagagtcaagctgagggcatcggcatgccgcagggaagacgatcaggactgtttttaatcgggcagtcgcgcggatggccttttccctctcgcctccttccgccccgcccccactctcagcccggccgcgctgattgtcctgggtcacataatgccagctgagcgtaaaaagccagcaagtatggaagaaaaagactctttaccaaacaacaaggaaaaagactgcagtgaaaggcggacagtgagcagcaaggagaggccaaaagacgatatcaagctcactgccaagaaggaggtcagcaaggcccctgaagacaagaagaagagactggaagatgataagagaaaaaagggtgatgcggccgaaactcccacctcccacaaaaatggactgggctgccagacgcaact

SEQ ID NO: 291374 - DNA, 5514 bp, Homo sapiens
gctgaaatactgacattgaatattatatgaaatagtgaactgccatctttcatggttgtcaaatgctagggttaaagctgactcaaaatgttcacagatatattctgaagtatttacaattaaatgacatattgttttggagttgatagtggctgaatctgagtgatgggtacgtggaggttccttatattatgctctctacttttgtctgggcttggatttttccttataaaaagtaaaaaacaagtacttagacataggcctaactaataatgataggatgtggaatgtgatgaataacttattttgtaacagaaatagtattcattttacctgcctttatttactcttttacaattgccaagttgcattaatatgttctgtttaaaaaaatagtgtgatatcattttaaaaagtcactgcatctatggtactgacattctttccctcttacagattgtcctgggtcacataatgccagctgagcgtaaaaagccagcaagtatggaagaaaaagactctttaccaaacaacaaggaaaaagactgcagtgaaaggcggacagtgagcagcaaggagaggccaaaagacgatatcaagctcactgccaagaaggaggtcagcaaggcccctgaagacaagaagaagagactggaagatgataagagaaaaaaggaagacaaggaacgcaagaaaaaagacgaagaaaaggtgaaggcagaggaagaatcaaagaaaaaagaagaggaagaaaaaaagaaacatcaagaggaagagagaaagaagcaagaagagcaggccaaacgtcagcaagaagaagaagcagctgctcagatgaaagaaaaagaagaatccattcagcttcatcaggaagcttgggaacgacatcatttaagaaaggaacttcgtagcaaaaaccaaaatgctccggacagccgaccagaggaaaacttcttcagccgcctcgactcaagtttgaagaaaaatactgcttttgtcaagaaactaaaaactattacagaacaacagagagactccttgtcccatgattttaatggcctaaatttaagcaaatacattgcagaagctgtagcttccatcgtggaagcaaaactaaaaatctctgatgtgaactgtgctgtgcacctctgctctctctttcaccagcgttatgctgactttgccccatcacttcttcaggtctggaaaaaacattttgaagcaaggaaagaggagaaaacacctaacatcaccaagttaagaactgatttgcgttttattgcagaattgacaatagttgggattttcactgacaaggaaggtctttccttaatctatgaacagctaaaaaatattattaatgctgatcgggagtcccacactcatgtctctgtagtgattagtttctgtcgacattgtggagatgatattgctggacttgtaccaaggaaagtaaagagtgctgcagagaagtttaatttgagttttcctcctagtgagataattagtccagagaaacaacagcccttccagaatcttttaaaagagtactttacgtctttgaccaaacacctgaaaagggaccacagggagctccagaatactgagagacaaaacaggcgcattctacattctaaaggggagctcagtgaagatagacataaacagtatgaggaatttgctatgtcttaccagaagctgctggcaaattctcaatccttagcagaccttttggatgaaaatatgccagatcttcctcaagacaaaccaacaccagaagaacatgggcctggaattgatatattcacacctggtaaacctggagaatatgacttggaaggtggtatatgggaagatgaagatgctcggaatttttatgagaacctcattgatttgaaggcttttgtcccagccatcttgtttaaagacaatgaaaaaagttgtcagaataaagagtccaacaaagatgataccaaagaggcaaaagaatctaaggagaataaggaggtatcaagtcccgatgatttggaacttgagttggagaatctagaaattaatgatgacaccttagaattagagggtggagatgaagctgaagatcttacaaagaaacttcttgatgaacaagaacaagaagatgaggaagccagcactggatctcatctcaagctcatagtagatgctttcctacagcagttacccaactgtgtcaaccgagatctgatagacaaggcagcaatggatttttgcatgaacatgaacacaaaagcaaacaggaagaagttggtacgggcactcttcatagttcctagacaaaggttggatttgctaccattttatgcaagattggttgctacattgcatccctgcatgtctgatgtagcagaggatctttgttccatgctgaggggggatttcagatttcatgtacggaaaaaggaccagatcaatattgaaacaaagaataaaactgttcgttttataggagaactaactaagtttaagatgttcaccaaaaatgacacactgcattgtttaaagatgcttctgtcagacttctctcatcaccatattgaaatggcatgcaccctgctggagacatgtggacggtttcttttcagatctccagaatctcacctgaggaccagtgtacttttggagcaaatgatgagaaagaagcaagcaatgcatcttgatgcgagatacgtcacaatggtagagaatgcatattactactgcaacccacctccagctgaaaaaaccgtgaaaaagaaacgtcctcctctccaggaatatgtccggaaacttttgtacaaggatctctctaaggttaccaccgagaaggttttgagacagatgcgaaagctgccctggcaggaccaagaagtgaaagactatgttatttgttgtatgataaacatctggaatgtgaaatataatagtattcattgtgtagccaacctcttagcaggactagtgctctaccaagaggatgttgggatccacgttgtggatggagtgttagaagatattcgattaggaatggaggttaatcaacctaaatttaatcagaggcgcatcagcagtgccaagttcttaggagaactttacaattaccgaatggtggaatcagctgttattttcagaactctgtattcttttacctcatttggtgttaatcctgatggctctccaagttccctggacccacctgagcatcttttcagaattagactcgtatgcactattctggacacatgtggccagtactttgacagaggttccagtaaacgaaaacttgattgtttccttgtatattttcagcgttatgtttggtggaagaaaagtttggaggtttggacaaaagaccatccatttcctattgatatagattacatgatcagtgatacactagaactgctaagaccaaagatcaaactctgtaattctctggaagaatccatcaggcaggtacaagacttggaacgagaattcttaataaaactaggcctagtaaatgacaaagactcaaaagattctatgacagaaggagaaaatcttgaagaggatgaagaagaagaagaaggtggggctgaaacagaagaacaatctggaaatgaaagtgaagtaaatgagccagaagaagaggagggttctgataatgatgatgatgagggagaagaagaggaggaagagaatacagattaccttacagattccaataaggaaaatgaaaccgatgaagagaatactgaggtaatgattaaaggcggtggacttaagcatgtaccttgtgtagaagatgaggacttcattcaagctctggataaaatgatgctagaaaatctacagcaacgaagtggtgaatctgttaaagtgcaccaactagatgttgccattcctttgcatctcaaaagccagctgaggaaagggcccccactgggaggtggggaaggagaggctgagtctgcagacacaatgccgtttgtcatgttaacaagaaaaggcaataaacagcagtttaagatccttaatgtacccatgtcctctcaacttgctgcaaatcactggaaccagcaacaggcagaacaagaagagaggatgagaatgaaaaagctcacactagatatcaatgaacggcaagaacaagaagattatcaagaaatgttgcagtctcttgcacagcgcccagctccagcaaacaccaatcgtgagaggcggcctcgctaccaacatccgaagggagcacctaatgcagatctaatctttaagactggtgggaggagacgttgatccagcagcacgtgtcatttcattaggtcctgtatctgatgttgtggttagtggagtcctccagcaattgaatgagagcagtggacacatctcagcaggtcggtctagagagttgcgaatctaaacctgggacaggctggggccaggaggcagaaacaccagcctctgccaacaccggaacaagccgacgcttccagacaaggcggaaaaggccttttgtaatggaaatctcgcgagggttaatcttctcttgagaatggcagtcaagaaatgagatggttcacttgactactgagcagttacaccaaggagagcgtgaaggagatgattgagccagagaagaaacgggttgtgatggtaatggtgtgggggaaatgaacttgagctttaaacttgatttgagtttcagtgtctctgaattgaacatcccacgttggaagaagatacatttgggggctccaggactacagtagaaaagtatagagcaagcaggaaaatcttctagtaaaacttacatgcaggacaacaaaatgatgaaagatatccaaataccagataatccaccaggaaggcttttgtttaggaatttgtttcaagaggaacaagggatgagggagaaaaatccgttttatccatcagagtcagtgctataaaattgcctattaaggtaaaagaaaaatgtggagactattttactatacagagagcattaattcagatggcttagaaaagtgataccagcccaagaacagggatctaggtgagcccattgtaagtatcattgaaaacaaaacatgcccgtcaacatgtcacagggtttacagcctctgtctctaaacaaagtatggaaacaagtagagcttttattttgcttttgtttttgttttgttttttttttgttttcccccactaaatagaaatgagggtccttagtctgtttctgacaatctgttaatttcttaggacagctgtctttggtttgctttccagcaggcgtagtatatttagtcggagagcacatctgtatgcgacaacttgattacatctttttttctagctattttgcattttttcttttaccatgtttcagtttctgcatgtagatttaaataaaaaacaaaacttgtaaagttgtaacatttcacatggaaatgctgcccaatcttcaccagcttcagaaatctgacctttgccgatgctgcaataaagtgttgtaattta

SEQ ID NO: 291375 - DNA, 3989 bp, Homo sapiens
ggtggggggaggggaggggagagcccgagcgctggagttggtgctgggaaacccggggctaatgttgacaacaggctcgagattgtcctgggtcacataatgccagctgagcgtaaaaagccagcaagtatggaagaaaaagactctttaccaaacaacaaggaaaaagactgcagtgaaaggcggacagtgagcagcaaggagaggccaaaagacgatatcaagctcactgccaagaaggaggtcagcaaggcccctgaagacaagaagaagagactggaagatgataagagaaaaaaggaagacaaggaacgcaagaaaaaagacgaagaaaaggtgaaggcagaggaagaatcaaagaaaaaagaagaggaagaaaaaaagaaacatcaagaggaagagagaaagaagcaagaagagcaggccaaacgtcagcaagaagaagaagcagctgctcagatgaaagaaaaagaagaatccattcagcttcatcaggaagcttgggaacgacatcatttaagaaaggaacttcgtagcaaaaaccaaaatgctccggacagccgaccagaggaaaacttcttcagccgcctcgactcaagtttgaagaaaaatactgcttttgtcaagaaactaaaaactattacagaacaacagagagactccttgtcccatgattttaatggcctaaatttaagcaaatacattgcagaagctgtagcttccatcgtggaagcaaaactaaaaatctctgatgtgaactgtgctgtgcacctctgctctctctttcaccagcgttatgctgactttgccccatcacttcttcaggtctggaaaaaacattttgaagcaaggaaagaggagaaaacacctaacatcaccaagttaagaactgatttgcgttttattgcagaattgacaatagttgggattttcactgacaaggaaggtctttccttaatctatgaacagctaaaaaatattattaatgctgatcgggagtcccacactcatgtctctgtagtgattagtttctgtcgacattgtggagatgatattgctggacttgtaccaaggaaagtaaagagtgctgcagagaagtttaatttgagttttcctcctagtgagataattagtccagagaaacaacagcccttccagaatcttttaaaagagtactttacgtctttgaccaaacacctgaaaagggaccacagggagctccagaatactgagagacaaaacaggcgcattctacattctaaaggggagctcagtgaagatagacataaacagtatgaggaatttgctatgtcttaccagaagctgctggcaaattctcaatccttagcagaccttttggatgaaaatatgccagatcttcctcaagacaaaccaacaccagaagaacatgggcctggaattgatatattcacacctggtaaacctggagaatatgacttggaaggtggtatatgggaagatgaagatgctcggaatttttatgagaacctcattgatttgaaggcttttgtcccagccatcttgtttaaagacaatgaaaaaagttgtcagaataaagagtccaacaaagatgataccaaagaggcaaaagaatctaaggagaataaggaggtatcaagtcccgatgatttggaacttgagttggagaatctagaaattaatgatgacaccttagaattagagggtggagatgaagctgaagatcttacaaagaaacttcttgatgaacaagaacaagaagatgaggaagccagcactggatctcatctcaagctcatagtagatgctttcctacagcagttacccaactgtgtcaaccgagatctgatagacaaggcagcaatggatttttgcatgaacatgaacacaaaagcaaacaggaagaagttggtacgggcactcttcatagttcctagacaaaggttggatttgctaccattttatgcaagattggttgctacattgcatccctgcatgtctgatgtagcagaggatctttgttccatgctgaggggggatttcagatttcatgtacggaaaaaggaccagatcaatattgaaacaaagaataaaactgttcgttttataggagaactaactaagtttaagatgttcaccaaaaatgacacactgcattgtttaaagatgcttctgtcagacttctctcatcaccatattgaaatggcatgcaccctgctggagacatgtggacggtttcttttcagatctccagaatctcacctgaggaccagtgtacttttggagcaaatgatgagaaagaagcaagcaatgcatcttgatgcgagatacgtcacaatggtagagaatgcatattactactgcaacccacctccagctgaaaaaaccgtgaaaaagaaacgtcctcctctccaggaatatgtccggaaacttttgtacaaggatctctctaaggttaccaccgagaaggttttgagacagatgcgaaagctgccctggcaggaccaagaagtgaaagactatgttatttgttgtatgataaacatctggaatgtgaaatataatagtattcattgtgtagccaacctcttagcaggactagtgctctaccaagaggatgttgggatccacgttgtggatggagtgttagaagatattcgattaggaatggaggttaatcaacctaaatttaatcagaggcgcatcagcagtgccaagttcttaggagaactttacaattaccgaatggtggaatcagctgttattttcagaactctgtattcttttacctcatttggtgttaatcctgatggctctccaagttccctggacccacctgagcatcttttcagaattagactcgtatgcactattctggacacatgtggccagtactttgacagaggttccagtaaacgaaaacttgattgtttccttgtatattttcagcgttatgtttggtggaagaaaagtttggaggtttggacaaaagaccatccatttcctattgatatagattacatgatcagtgatacactagaactgctaagaccaaagatcaaactctgtaattctctggaagaatccatcaggcaggtacaagacttggaacgagaattcttaataaaactaggcctagtaaatgacaaagactcaaaagattctatgacagaaggagaaaatcttgaagaggatgaagaagaagaagaaggtggggctgaaacagaagaacaatctggaaatgaaagtgaagtaaatgagccagaagaagaggagggttctgataatgatgatgatgagggagaagaagaggaggaagagaatacagattaccttacagattccaataaggaaaatgaaaccgatgaagagaatactgaggtaatgattaaaggcggtggacttaagcatgtaccttgtgtagaagatgaggacttcattcaagctctggataaaatgatgctagaaaatctacagcaacgaagtggtgaatctgttaaagtgcaccaactagatgttgccattcctttgcatctcaaaagccagctgaggaaagggcccccactgggaggtggggaaggagaggctgagtctgcagacacaatgccgtttgtcatgttaacaagaaaaggcaataaacagcagtttaagatccttaatgtacccatgtcctctcaacttgctgcaaatcactggaaccagcaacaggcagaacaagaagagaggatgagaatgaaacagaactagaattagtggaacaagaagatgtgactgaattgctgcaatctcatgaccaagctttcacagatgaggagttgctaattacagataaacacacaaaggtggttcttgatatggaatctactcctggtgaagatgctgtgaacacagtttaaatgacaacaaaggatttagaatattacataaactttattgataaaggagcaaccaggcttgagaggactggcttaaattttgaaagaagtttt

SEQ ID NO: 291376 - DNA, 1063 bp, Homo sapiens
agcggattcttgggcccgctgagcgtgggggcaggccgctggaatttgacccgagtgggccgcgatcggccgaggatttggggtaccctttgacccaggcggggcgcgatccgcctaggatttggggtcccctggcgccgaaccctgagttgccagatgtagcaagtaaaagtacagttcttctaaatttgaatttcagacaagacaggttttagggttcgtctcatgtaatgttgagaaggtgagggcggcgcctgggcggattcttctccgttccagaatccctttctcttttcaaaccgcattacagcccgagttaaattctttaacctactcctctctgcttaccctcataaggtttacggccgtatcaggctacggccgcagcctacggctgtttgattccccttttggccacaagaaagttttattcgaactacttgctttcctttatcaagaaaatggcaacgcacacacatacatgcacacacaaataaaaacacaaagctacgtttttcaggttttgttctagatcgtgtttgtggctgtgttcttcaggatattttccctcaccttgaggatttccctcatctacctttctttgggagatacgactgaaaccaacaaaagccaagtttggtaaataagaagtttaaacaagtgcttctctgtacagctcatccacttcctcatctgtaaaccgatcccccatggttgtcagcagctctctcaagtaatcttcctgtatggtgcctggagaataaagaacaagggatcagaatacatactattctgagggttaattacaaagaatatctatacttgactaagcatgttctgtatgttacaaactataaacatgcaaatatatgaactacagggtgtccacctacttaaaacagcctcagcagagaagtgcctagaaaaatgcctagctgcttagcagcactgctccgctctatcatttgctctatcattctgcctccacattcagcttctgatctcttgataagagagactaaacctatgcctaaacaaagtaataaaaagtatggttaaagaa

SEQ ID NO: 291377 - DNA, 725 bp, Homo sapiens
agcggattcttgggcccgctgagcgtgggggcaggccgctggaatttgacccgagtgggccgcgatcggccgaggatttggggtaccctttgacccaggcggggcgcgatccgcctaggatttggggtcccctggcgccgaaccctgagttgccagatgtagcaagtaaaagtacagttcttctaaatttgaatttcagacaagacaggttttagggttcgtctcatgtaatgttgagaaggatttccctcatctacctttctttgggagatacgactgaaaccaacaaaagccaagtttggtaaataagaagtttaaacaagtgcttctctgtacagctcatccacttcctcatctgtaaaccgatcccccatggttgtcagcagctctctcaagtaatcttcctgtatggtgcctggagaataaagaacaagggatcagaatacatactattctgagggttaattacaaagaatatctatacttgactaagcatgttctgtatgttacaaactataaacatgcaaatatatgaactacagggtgtccacctacttaaaacagcctcagcagagaagtgcctagaaaaatgcctagctgcttagcagcactgctccgctctatcatttgctctatcattctgcctccacattcagcttctgatctcttgataagagagactaaacctatgcctaaacaaagtaataaaaagtatggttaaagaa

SEQ ID NO: 291378 - DNA, 538 bp, Homo sapiens
gtattttatcataaagtttaattatgattcagaaaaaatcgagcgaataactttctctgaaaaaatatattgactctgtatagaccacagttattgggggagaagggctggtaggttaaattatcctattttttattctgaaaatgatattaatagaaagtcccgtttccagtctgattataaagatacatatgcccaaaatggctgagaataaatacaacaggaaatgcaaaagctgtaaagctaagggcatgcaagagaaaatctcagaatacccaaagtggcaacaaggaacgtttggctggaatttgaagttatttcagtcatctttgtctttggctccatgtttcaggatgcgtgtgaactcgatgtaattgaaattcccctttttatcaataggtgcttctctgtacagctcatccacttcctcatctgtaaaccgatcccccatggttgtcaggaaagtggctaagggggcattgtctcagtggctctcgtttgggggctcatggggagggtagcaccaggcatagccact

SEQ ID NO: 291379 - DNA, 807 bp, Homo sapiens
cgcggccgctcgcgcgcagccccgcacctccgcccctgcctctgcctcctgggccatgccctgctgtttacatgccggtgaggtccccggccgctccgaacccctccgagccccggctccccgagggtgaagcccgccggcccgcgaactggactggtggatctctcagacctggggccccggactccgatctccgccgtctccgccaccatcagggcgggatccggctctggtgttttgaggagggggtgtggtgtagggaaaggaatcccgtccctctccaccttttttcgccttcggggcttcagactcagggaactcgctcatggctttcttgatgaagaagaagaaattcaaattccaaactactttcaccctggaggagctgactgcggttcccttcgtgaacggggtcctcttctgcaaggtccggctgctggatggaggggattttgtcagcttgtcgtcaaggagctgaaaggcgggaaggcttattccaaggtaagaggggctgtgtgaaggggcagtgggatggaatggggggtggcatgggacaggcacaagggaagcctccagccccttttctgccacaagcaagaggcactcagccctacctgagatgtgttattttttagaaatatctttattgatggtctttgcactcaatataaaggcagcatatggttgttgcaatataaatggtacagaagtccacagagcaaaagggccagtttctgtcccctttcctctctccaggcctctttctgggaccccattattggatagattaagacctttccagacctt

SEQ ID NO: 291380 - DNA, 494 bp, Homo sapiens
tcgggtgggggtgagggggcggtgagcaagaaggaaactgaggggctggcttccttatgggtttgtaaacacacccctccctggccccctctgaaaatgaggaagcatcttggggaaagaaaccaatctggttgggagcgagatcacagcagagctacatgctgagccccgagagtccccgactccagggctgggcctgggctcggcagggaaaggagctgaccaggtttcctgacttcccactgccctcttggtcaccctcacatccctctgagcctcagtttcttcacctgtcaagtggggcaggatgcagtgactccctgccgaggtgatcttctgcacgatgaggtgatcttctgcacgataaggtgatcttctgcacgatgaggtgatcttctgcacgataaggtgatcttctgcacgatgaggtgatctactgcacgataaggtgatctgaggtgatcttctgcacgataaggtgatcttctgcacga

SEQ ID NO: 291381 - DNA, 4559 bp, Homo sapiens
cgcggccgctcgcgcgcagccccgcacctccgcccctgcctctgcctcctgggccatgccctgctgtttacatgccggtgaggtccccggccgctccgaacccctccgagccccggctccccgagggtgaagcccgccggcccgcgaactggactggtggatctctcagacctggggccccggactccgatctccgccgtctccgccaccatcagggcgggatccggctctggtgttttgaggagggggtgtggtgtagggaaaggaatcccgtccctctccaccttttttcgccttcggggcttcagactcagggaactcgctcatggctttcttgatgaagaagaagaaattcaaattccaaactactttcaccctggaggagctgactgcggttcccttcgtgaacggggtcctcttctgcaaggtccggctgctggatggaggggattttgtcagcttgtcgtcaagggaggaggtacaggagaactgtgtgcggtggcgaaagaggttcaccttcgtgtgtaagatgagtgctaacccggccaccggcctgctggacccctgtgtcttccgtgtgtctgtgcgcaaggagctgaaaggcgggaaggcttattccaagctgggcttcgctgacttgaacctggccgagtttgcgggctcgggctccacggtgcgctgctgcctgctcgagggatatgacacgaagaacactcgccaggacaactccatccttaaggtcaccattggtatgttcctgctctctggagatccctgcttcaagacgccaccatcgactgccaagtccatctccatcccaggccaggattcctccctgcagctgacgtgtaagggtggtgggaccagcagtgggggcagcagcaccaactccctgactgggtcccggccccccaaggctcggcccactattctcagctcagggctgccagaggaacccgaccagaacctgtccagccctgaggaggtgttccactctggccactcccgcaactccagctatgccagccagcagtccaagatctccggctacagcacagagcactcgcgctcctccagcctctcagacctgacgcaccgccgcaacacgtccaccagcagcagcgcctctgggggccttggcatgaccgtggagggccctgagggcagtgagcgggagcaccggcccccggagaagccgccgcggccaccccggcccctgcatctgtccgatcgctctttcaggtgaggcctactgcttggtgccccctggagaacagacctctcccggtggtgccttgaacctccgcttctttacctataacacagggaccgtaaggtccccacctcagagggttgggtggtgacgattccactagctgatggccctgaagggtgcagccatgcccggcgtgcagcaggttctgttcatggctgctcttgcggttttgtggatcagacaagagcacgatctgctaggtggccttaggaagctgacttacctgctcattgcctggcatcctcgtctataaaatcggctcatgatggcagctgcaccctattgtgcatgtgaggtttcagtgaagtacagcacggagcgcacagggacattctgagcgccgctgcggctgactggcattattgtcgtcgttctgtgcttgtacctgttactgccctgaccgttgtgacttgtccccccacgacctgacccaggcggaagaaggactcggtggagagccacccgacctgggtggacgacacgcggatcgatgcggatgccatcgtggagaagatcgtgcagagccaggacttcacagatggcagcaacaccgaggacagcaacctccggctgttcgtgagccgcgatggctctgccacgctgagcggcatccagcttgccaccagggtctcttctggggtctacgagccagttgtgattgaaagccattgaggagcaggtgtccgggctggagaagagtcctgctttctctggagtccagacctgtatcattccatgaggaactttccccttcagatcacctctgcgccacatctcatccatgcctcctccatgcactccagtccacactccccgtagcatcattccattgcccctcccatccatgctgggaccctcctggcccaccaaggcccaggcaccactgtgaatattctcctctgaaccactagagggcaggccaggcaggccaggcgggcccgtgcagcttgtgggcaagaaggagctggcaaggaccggcgctgctggagactgacccagccctctggctgaggacatgcagcagctcctaaatgtagagatgcctgtggctgagggggcctctctacctgtgtccccactcactccaggagcactggctttggtcacgtcttagcagcagggccttgctccgttgttcccttgccctggtggtgggggggccagaccgcctccggaatcctgccacctgtgactgtctgactgcttagtgcttcagctgtcccttccttgtgtcctgggggacctgctggcggcctcttcctgggagccatgacctcagaccccacccacactccagatcgagacccctgcctccccccggcaaatgtcctcccgctgccttgcagcctgcactttgcacatgctcacccccagcacagtcccactggcccctcacctccccttccctgagctccttcccaaggactcctggtcactgcctgctgtgcagtcagaggcccagggtccagcagcccggcgggaacgggtgctgcctcttcctccagttagctccagctcaggtctgagacccgtgctgagaaaggtctgagcaccgaccgtgccctctgcccagggctgggtcctgagcagctggttttcctgcaggaaggttggagcaagcaaagtccttctctgccctcagggtcagctgcccagactggggcggatgccagagaggcaggtgggctgtggctggactggtccggagctggcttccttaccagaaaagcctcagccttcctctggaagcatcccccgttctgggcaagggggaagggctcctttaaggggtgtgctttcccagtggggagcagtctggccctgccccctactaaagcctctgctctcagcactttcccccaagtccttgtaacttgcttgaaggtgggttctggctgccagccagtccctggacaaactctcctgccccttttaaatttcactcattttgtataaacccagcaggctggtgtttacttagccctgtagcttttttcattttttctttccgtctttcttcttgagttcacggttcaatattgcctcctcgccctggtgaggggaggtgctgcttttctgccccacctgccggctggttccagcagcgctggggcccagctggggggccgggatgggggcttctctctctgggaggggtgcaggtgccctccccaggctgggagggttccttccctagctccccatctgcccccgctggtgagagttgggcttcttggtcttggaactccctggcattgggaacagagcatttccagcatttgtgttgttgttttactcacctaacccttagaaaatgaatgttagaaggtgcctgccgaggcgggacagagtgttcgctcgcgctggagaaggctctgctcagccctgagagtcccttcctgccccaccgatactggcactttaaaaaggaagctgaccgcacagtgtccagacgaattggcccccagaagatggggagttctgtcctgcccttctgtgtctgcgtgacctcacccagcctaggagggaggtgcattcagggtagatttgcctctcattcaaagttctggggctttgggcggaaaacagccagctttggcgctgttggggagactcctccagaccaggaaccccagaaggagacagagcctgccacatcctcccacgccaggccctgggccagggtgattggactgagaatttggccacaaccaaattgatgctggctggaaccagaggccagaaagcctggccttgtccccatgtgggagccctgtcctcagccctcttgtccccttgagctcagtgaattcccaccaggtgcccacagctcctggacttcaaattctatatattgagagagttggagagtatatcagagatatttttggaaaggagttggtctatgcaatgtcagtttggaatcttcttgaaagtttaatgtttttattaggagatttaaagaaaataaaggtctacaatatctttaggtttttttttttcctgtttaccgcacaaactgaccacatggcatgtctatcaggatggagggtgtccatgttctcctctgtctttagggaggtgataaggagatgggcggaggggtgtttttttctttgactcccctcctttctaacagaatgttgccaccactgcttgagtgggctgtgtttgttcctctgtcccagcttctgttgtagaaaataacattgttaggggaactcaggctagtgtcagcgtcttggtttggggagaaaaaattaaatgtttcggtttttgtttc

SEQ ID NO: 291382 - DNA, 3846 bp, Homo sapiens
aacgaagaaagagtctctgataacccttccaccccacctttggtcagacctgctctgagctccctgcctgccttctggccattatcccttcataccagtgtgaataagctgcttggccagggagcctgaagtccaggattctgggttaaaacaatctccttctccggaccttgcttctatcattttaaaatttcagttctgtagcccagacctgggccacattaggggaggaggtacaggagaactgtgtgcggtggcgaaagaggttcaccttcgtgtgtaagatgagtgctaacccggccaccggcctgctggacccctgtgtcttccgtgtgtctgtgcgcaaggagctgaaaggcgggaaggcttattccaagctgggcttcgctgacttgaacctggccgagtttgcgggctcgggctccacggtgcgctgctgcctgctcgagggatatgacacgaagaacactcgccaggacaactccatccttaaggtcaccattggtatgttcctgctctctggagatccctgcttcaagacgccaccatcgactgccaagtccatctccatcccaggccaggattcctccctgcagctgacgtgtaagggtggtgggaccagcagtgggggcagcagcaccaactccctgactgggtcccggccccccaaggctcggcccactattctcagctcagggctgccagaggaacccgaccagaacctgtccagccctgaggaggtgttccactctggccactcccgcaactccagctatgccagccagcagtccaagatctccggctacagcacagagcactcgcgctcctccagcctctcagacctgacgcaccgccgcaacacgtccaccagcagcagcgcctctgggggccttggcatgaccgtggagggccctgagggcagtgagcgggagcaccggcccccggagaagccgccgcggccaccccggcccctgcatctgtccgatcgctctttcaggcggaagaaggactcggtggagagccacccgacctgggtggacgacacgcggatcgatgcggatgccatcgtggagaagatcgtgcagagccaggacttcacagatggcagcaacaccgaggacagcaacctccggctgttcgtgagccgcgatggctctgccacgctgagcggcatccagcttgccaccagggtctcttctggggtctacgagccagttgtgattgaaagccattgaggagcaggtgtccgggctggagaagagtcctgctttctctggagtccagacctgtatcattccatgaggaactttccccttcagatcacctctgcgccacatctcatccatgcctcctccatgcactccagtccacactccccgtagcatcattccattgcccctcccatccatgctgggaccctcctggcccaccaaggcccaggcaccactgtgaatattctcctctgaaccactagagggcaggccaggcaggccaggcgggcccgtgcagcttgtgggcaagaaggagctggcaaggaccggcgctgctggagactgacccagccctctggctgaggacatgcagcagctcctaaatgtagagatgcctgtggctgagggggcctctctacctgtgtccccactcactccaggagcactggctttggtcacgtcttagcagcagggccttgctccgttgttcccttgccctggtggtgggggggccagaccgcctccggaatcctgccacctgtgactgtctgactgcttagtgcttcagctgtcccttccttgtgtcctgggggacctgctggcggcctcttcctgggagccatgacctcagaccccacccacactccagatcgagacccctgcctccccccggcaaatgtcctcccgctgccttgcagcctgcactttgcacatgctcacccccagcacagtcccactggcccctcacctccccttccctgagctccttcccaaggactcctggtcactgcctgctgtgcagtcagaggcccagggtccagcagcccggcgggaacgggtgctgcctcttcctccagttagctccagctcaggtctgagacccgtgctgagaaaggtctgagcaccgaccgtgccctctgcccagggctgggtcctgagcagctggttttcctgcaggaaggttggagcaagcaaagtccttctctgccctcagggtcagctgcccagactggggcggatgccagagaggcaggtgggctgtggctggactggtccggagctggcttccttaccagaaaagcctcagccttcctctggaagcatcccccgttctgggcaagggggaagggctcctttaaggggtgtgctttcccagtggggagcagtctggccctgccccctactaaagcctctgctctcagcactttcccccaagtccttgtaacttgcttgaaggtgggttctggctgccagccagtccctggacaaactctcctgccccttttaaatttcactcattttgtataaacccagcaggctggtgtttacttagccctgtagcttttttcattttttctttccgtctttcttcttgagttcacggttcaatattgcctcctcgccctggtgaggggaggtgctgcttttctgccccacctgccggctggttccagcagcgctggggcccagctggggggccgggatgggggcttctctctctgggaggggtgcaggtgccctccccaggctgggagggttccttccctagctccccatctgcccccgctggtgagagttgggcttcttggtcttggaactccctggcattgggaacagagcatttccagcatttgtgttgttgttttactcacctaacccttagaaaatgaatgttagaaggtgcctgccgaggcgggacagagtgttcgctcgcgctggagaaggctctgctcagccctgagagtcccttcctgccccaccgatactggcactttaaaaaggaagctgaccgcacagtgtccagacgaattggcccccagaagatggggagttctgtcctgcccttctgtgtctgcgtgacctcacccagcctaggagggaggtgcattcagggtagatttgcctctcattcaaagttctggggctttgggcggaaaacagccagctttggcgctgttggggagactcctccagaccaggaaccccagaaggagacagagcctgccacatcctcccacgccaggccctgggccagggtgattggactgagaatttggccacaaccaaattgatgctggctggaaccagaggccagaaagcctggccttgtccccatgtgggagccctgtcctcagccctcttgtccccttgagctcagtgaattcccaccaggtgcccacagctcctggacttcaaattctatatattgagagagttggagagtatatcagagatatttttggaaaggagttggtctatgcaatgtcagtttggaatcttcttgaaagtttaatgtttttattaggagatttaaagaaaataaaggtctacaatatctttaggtttttttttttcctgtttaccgcacaaactgaccacatggcatgtctatcaggatggagggtgtccatgttctcctctgtctttagggaggtgataaggagatgggcggaggggtgtttttttctttgactcccctcctttctaacagaatgttgccaccactgcttgagtgggctgtgtttgttcctctgtcccagcttctgttgtagaaaataacattgttaggggaactcaggctagtgtcagcgtcttggtttggggagaaaaaattaaatgtttcggtttttgtttc

SEQ ID NO: 291383 - DNA, 3797 bp, Homo sapiens
cgcggccgctcgcgcgcagccccgcacctccgcccctgcctctgcctcctgggccatgccctgctgtttacatgccggtgaggtccccggccgctccgaacccctccgagccccggctccccgagggtgaagcccgccggcccgcgaactggactggtggatctctcagacctggggccccggactccgatctccgccgtctccgccaccatcagggcgggatccggctctggtgttttgaggagggggtgtggtgtagggaaaggaatcccgtccctctccaccttttttcgccttcggggcttcagactcagggaactcgctcatggctttcttgatgaagaagaagaaattcaaattccaaactactttcaccctggaggagctgactgcggttcccttcgtgaacggggtcctcttctgcaaggtccggctgctggatggaggggattttgtcagcttgtcgtcaagggaggaggtacaggagaactgtgtgcggtggcgaaagaggttcaccttcgtgtgtaagatgagtgctaacccggccaccggcctgctggacccctgtgtcttccgtgtgtctgtgcgcaaggagctgaaaggcgggaaggcttattccaagctgggcttcgctgacttgaacctggccgagtttgcgggctcgggctccacggtgcgctgctgcctgctcgagggatatgacacgaagaacactcgccaggacaactccatccttaaggtcaccattggtatgttcctgctctctggagatccctgcttcaagacgccaccatcgactgccaagtccatctccatcccaggccaggattcctccctgcagctgacgtgtaagggtggtgggaccagcagtgggggcagcagcaccaactccctgactgggtcccggccccccaaggctcggcccactattctcagctcagggctgccagaggaacccgaccagaacctgtccagccctgaggaggtgttccactctggccactcccgcaactccagctatgccagccagcagtccaagatctccggctacagcacagagcactcgcgctcctccagcctctcagacctgacgcaccgccgcaacacgtccaccagcagcagcgcctctgggggccttggcatgaccgtggagggccctgagggcagtgagcgggagcaccggcccccggagaagccgccgcggccaccccggcccctgcatctgtccgatcgctctttcaggcggaagaaggactcggtggagagccacccgacctgggtggacgacacgcggatcgatgcggatgccatcgtggagaagatcgtgcagagccaggacttcacagatggcagcaacaccgaggacagcaacctccggctgttcgtgagccgcgatggctctgccacgctgagcggcatccagcttgccaccagggtctcttctggggtctacgagccagttgtgattgaaagccattgaggagcaggtgtccgggctggagaagagtcctgctttctctggagtccagacctgtatcattccatgaggaactttccccttcagatcacctctgcgccacatctcatccatgcctcctccatgcactccagtccacactccccgtagcatcattccattgcccctcccatccatgctgggaccctcctggcccaccaaggcccaggcaccactgtgaatattctcctctgaaccactagagggcaggccaggcaggccaggcgggcccgtgcagcttgtgggcaagaaggagctggcaaggaccggcgctgctggagactgacccagccctctggctgaggacatgcagcagctcctaaatgtagagatgcctgtggctgagggggcctctctacctgtgtccccactcactccaggagcactggctttggtcacgtcttagcagcagggccttgctccgttgttcccttgccctggtggtgggggggccagaccgcctccggaatcctgccacctgtgactgtctgactgcttagtgcttcagctgtcccttccttgtgtcctgggggacctgctggcggcctcttcctgggagccatgacctcagaccccacccacactccagatcgagacccctgcctccccccggcaaatgtcctcccgctgccttgcagcctgcactttgcacatgctcacccccagcacagtcccactggcccctcacctccccttccctgagctccttcccaaggactcctggtcactgcctgctgtgcagtcagaggcccagggtccagcagcccggcgggaacgggtgctgcctcttcctccagttagctccagctcaggtctgagacccgtgctgagaaaggtctgagcaccgaccgtgccctctgcccagggctgggtcctgagcagctggttttcctgcaggaaggttggagcaagcaaagtccttctctgccctcagggtcagctgcccagactggggcggatgccagagaggcaggtgggctgtggctggactggtccggagctggcttccttaccagaaaagcctcagccttcctctggaagcatcccccgttctgggcaagggggaagggctcctttaaggggtgtgctttcccagtggggagcagtctggccctgccccctactaaagcctctgctctcagcactttcccccaagtccttgtaacttgcttgaaggtgggttctggctgccagccagtccctggacaaactctcctgccccttttaaatttcactcattttgtataaacccagcaggctggtgtttacttagccctgtagcttttttcattttttctttccgtctttcttcttgagttcacggttcaatattgcctcctcgccctggtgaggggaggtgctgcttttctgccccacctgccggctggttccagcagcgctggggcccagctggggggccgggatgggggcttctctctctgggaggggtgcaggtgccctccccaggctgggagggttccttccctagctccccatctgcccccgctggtgagagttgggcttcttggtcttggaactccctggcattgggaacagagcatttccagcatttgtgttgttgttttactcacctaacccttagaaaatgaatgttagaaggtgcctgccgaggcgggacagagtgttcgctcgcgctggagaaggctctgctcagccctgagagtcccttcctgccccaccgatactggcactttaaaaaggaagctgaccgcacagtgtccagacgaattggcccccagaagatggggagttctgtcctgcccttctgtgtctgcgtgacctcacccagcctaggagggaggtgcattcagggtagatttgcctctcattcaaagttctggggctttgggcggaaaacagccagctttggcgctgttggggagactcctccagaccaggaaccccagaaggagacagagcctgccacatcctcccacgccaggccctgggccagggtgattggactgagaatttggccacaaccaaattgatgctggctggaaccagaggccagaaagcctggccttgtccccatgtgggagccctgtcctcagccctcttgtccccttgagctcagtgaattcccaccaggtgcccacagctcctggacttcaaattctatatattgagagagttggagagtatatcagagatatttttggaaaggagttggtctatgcaatgtcagtttggaatcttcttgaaagtttaatgtttttattaggagatttaaagaaaataaaggtctacaatatcttta

SEQ ID NO: 291384 - DNA, 4602 bp, Homo sapiens
ggggagatacggaattcctctttcatggggaataatttcaatctccgatccccatcacaaatggggttcaacgcggttactcccccccgccggcgtagggtagtcacacgctgagccagtcagtgtcgcgcccggcctctgtgaacttagttttctcatctataaaatggggatcactctgagtccatggcggggctaggatctgaatccaattccctgattctggagtgtgtgccctgaacactgcagtagagacttgcaggcagcagttacttgacactcatccctgattggttcggttgggttcaaacattggttcaaacatttcattatctgtctcttctgagcctgttgtatctggagcagagctgggcaggaggtggtaagcagaggctctggggcctcctagaccctttgcagagggaaccggagatgtcttccaagtccccaagtctggcaccacctcgtctcaatctcactttcccctccaggtctagcagacttggcctccatccacagggccttcttagcgcatgccctcttcgcacttactcccacttccctccccatccctcgatcctctgtccagaggtcccaagggcctgttcagaccctgaactctgcccagcagcccctcactctgtcctctaccagggcgccttccctggggctcctgctcatcctgcagtgcccctcccctcccaacccctgtgggggtgtcccatcactttccccagcacccacttcccacaggccttccctcctcccctgcctgctgacccggcagctcccgacagcacggccttgtttcccagggaacaatgcatctgtgtcacggacaacaatgtcctttcatgtcaggcgcactggccccggtgcacgccgggacgtggcacaaagggtgctttgtgcagctcagggatgtgagttcctggctttgccatgttggtgctgccgacccggggcctctgtccttgggtcccagttatgcaacagtcagtcgaggctgtggggctggcccaggggctttatctgtctccctctccaacttttgccaagttacccttctgggcttccgccagccaggagcccacactccctcagccctcccacacgctcctctcacctcctagctgggcttcgctgacttgaacctggccgagtttgcgggctcgggctccacggtgcgctgctgcctgctcgagggatatgacacgaagaacactcgccaggacaactccatccttaaggtcaccattggtatgttcctgctctctggagatccctgcttcaagacgccaccatcgactgccaagtccatctccatcccaggccaggattcctccctgcagctgacgtgtaagggtggtgggaccagcagtgggggcagcagcaccaactccctgactgggtcccggccccccaaggctcggcccactattctcagctcagggctgccagaggaacccgaccagaacctgtccagccctgaggaggtgttccactctggccactcccgcaactccagctatgccagccagcagtccaagatctccggctacagcacagagcactcgcgctcctccagcctctcagacctgacgcaccgccgcaacacgtccaccagcagcagcgcctctgggggccttggcatgaccgtggagggccctgagggcagtgagcgggagcaccggcccccggagaagccgccgcggccaccccggcccctgcatctgtccgatcgctctttcaggcggaagaaggactcggtggagagccacccgacctgggtggacgacacgcggatcgatgcggatgccatcgtggagaagatcgtgcagagccaggacttcacagatggcagcaacaccgaggacagcaacctccggctgttcgtgagccgcgatggctctgccacgctgagcggcatccagcttgccaccagggtctcttctggggtctacgagccagttgtgattgaaagccattgaggagcaggtgtccgggctggagaagagtcctgctttctctggagtccagacctgtatcattccatgaggaactttccccttcagatcacctctgcgccacatctcatccatgcctcctccatgcactccagtccacactccccgtagcatcattccattgcccctcccatccatgctgggaccctcctggcccaccaaggcccaggcaccactgtgaatattctcctctgaaccactagagggcaggccaggcaggccaggcgggcccgtgcagcttgtgggcaagaaggagctggcaaggaccggcgctgctggagactgacccagccctctggctgaggacatgcagcagctcctaaatgtagagatgcctgtggctgagggggcctctctacctgtgtccccactcactccaggagcactggctttggtcacgtcttagcagcagggccttgctccgttgttcccttgccctggtggtgggggggccagaccgcctccggaatcctgccacctgtgactgtctgactgcttagtgcttcagctgtcccttccttgtgtcctgggggacctgctggcggcctcttcctgggagccatgacctcagaccccacccacactccagatcgagacccctgcctccccccggcaaatgtcctcccgctgccttgcagcctgcactttgcacatgctcacccccagcacagtcccactggcccctcacctccccttccctgagctccttcccaaggactcctggtcactgcctgctgtgcagtcagaggcccagggtccagcagcccggcgggaacgggtgctgcctcttcctccagttagctccagctcaggtctgagacccgtgctgagaaaggtctgagcaccgaccgtgccctctgcccagggctgggtcctgagcagctggttttcctgcaggaaggttggagcaagcaaagtccttctctgccctcagggtcagctgcccagactggggcggatgccagagaggcaggtgggctgtggctggactggtccggagctggcttccttaccagaaaagcctcagccttcctctggaagcatcccccgttctgggcaagggggaagggctcctttaaggggtgtgctttcccagtggggagcagtctggccctgccccctactaaagcctctgctctcagcactttcccccaagtccttgtaacttgcttgaaggtgggttctggctgccagccagtccctggacaaactctcctgccccttttaaatttcactcattttgtataaacccagcaggctggtgtttacttagccctgtagcttttttcattttttctttccgtctttcttcttgagttcacggttcaatattgcctcctcgccctggtgaggggaggtgctgcttttctgccccacctgccggctggttccagcagcgctggggcccagctggggggccgggatgggggcttctctctctgggaggggtgcaggtgccctccccaggctgggagggttccttccctagctccccatctgcccccgctggtgagagttgggcttcttggtcttggaactccctggcattgggaacagagcatttccagcatttgtgttgttgttttactcacctaacccttagaaaatgaatgttagaaggtgcctgccgaggcgggacagagtgttcgctcgcgctggagaaggctctgctcagccctgagagtcccttcctgccccaccgatactggcactttaaaaaggaagctgaccgcacagtgtccagacgaattggcccccagaagatggggagttctgtcctgcccttctgtgtctgcgtgacctcacccagcctaggagggaggtgcattcagggtagatttgcctctcattcaaagttctggggctttgggcggaaaacagccagctttggcgctgttggggagactcctccagaccaggaaccccagaaggagacagagcctgccacatcctcccacgccaggccctgggccagggtgattggactgagaatttggccacaaccaaattgatgctggctggaaccagaggccagaaagcctggccttgtccccatgtgggagccctgtcctcagccctcttgtccccttgagctcagtgaattcccaccaggtgcccacagctcctggacttcaaattctatatattgagagagttggagagtatatcagagatatttttggaaaggagttggtctatgcaatgtcagtttggaatcttcttgaaagtttaatgtttttattaggagatttaaagaaaataaaggtctacaatatctttaggtttttttttttcctgtttaccgcacaaactgaccacatggcatgtctatcaggatggagggtgtccatgttctcctctgtctttagggaggtgataaggagatgggcggaggggtgtttttttctttgactcccctcctttctaacagaatgttgccaccactgcttgagtgggctgtgtttgttcctctgtcccagcttctgttgtagaaaataacattgttaggggaactcaggctagtgtcagcgtcttggtttggggagaaaaaattaaatgtttcggtttttgtttc

SEQ ID NO: 291385 - DNA, 4400 bp, Homo sapiens
ggggagatacggaattcctctttcatggggaataatttcaatctccgatccccatcacaaatggggttcaacgcggttactcccccccgccggcgtagggtagtcacacgctgagccagtcagtgtcgcgcccggcctctgtgaacttagttttctcatctataaaatggggatcactctgagtccatggcggggctaggatctgaatccaattccctgattctggagtgtgtgccctgaacactgcagtagagacttgcaggcagcagttacttgacactcatccctgattggttcggttgggttcaaacattggttcaaacatttcattatctgtctcttctgagcctgttgtatctggagcagagctgggcaggaggtggtaagcagaggctctggggcctcctagaccctttgcagagggaaccggagatgtcttccaagtccccaagtctggcaccacctcgtctcaatctcactttcccctccaggtctagcagacttggcctccatccacagggccttcttagcgcatgccctcttcgcacttactcccacttccctccccatccctcgatcctctgtccagaggtcccaagggcctgttcagaccctgaactctgcccagcagcccctcactctgtcctctaccagggcgccttccctggggctcctgctcatcctgcagtgcccctcccctcccaacccctgtgggggtgtcccatcactttccccagcacccacttcccacaggccttccctcctcccctgcctgctgacccggcagctcccgacagcacggccttgtttcccagggaacaatgcatctgtgtcacggacaacaatgtcctttcatgtcaggcgcactggccccggtgcacgccgggacgtggcacaaagggtgctttgtgcagctcagggatgtgagttcctggctttgccatgttggtgctgccgacccggggcctctgtccttgggtcccagttatgcaacagtcagtcgaggctgtggggctggcccaggggctttatctgtctccctctccaacttttgccaagttacccttctgggcttccgccagccaggagcccacactccctcagccctcccacacgctcctctcacctcctagctgggcttcgctgacttgaacctggccgagtttgcgggctcgggctccacggtgcgctgctgcctgctcgagggatatgacacgaagaacactcgccaggacaactccatccttaagggctgccagaggaacccgaccagaacctgtccagccctgaggaggtgttccactctggccactcccgcaactccagctatgccagccagcagtccaagatctccggctacagcacagagcactcgcgctcctccagcctctcagacctgacgcaccgccgcaacacgtccaccagcagcagcgcctctgggggccttggcatgaccgtggagggccctgagggcagtgagcgggagcaccggcccccggagaagccgccgcggccaccccggcccctgcatctgtccgatcgctctttcaggcggaagaaggactcggtggagagccacccgacctgggtggacgacacgcggatcgatgcggatgccatcgtggagaagatcgtgcagagccaggacttcacagatggcagcaacaccgaggacagcaacctccggctgttcgtgagccgcgatggctctgccacgctgagcggcatccagcttgccaccagggtctcttctggggtctacgagccagttgtgattgaaagccattgaggagcaggtgtccgggctggagaagagtcctgctttctctggagtccagacctgtatcattccatgaggaactttccccttcagatcacctctgcgccacatctcatccatgcctcctccatgcactccagtccacactccccgtagcatcattccattgcccctcccatccatgctgggaccctcctggcccaccaaggcccaggcaccactgtgaatattctcctctgaaccactagagggcaggccaggcaggccaggcgggcccgtgcagcttgtgggcaagaaggagctggcaaggaccggcgctgctggagactgacccagccctctggctgaggacatgcagcagctcctaaatgtagagatgcctgtggctgagggggcctctctacctgtgtccccactcactccaggagcactggctttggtcacgtcttagcagcagggccttgctccgttgttcccttgccctggtggtgggggggccagaccgcctccggaatcctgccacctgtgactgtctgactgcttagtgcttcagctgtcccttccttgtgtcctgggggacctgctggcggcctcttcctgggagccatgacctcagaccccacccacactccagatcgagacccctgcctccccccggcaaatgtcctcccgctgccttgcagcctgcactttgcacatgctcacccccagcacagtcccactggcccctcacctccccttccctgagctccttcccaaggactcctggtcactgcctgctgtgcagtcagaggcccagggtccagcagcccggcgggaacgggtgctgcctcttcctccagttagctccagctcaggtctgagacccgtgctgagaaaggtctgagcaccgaccgtgccctctgcccagggctgggtcctgagcagctggttttcctgcaggaaggttggagcaagcaaagtccttctctgccctcagggtcagctgcccagactggggcggatgccagagaggcaggtgggctgtggctggactggtccggagctggcttccttaccagaaaagcctcagccttcctctggaagcatcccccgttctgggcaagggggaagggctcctttaaggggtgtgctttcccagtggggagcagtctggccctgccccctactaaagcctctgctctcagcactttcccccaagtccttgtaacttgcttgaaggtgggttctggctgccagccagtccctggacaaactctcctgccccttttaaatttcactcattttgtataaacccagcaggctggtgtttacttagccctgtagcttttttcattttttctttccgtctttcttcttgagttcacggttcaatattgcctcctcgccctggtgaggggaggtgctgcttttctgccccacctgccggctggttccagcagcgctggggcccagctggggggccgggatgggggcttctctctctgggaggggtgcaggtgccctccccaggctgggagggttccttccctagctccccatctgcccccgctggtgagagttgggcttcttggtcttggaactccctggcattgggaacagagcatttccagcatttgtgttgttgttttactcacctaacccttagaaaatgaatgttagaaggtgcctgccgaggcgggacagagtgttcgctcgcgctggagaaggctctgctcagccctgagagtcccttcctgccccaccgatactggcactttaaaaaggaagctgaccgcacagtgtccagacgaattggcccccagaagatggggagttctgtcctgcccttctgtgtctgcgtgacctcacccagcctaggagggaggtgcattcagggtagatttgcctctcattcaaagttctggggctttgggcggaaaacagccagctttggcgctgttggggagactcctccagaccaggaaccccagaaggagacagagcctgccacatcctcccacgccaggccctgggccagggtgattggactgagaatttggccacaaccaaattgatgctggctggaaccagaggccagaaagcctggccttgtccccatgtgggagccctgtcctcagccctcttgtccccttgagctcagtgaattcccaccaggtgcccacagctcctggacttcaaattctatatattgagagagttggagagtatatcagagatatttttggaaaggagttggtctatgcaatgtcagtttggaatcttcttgaaagtttaatgtttttattaggagatttaaagaaaataaaggtctacaatatctttaggtttttttttttcctgtttaccgcacaaactgaccacatggcatgtctatcaggatggagggtgtccatgttctcctctgtctttagggaggtgataaggagatgggcggaggggtgtttttttctttgactcccctcctttctaacagaatgttgccaccactgcttgagtgggctgtgtttgttcctctgtcccagcttctgttgtagaaaataacattgttaggggaactcaggctagtgtcagcgtcttggtttggggagaaaaaattaaatgtttcggtttttgtttc

SEQ ID NO: 291386 - DNA, 3244 bp, Homo sapiens
tcgggtgggggtgagggggcggtgagcaagaaggaaactgaggggctggcttccttatgggtttgtaaacacacccctccctggccccctctgaaaatgaggaagcatcttggggaaagaaaccaatctggttgggagcgagatcacagcagagctacatgctgagccccgagagtccccgactccagggctgggcctgggctcggcagggaaaggagctgaccaggtttcctgacttcccactgccctcttggtcaccctcacatccctctgagcctcagtttcttcacctgtcaagtggggcaggatgcagtgactccctgccgaggtgaccgtgaggatggggtggcaccagccagtacggatgtgcccggaagggctctgcaggccccacagactctgatgcttactatctgtgtcactgtgggcaagggacttaccatcgctggggcacggttttagcccctttgcaacacagggctggttaacagtacctgcttgtgaaacacctccagaggcctggtccagtggagcgctcaggaaatggggtatcgagggggacatgctgacctgtctctcacctgcagggtctcttctggggtctacgagccagttgtgattgaaagccattgaggagcaggtgtccgggctggagaagagtcctgctttctctggagtccagacctgtatcattccatgaggaactttccccttcagatcacctctgcgccacatctcatccatgcctcctccatgcactccagtccacactccccgtagcatcattccattgcccctcccatccatgctgggaccctcctggcccaccaaggcccaggcaccactgtgaatattctcctctgaaccactagagggcaggccaggcaggccaggcgggcccgtgcagcttgtgggcaagaaggagctggcaaggaccggcgctgctggagactgacccagccctctggctgaggacatgcagcagctcctaaatgtagagatgcctgtggctgagggggcctctctacctgtgtccccactcactccaggagcactggctttggtcacgtcttagcagcagggccttgctccgttgttcccttgccctggtggtgggggggccagaccgcctccggaatcctgccacctgtgactgtctgactgcttagtgcttcagctgtcccttccttgtgtcctgggggacctgctggcggcctcttcctgggagccatgacctcagaccccacccacactccagatcgagacccctgcctccccccggcaaatgtcctcccgctgccttgcagcctgcactttgcacatgctcacccccagcacagtcccactggcccctcacctccccttccctgagctccttcccaaggactcctggtcactgcctgctgtgcagtcagaggcccagggtccagcagcccggcgggaacgggtgctgcctcttcctccagttagctccagctcaggtctgagacccgtgctgagaaaggtctgagcaccgaccgtgccctctgcccagggctgggtcctgagcagctggttttcctgcaggaaggttggagcaagcaaagtccttctctgccctcagggtcagctgcccagactggggcggatgccagagaggcaggtgggctgtggctggactggtccggagctggcttccttaccagaaaagcctcagccttcctctggaagcatcccccgttctgggcaagggggaagggctcctttaaggggtgtgctttcccagtggggagcagtctggccctgccccctactaaagcctctgctctcagcactttcccccaagtccttgtaacttgcttgaaggtgggttctggctgccagccagtccctggacaaactctcctgccccttttaaatttcactcattttgtataaacccagcaggctggtgtttacttagccctgtagcttttttcattttttctttccgtctttcttcttgagttcacggttcaatattgcctcctcgccctggtgaggggaggtgctgcttttctgccccacctgccggctggttccagcagcgctggggcccagctggggggccgggatgggggcttctctctctgggaggggtgcaggtgccctccccaggctgggagggttccttccctagctccccatctgcccccgctggtgagagttgggcttcttggtcttggaactccctggcattgggaacagagcatttccagcatttgtgttgttgttttactcacctaacccttagaaaatgaatgttagaaggtgcctgccgaggcgggacagagtgttcgctcgcgctggagaaggctctgctcagccctgagagtcccttcctgccccaccgatactggcactttaaaaaggaagctgaccgcacagtgtccagacgaattggcccccagaagatggggagttctgtcctgcccttctgtgtctgcgtgacctcacccagcctaggagggaggtgcattcagggtagatttgcctctcattcaaagttctggggctttgggcggaaaacagccagctttggcgctgttggggagactcctccagaccaggaaccccagaaggagacagagcctgccacatcctcccacgccaggccctgggccagggtgattggactgagaatttggccacaaccaaattgatgctggctggaaccagaggccagaaagcctggccttgtccccatgtgggagccctgtcctcagccctcttgtccccttgagctcagtgaattcccaccaggtgcccacagctcctggacttcaaattctatatattgagagagttggagagtatatcagagatatttttggaaaggagttggtctatgcaatgtcagtttggaatcttcttgaaagtttaatgtttttattaggagatttaaagaaaataaaggtctacaatatctttaggtttttttttttcctgtttaccgcacaaactgaccacatggcatgtctatcaggatggagggtgtccatgttctcctctgtctttagggaggtgataaggagatgggcggaggggtgtttttttctttgactcccctcctttctaacagaatgttgccaccactgcttgagtgggctgtgtttgttcctctgtcccagcttctgttgtagaaaataacattgttaggggaactcaggctagtgtcagcgtcttggtttggggagaaaaaattaaatgtttcggtttttgtttc

SEQ ID NO: 291387 - DNA, 2138 bp, Homo sapiens
cgcggccgctcgcgcgcagccccgcacctccgcccctgcctctgcctcctgggccatgccctgctgtttacatgccggtgaggtccccggccgctccgaacccctccgagccccggctccccgagggtgaagcccgccggcccgcgaactggactggtggatctctcagacctggggccccggactccgatctccgccgtctccgccaccatcagggcgggatccggctctggtgttttgaggagggggtgtggtgtagggaaaggaatcccgtccctctccaccttttttcgccttcggggcttcagactcagggaactcgctcatggctttcttgatgaagaagaagaaattcaaattccaaactactttcaccctggaggagctgactgcggttcccttcgtgaacggggtcctcttctgcaaggtccggctgctggatggaggggattttgtcagcttgtcgtcaagggaggaggtacaggagaactgtgtgcggtggcgaaagaggttcaccttcgtgtgtaagatgagtgctaacccggccaccggcctgctggacccctgtgtcttccgtgtgtctgtgcgcaaggagctgaaaggcgggaaggcttattccaagctgggcttcgctgacttgaacctggccgagtttgcgggctcgggctccacggtgcgctgctgcctgctcgagggatatgacacgaagaacactcgccaggacaactccatccttaaggtcaccattggtatgttcctgctctctggagatccctgcttcaagacgccaccatcgactgccaagtccatctccatcccaggccaggattcctccctgcagctgacgtgtaagggtggtgggaccagcagtgggggcagcagcaccaactccctgactgggtcccggccccccaaggctcggcccactattctcagctcagggctgccagaggaacccgaccagaacctgtccagccctgaggaggtgttccactctggccactcccgcaactccagctatgccagccagcagtccaagatctccggctacagcacagagcactcgcgctcctccagcctctcagacctgacgcaccgccgcaacacgtccaccagcagcagcgcctctgggggccttggcatgaccgtggagggccctgagggcagtgagcgggagcaccggcccccggagaagccgccgcggccaccccggcccctgcatctgtccgatcgctctttcaggcggaagaaggactcggtggagagccacccgacctgggtggacgacacgcggatcgatgcggatgccatcgtggagaagatcgtgcagagccaggacttcacagatggcagcaacaccgaggacagcaacctccggctgttcgtgagccgcgatggctctgccacgctgagcggcatccagcttgccaccagggtctcttctggggtctacgagccagttgtgattgaaagccattgaggagcaggtgtccgggctggagaagagtcctgctttctctggagtccagacctgtatcattccatgaggaactttccccttcagatcacctctgcgccacatctcatccatgcctcctccatgcactccagtccacactccccgtagcatcattccattgcccctcccatccatgctgggaccctcctggcccaccaaggcccaggcaccactgtgaatattctcctctgaaccactagagggcaggccaggcaggccaggcgggcccgtgcagcttgtgggcaagaaggagctggcaaggaccggcgctgctggagactgacccagccctctggctgaggacatgcagcagctcctaaatgtagagaatttggccacaaccaaattgatgctggctggaaccagaggccagaaagcctggccttgtccccatgtgggagccctgtcctcagccctcttgtccccttgagctcagtgaattcccaccaggtgcccacagctcctggacttcaaattctatatattgagagagttggagagtatatcagagatatttttggaaaggagttggtctatgcaatgtcagtttggaatcttcttgaaagtttaatgtttttattaggagatttaaagaaaataaaggtctacaatatcttta

SEQ ID NO: 291388 - DNA, 510 bp, Homo sapiens
aaaccctgcccaccacctgctgtgccaggccccatgagccctcttccctctcctgcctgctgggttgagctctgtggtccttacacagggccggggtgagtgtgtggcttcaccatggagaagctcattgtctaggcctgtagctgatggcagtccgctcactctgccaggcgcagggctgagcccaggcctcaccttgctatgccctcccctctggtctgccaggcaggccttggttccatctctgtcctccacacagggaaactgggctcagagaggttagtggctttgccagagcccccaagccaggagggggcagagagacaggattggaatccaagcccttctgaggccagagccgaaaggctgcagggggccctgcgcctgggcaggctgtgggtggtcagggcatagctgattgctcccctcgccacaggtcaccattggtatgttcctgctctctggagatccctgcttcaagacgtgagtgctggcacaggcctagggagc

SEQ ID NO: 291389 - DNA, 385 bp, Homo sapiens
gggattctgcagtcaacttgctgcttgtgtctccctccctgtgcaggagctgaaaggcgggaaggcttattccaaggtaagaggggctgtgtgaaggggcagtgggatggaatggggggtggcatgggacaggcacaagggaagcctccagccccttttctgccacaagcaagaggcactcagccctacctgagatgtgttattttttagaaatatctttattgatggtctttgcactcaatataaaggcagcatatggttgttgcaatataaatggtacagaagtccacagagcaaaagggccagtttctgtcccctttcctctctccaggcctctttctgggaccccattattggatagattaagacctttccagaccttgta

SEQ ID NO: 291390 - DNA, 4091 bp, Homo sapiens
cgcggccgctcgcgcgcagccccgcacctccgcccctgcctctgcctcctgggccatgccctgctgtttacatgccggtgaggtccccggccgctccgaacccctccgagccccggctccccgagggtgaagcccgccggcccgcgaactggactggtggatctctcagacctggggccccggactccgatctccgccgtctccgccaccatcagggcgggatccggctctggtgttttgaggagggggtgtggtgtagggaaaggaatcccgtccctctccaccttttttcgccttcggggcttcagactcagggaactcgctcatggctttcttgatgaagaagaagaaattcaaattccaaactactttcaccctggaggagctgactgcggttcccttcgtgaacggggtcctcttctgcaaggtccggctgctggatggaggggattttgtcagcttgtcgtcaagggaggaggtacaggagaactgtgtgcggtggcgaaagaggttcaccttcgtgtgtaagatgagtgctaacccggccaccggcctgctggacccctgtgtcttccgtgtgtctgtgcgcaaggagctgaaaggcgggaaggcttattccaagctgggcttcgctgacttgaacctggccgagtttgcgggctcgggctccacggtgcgctgctgcctgctcgagggatatgacacgaagaacactcgccaggacaactccatccttaaggtcaccattggtatgttcctgctctctggagatccctgcttcaagacgccaccatcgactgccaagtccatctccatcccaggccaggattcctccctgcagctgacgtgtaagggtggtgggaccagcagtgggggcagcagcaccaactccctgactgggtcccggccccccaaggctcggcccactattctcagctcagggctgccagaggaacccgaccagaacctgtccagccctgaggaggtgttccactctggccactcccgcaactccagctatgccagccagcagtccaagatctccggctacagcacagagcactcgcgctcctccagcctctcagacctgacgcaccgccgcaacacgtccaccagcagcagcgcctctgggggccttggcatgaccgtggagggccctgagggcagtgagcgggagcaccggcccccggagaagccgccgcggccaccccggcccctgcatctgtccgatcgctctttcaggcggaagaaggactcggtggagagccacccgacctgggtggacgacacgcggatcgatgcggatgccatcgtggagaagatcgtgcagagccaggacttcacagatggcagcaacaccgaggacagcaacctccggctgttcgtgagccgcgatggctctgccacgctgagcggcatccagcttgccaccagggtctcttctggggtctacgagccagttgtgattgaaagccattgaggagcaggtgtccgggctggagaagagtcctgctttctctggagtccagacctgtatcattccatgaggaactttccccttcagatcacctctgcgccacatctcatccatgcctcctccatgcactccagtccacactccccgtagcatcattccattgcccctcccatccatgctgggaccctcctggcccaccaaggcccaggcaccactgtgaatattctcctctgaaccactagagggcaggccaggcaggccaggcgggcccgtgcagcttgtgggcaagaaggagctggcaaggaccggcgctgctggagactgacccagccctctggctgaggacatgcagcagctcctaaatgtagagatgcctgtggctgagggggcctctctacctgtgtccccactcactccaggagcactggctttggtcacgtcttagcagcagggccttgctccgttgttcccttgccctggtggtgggggggccagaccgcctccggaatcctgccacctgtgactgtctgactgcttagtgcttcagctgtcccttccttgtgtcctgggggacctgctggcggcctcttcctgggagccatgacctcagaccccacccacactccagatcgagacccctgcctccccccggcaaatgtcctcccgctgccttgcagcctgcactttgcacatgctcacccccagcacagtcccactggcccctcacctccccttccctgagctccttcccaaggactcctggtcactgcctgctgtgcagtcagaggcccagggtccagcagcccggcgggaacgggtgctgcctcttcctccagttagctccagctcaggtctgagacccgtgctgagaaaggtctgagcaccgaccgtgccctctgcccagggctgggtcctgagcagctggttttcctgcaggaaggttggagcaagcaaagtccttctctgccctcagggtcagctgcccagactggggcggatgccagagaggcaggtgggctgtggctggactggtccggagctggcttccttaccagaaaagcctcagccttcctctggaagcatcccccgttctgggcaagggggaagggctcctttaaggggtgtgctttcccagtggggagcagtctggccctgccccctactaaagcctctgctctcagcactttcccccaagtccttgtaacttgcttgaaggtgggttctggctgccagccagtccctggacaaactctcctgccccttttaaatttcactcattttgtataaacccagcaggctggtgtttacttagccctgtagcttttttcattttttctttccgtctttcttcttgagttcacggttcaatattgcctcctcgccctggtgaggggaggtgctgcttttctgccccacctgccggctggttccagcagcgctggggcccagctggggggccgggatgggggcttctctctctgggaggggtgcaggtgccctccccaggctgggagggttccttccctagctccccatctgcccccgctggtgagagttgggcttcttggtcttggaactccctggcattgggaacagagcatttccagcatttgtgttgttgttttactcacctaacccttagaaaatgaatgttagaaggtgcctgccgaggcgggacagagtgttcgctcgcgctggagaaggctctgctcagccctgagagtcccttcctgccccaccgatactggcactttaaaaaggaagctgaccgcacagtgtccagacgaattggcccccagaagatggggagttctgtcctgcccttctgtgtctgcgtgacctcacccagcctaggagggaggtgcattcagggtagatttgcctctcattcaaagttctggggctttgggcggaaaacagccagctttggcgctgttggggagactcctccagaccaggaaccccagaaggagacagagcctgccacatcctcccacgccaggccctgggccagggtgattggactgagaatttggccacaaccaaattgatgctggctggaaccagaggccagaaagcctggccttgtccccatgtgggagccctgtcctcagccctcttgtccccttgagctcagtgaattcccaccaggtgcccacagctcctggacttcaaattctatatattgagagagttggagagtatatcagagatatttttggaaaggagttggtctatgcaatgtcagtttggaatcttcttgaaagtttaatgtttttattaggagatttaaagaaaataaaggtctacaatatctttaggtttttttttttcctgtttaccgcacaaactgaccacatggcatgtctatcaggatggagggtgtccatgttctcctctgtctttagggaggtgataaggagatgggcggaggggtgtttttttctttgactcccctcctttctaacagaatgttgccaccactgcttgagtgggctgtgtttgttcctctgtcccagcttctgttgtagaaaataacattgttaggggaactcaggctagtgtcagcgtcttggtttggggagaaaaaattaaatgtttcggtttttgtttc

SEQ ID NO: 291391 - DNA, 4645 bp, Homo sapiens
cgcggccgctcgcgcgcagccccgcacctccgcccctgcctctgcctcctgggccatgccctgctgtttacatgccggtgaggtccccggccgctccgaacccctccgagccccggctccccgagggtgaagcccgccggcccgcgaactggactggtggatctctcagacctggggccccggactccgatctccgccgtctccgccaccatcagggcgggatccggctctggtgttttgaggagggggtgtggtgtagggaaaggaatcccgtccctctccaccttttttcgccttcggggcttcagactcagggaactcgctcatggctttcttgatgaagaagaagaaattcaaattccaaactactttcaccctggaggagctgactgcggttcccttcgtgaacggggtcctcttctgcaaggtccggctgctggatggaggggattttgtcagcttgtcgtcaagggaggaggtacaggagaactgtgtgcggtggcgaaagaggttcaccttcgtgtgtaagatgagtgctaacccggccaccggcctgctggacccctgtgtcttccgtgtgtctgtgcgcaaggagctgaaaggcgggaaggcttattccaagctgggcttcgctgacttgaacctggccgagtttgcgggctcgggctccacggtgcgctgctgcctgctcgagggatatgacacgaagaacactcgccaggacaactccatccttaaggtcaccattggtatgttcctgctctctggagatccctgcttcaagacgccaccatcgactgccaagtccatctccatcccaggccaggattcctccctgcagctgacgtgtaagggtggtgggaccagcagtgggggcagcagcaccaactccctgactgggtcccggccccccaaggctcggcccactattctcagctcagggctgccagaggaacccgaccagaacctgtccagccctgaggaggtgttccactctggccactcccgcaactccagctatgccagccagcagtccaagatctccggtgagtggctgcctggccctgcccccgtggcctcctccttcctcgggatcccccattgtgatgctcccctgcgtcgcccctgacaggctacagcacagagcactcgcgctcctccagcctctcagacctgacgcaccgccgcaacacgtccaccagcagcagcgcctctgggggccttggcatgaccgtggagggccctgagggcagtgagcgggagcaccggcccccggagaagccgccgcggccaccccggcccctgcatctgtccgatcgctctttcaggtgaggcctactgcttggtgccccctggagaacagacctctcccggtggtgccttgaacctccgcttctttacctataacacagggaccgtaaggtccccacctcagagggttgggtggtgacgattccactagctgatggccctgaagggtgcagccatgcccggcgtgcagcaggttctgttcatggctgctcttgcggttttgtggatcagacaagagcacgatctgctaggtggccttaggaagctgacttacctgctcattgcctggcatcctcgtctataaaatcggctcatgatggcagctgcaccctattgtgcatgtgaggtttcagtgaagtacagcacggagcgcacagggacattctgagcgccgctgcggctgactggcattattgtcgtcgttctgtgcttgtacctgttactgccctgaccgttgtgacttgtccccccacgacctgacccaggcggaagaaggactcggtggagagccacccgacctgggtggacgacacgcggatcgatgcggatgccatcgtggagaagatcgtgcagagccaggacttcacagatggcagcaacaccgaggacagcaacctccggctgttcgtgagccgcgatggctctgccacgctgagcggcatccagcttgccaccagggtctcttctggggtctacgagccagttgtgattgaaagccattgaggagcaggtgtccgggctggagaagagtcctgctttctctggagtccagacctgtatcattccatgaggaactttccccttcagatcacctctgcgccacatctcatccatgcctcctccatgcactccagtccacactccccgtagcatcattccattgcccctcccatccatgctgggaccctcctggcccaccaaggcccaggcaccactgtgaatattctcctctgaaccactagagggcaggccaggcaggccaggcgggcccgtgcagcttgtgggcaagaaggagctggcaaggaccggcgctgctggagactgacccagccctctggctgaggacatgcagcagctcctaaatgtagagatgcctgtggctgagggggcctctctacctgtgtccccactcactccaggagcactggctttggtcacgtcttagcagcagggccttgctccgttgttcccttgccctggtggtgggggggccagaccgcctccggaatcctgccacctgtgactgtctgactgcttagtgcttcagctgtcccttccttgtgtcctgggggacctgctggcggcctcttcctgggagccatgacctcagaccccacccacactccagatcgagacccctgcctccccccggcaaatgtcctcccgctgccttgcagcctgcactttgcacatgctcacccccagcacagtcccactggcccctcacctccccttccctgagctccttcccaaggactcctggtcactgcctgctgtgcagtcagaggcccagggtccagcagcccggcgggaacgggtgctgcctcttcctccagttagctccagctcaggtctgagacccgtgctgagaaaggtctgagcaccgaccgtgccctctgcccagggctgggtcctgagcagctggttttcctgcaggaaggttggagcaagcaaagtccttctctgccctcagggtcagctgcccagactggggcggatgccagagaggcaggtgggctgtggctggactggtccggagctggcttccttaccagaaaagcctcagccttcctctggaagcatcccccgttctgggcaagggggaagggctcctttaaggggtgtgctttcccagtggggagcagtctggccctgccccctactaaagcctctgctctcagcactttcccccaagtccttgtaacttgcttgaaggtgggttctggctgccagccagtccctggacaaactctcctgccccttttaaatttcactcattttgtataaacccagcaggctggtgtttacttagccctgtagcttttttcattttttctttccgtctttcttcttgagttcacggttcaatattgcctcctcgccctggtgaggggaggtgctgcttttctgccccacctgccggctggttccagcagcgctggggcccagctggggggccgggatgggggcttctctctctgggaggggtgcaggtgccctccccaggctgggagggttccttccctagctccccatctgcccccgctggtgagagttgggcttcttggtcttggaactccctggcattgggaacagagcatttccagcatttgtgttgttgttttactcacctaacccttagaaaatgaatgttagaaggtgcctgccgaggcgggacagagtgttcgctcgcgctggagaaggctctgctcagccctgagagtcccttcctgccccaccgatactggcactttaaaaaggaagctgaccgcacagtgtccagacgaattggcccccagaagatggggagttctgtcctgcccttctgtgtctgcgtgacctcacccagcctaggagggaggtgcattcagggtagatttgcctctcattcaaagttctggggctttgggcggaaaacagccagctttggcgctgttggggagactcctccagaccaggaaccccagaaggagacagagcctgccacatcctcccacgccaggccctgggccagggtgattggactgagaatttggccacaaccaaattgatgctggctggaaccagaggccagaaagcctggccttgtccccatgtgggagccctgtcctcagccctcttgtccccttgagctcagtgaattcccaccaggtgcccacagctcctggacttcaaattctatatattgagagagttggagagtatatcagagatatttttggaaaggagttggtctatgcaatgtcagtttggaatcttcttgaaagtttaatgtttttattaggagatttaaagaaaataaaggtctacaatatctttaggtttttttttttcctgtttaccgcacaaactgaccacatggcatgtctatcaggatggagggtgtccatgttctcctctgtctttagggaggtgataaggagatgggcggaggggtgtttttttctttgactcccctcctttctaacagaatgttgccaccactgcttgagtgggctgtgtttgttcctctgtcccagcttctgttgtagaaaataacattgttaggggaactcaggctagtgtcagcgtcttggtttggggagaaaaaattaaatgtttcggtttttgtttc

SEQ ID NO: 291392 - DNA, 3646 bp, Homo sapiens
gctcacctgtcgcctctggcccacagggaggaggtacaggagaactgtgtgcggtggcgaaagaggttcaccttcgtgtgtaagatgagtgctaacccggccaccggcctgctggacccctgtgtcttccgtgtgtctgtgcgcaaggagctgaaaggcgggaaggcttattccaagctgggcttcgctgacttgaacctggccgagtttgcgggctcgggctccacggtgcgctgctgcctgctcgagggatatgacacgaagaacactcgccaggacaactccatccttaaggtcaccattggtatgttcctgctctctggagatccctgcttcaagacgccaccatcgactgccaagtccatctccatcccaggccaggattcctccctgcagctgacgtgtaagggtggtgggaccagcagtgggggcagcagcaccaactccctgactgggtcccggccccccaaggctcggcccactattctcagctcagggctgccagaggaacccgaccagaacctgtccagccctgaggaggtgttccactctggccactcccgcaactccagctatgccagccagcagtccaagatctccggctacagcacagagcactcgcgctcctccagcctctcagacctgacgcaccgccgcaacacgtccaccagcagcagcgcctctgggggccttggcatgaccgtggagggccctgagggcagtgagcgggagcaccggcccccggagaagccgccgcggccaccccggcccctgcatctgtccgatcgctctttcaggcggaagaaggactcggtggagagccacccgacctgggtggacgacacgcggatcgatgcggatgccatcgtggagaagatcgtgcagagccaggacttcacagatggcagcaacaccgaggacagcaacctccggctgttcgtgagccgcgatggctctgccacgctgagcggcatccagcttgccaccagggtctcttctggggtctacgagccagttgtgattgaaagccattgaggagcaggtgtccgggctggagaagagtcctgctttctctggagtccagacctgtatcattccatgaggaactttccccttcagatcacctctgcgccacatctcatccatgcctcctccatgcactccagtccacactccccgtagcatcattccattgcccctcccatccatgctgggaccctcctggcccaccaaggcccaggcaccactgtgaatattctcctctgaaccactagagggcaggccaggcaggccaggcgggcccgtgcagcttgtgggcaagaaggagctggcaaggaccggcgctgctggagactgacccagccctctggctgaggacatgcagcagctcctaaatgtagagatgcctgtggctgagggggcctctctacctgtgtccccactcactccaggagcactggctttggtcacgtcttagcagcagggccttgctccgttgttcccttgccctggtggtgggggggccagaccgcctccggaatcctgccacctgtgactgtctgactgcttagtgcttcagctgtcccttccttgtgtcctgggggacctgctggcggcctcttcctgggagccatgacctcagaccccacccacactccagatcgagacccctgcctccccccggcaaatgtcctcccgctgccttgcagcctgcactttgcacatgctcacccccagcacagtcccactggcccctcacctccccttccctgagctccttcccaaggactcctggtcactgcctgctgtgcagtcagaggcccagggtccagcagcccggcgggaacgggtgctgcctcttcctccagttagctccagctcaggtctgagacccgtgctgagaaaggtctgagcaccgaccgtgccctctgcccagggctgggtcctgagcagctggttttcctgcaggaaggttggagcaagcaaagtccttctctgccctcagggtcagctgcccagactggggcggatgccagagaggcaggtgggctgtggctggactggtccggagctggcttccttaccagaaaagcctcagccttcctctggaagcatcccccgttctgggcaagggggaagggctcctttaaggggtgtgctttcccagtggggagcagtctggccctgccccctactaaagcctctgctctcagcactttcccccaagtccttgtaacttgcttgaaggtgggttctggctgccagccagtccctggacaaactctcctgccccttttaaatttcactcattttgtataaacccagcaggctggtgtttacttagccctgtagcttttttcattttttctttccgtctttcttcttgagttcacggttcaatattgcctcctcgccctggtgaggggaggtgctgcttttctgccccacctgccggctggttccagcagcgctggggcccagctggggggccgggatgggggcttctctctctgggaggggtgcaggtgccctccccaggctgggagggttccttccctagctccccatctgcccccgctggtgagagttgggcttcttggtcttggaactccctggcattgggaacagagcatttccagcatttgtgttgttgttttactcacctaacccttagaaaatgaatgttagaaggtgcctgccgaggcgggacagagtgttcgctcgcgctggagaaggctctgctcagccctgagagtcccttcctgccccaccgatactggcactttaaaaaggaagctgaccgcacagtgtccagacgaattggcccccagaagatggggagttctgtcctgcccttctgtgtctgcgtgacctcacccagcctaggagggaggtgcattcagggtagatttgcctctcattcaaagttctggggctttgggcggaaaacagccagctttggcgctgttggggagactcctccagaccaggaaccccagaaggagacagagcctgccacatcctcccacgccaggccctgggccagggtgattggactgagaatttggccacaaccaaattgatgctggctggaaccagaggccagaaagcctggccttgtccccatgtgggagccctgtcctcagccctcttgtccccttgagctcagtgaattcccaccaggtgcccacagctcctggacttcaaattctatatattgagagagttggagagtatatcagagatatttttggaaaggagttggtctatgcaatgtcagtttggaatcttcttgaaagtttaatgtttttattaggagatttaaagaaaataaaggtctacaatatctttaggtttttttttttcctgtttaccgcacaaactgaccacatggcatgtctatcaggatggagggtgtccatgttctcctctgtctttagggaggtgataaggagatgggcggaggggtgtttttttctttgactcccctcctttctaacagaatgttgccaccactgcttgagtgggctgtgtttgttcctctgtcccagcttctgttgtagaaaataacattgttaggggaactcaggctagtgtcagcgtcttggtttggggagaaaaaattaaatgtttcggtttttgtttc

SEQ ID NO: 291393 - DNA, 4688 bp, Homo sapiens
ggggagatacggaattcctctttcatggggaataatttcaatctccgatccccatcacaaatggggttcaacgcggttactcccccccgccggcgtagggtagtcacacgctgagccagtcagtgtcgcgcccggcctctgtgaacttagttttctcatctataaaatggggatcactctgagtccatggcggggctaggatctgaatccaattccctgattctggagtgtgtgccctgaacactgcagtagagacttgcaggcagcagttacttgacactcatccctgattggttcggttgggttcaaacattggttcaaacatttcattatctgtctcttctgagcctgttgtatctggagcagagctgggcaggaggtggtaagcagaggctctggggcctcctagaccctttgcagagggaaccggagatgtcttccaagtccccaagtctggcaccacctcgtctcaatctcactttcccctccaggtctagcagacttggcctccatccacagggccttcttagcgcatgccctcttcgcacttactcccacttccctccccatccctcgatcctctgtccagaggtcccaagggcctgttcagaccctgaactctgcccagcagcccctcactctgtcctctaccagggcgccttccctggggctcctgctcatcctgcagtgcccctcccctcccaacccctgtgggggtgtcccatcactttccccagcacccacttcccacaggccttccctcctcccctgcctgctgacccggcagctcccgacagcacggccttgtttcccagggaacaatgcatctgtgtcacggacaacaatgtcctttcatgtcaggcgcactggccccggtgcacgccgggacgtggcacaaagggtgctttgtgcagctcagggatgtgagttcctggctttgccatgttggtgctgccgacccggggcctctgtccttgggtcccagttatgcaacagtcagtcgaggctgtggggctggcccaggggctttatctgtctccctctccaacttttgccaagttacccttctgggcttccgccagccaggagcccacactccctcagccctcccacacgctcctctcacctcctagctgggcttcgctgacttgaacctggccgagtttgcgggctcgggctccacggtgcgctgctgcctgctcgagggatatgacacgaagaacactcgccaggacaactccatccttaaggtcaccattggtatgttcctgctctctggagatccctgcttcaagacgccaccatcgactgccaagtccatctccatcccaggccaggattcctccctgcagctgacgtgtaagggtggtgggaccagcagtgggggcagcagcaccaactccctgactgggtcccggccccccaaggctcggcccactattctcagctcagggctgccagaggaacccgaccagaacctgtccagccctgaggaggtgttccactctggccactcccgcaactccagctatgccagccagcagtccaagatctccggtgagtggctgcctggccctgcccccgtggcctcctccttcctcgggatcccccattgtgatgctcccctgcgtcgcccctgacaggctacagcacagagcactcgcgctcctccagcctctcagacctgacgcaccgccgcaacacgtccaccagcagcagcgcctctgggggccttggcatgaccgtggagggccctgagggcagtgagcgggagcaccggcccccggagaagccgccgcggccaccccggcccctgcatctgtccgatcgctctttcaggcggaagaaggactcggtggagagccacccgacctgggtggacgacacgcggatcgatgcggatgccatcgtggagaagatcgtgcagagccaggacttcacagatggcagcaacaccgaggacagcaacctccggctgttcgtgagccgcgatggctctgccacgctgagcggcatccagcttgccaccagggtctcttctggggtctacgagccagttgtgattgaaagccattgaggagcaggtgtccgggctggagaagagtcctgctttctctggagtccagacctgtatcattccatgaggaactttccccttcagatcacctctgcgccacatctcatccatgcctcctccatgcactccagtccacactccccgtagcatcattccattgcccctcccatccatgctgggaccctcctggcccaccaaggcccaggcaccactgtgaatattctcctctgaaccactagagggcaggccaggcaggccaggcgggcccgtgcagcttgtgggcaagaaggagctggcaaggaccggcgctgctggagactgacccagccctctggctgaggacatgcagcagctcctaaatgtagagatgcctgtggctgagggggcctctctacctgtgtccccactcactccaggagcactggctttggtcacgtcttagcagcagggccttgctccgttgttcccttgccctggtggtgggggggccagaccgcctccggaatcctgccacctgtgactgtctgactgcttagtgcttcagctgtcccttccttgtgtcctgggggacctgctggcggcctcttcctgggagccatgacctcagaccccacccacactccagatcgagacccctgcctccccccggcaaatgtcctcccgctgccttgcagcctgcactttgcacatgctcacccccagcacagtcccactggcccctcacctccccttccctgagctccttcccaaggactcctggtcactgcctgctgtgcagtcagaggcccagggtccagcagcccggcgggaacgggtgctgcctcttcctccagttagctccagctcaggtctgagacccgtgctgagaaaggtctgagcaccgaccgtgccctctgcccagggctgggtcctgagcagctggttttcctgcaggaaggttggagcaagcaaagtccttctctgccctcagggtcagctgcccagactggggcggatgccagagaggcaggtgggctgtggctggactggtccggagctggcttccttaccagaaaagcctcagccttcctctggaagcatcccccgttctgggcaagggggaagggctcctttaaggggtgtgctttcccagtggggagcagtctggccctgccccctactaaagcctctgctctcagcactttcccccaagtccttgtaacttgcttgaaggtgggttctggctgccagccagtccctggacaaactctcctgccccttttaaatttcactcattttgtataaacccagcaggctggtgtttacttagccctgtagcttttttcattttttctttccgtctttcttcttgagttcacggttcaatattgcctcctcgccctggtgaggggaggtgctgcttttctgccccacctgccggctggttccagcagcgctggggcccagctggggggccgggatgggggcttctctctctgggaggggtgcaggtgccctccccaggctgggagggttccttccctagctccccatctgcccccgctggtgagagttgggcttcttggtcttggaactccctggcattgggaacagagcatttccagcatttgtgttgttgttttactcacctaacccttagaaaatgaatgttagaaggtgcctgccgaggcgggacagagtgttcgctcgcgctggagaaggctctgctcagccctgagagtcccttcctgccccaccgatactggcactttaaaaaggaagctgaccgcacagtgtccagacgaattggcccccagaagatggggagttctgtcctgcccttctgtgtctgcgtgacctcacccagcctaggagggaggtgcattcagggtagatttgcctctcattcaaagttctggggctttgggcggaaaacagccagctttggcgctgttggggagactcctccagaccaggaaccccagaaggagacagagcctgccacatcctcccacgccaggccctgggccagggtgattggactgagaatttggccacaaccaaattgatgctggctggaaccagaggccagaaagcctggccttgtccccatgtgggagccctgtcctcagccctcttgtccccttgagctcagtgaattcccaccaggtgcccacagctcctggacttcaaattctatatattgagagagttggagagtatatcagagatatttttggaaaggagttggtctatgcaatgtcagtttggaatcttcttgaaagtttaatgtttttattaggagatttaaagaaaataaaggtctacaatatctttaggtttttttttttcctgtttaccgcacaaactgaccacatggcatgtctatcaggatggagggtgtccatgttctcctctgtctttagggaggtgataaggagatgggcggaggggtgtttttttctttgactcccctcctttctaacagaatgttgccaccactgcttgagtgggctgtgtttgttcctctgtcccagcttctgttgtagaaaataacattgttaggggaactcaggctagtgtcagcgtcttggtttggggagaaaaaattaaatgtttcggtttttgtttc

SEQ ID NO: 291394 - DNA, 3092 bp, Homo sapiens
ctctagcaggatccttcccgactagcccgacagcagtcaagatctcggctacagcacagagcactcgcgctcctccagcctctcagacctgacgcaccgccgcaacacgtccaccagcagcagcgcctctgggggccttggcatgaccgtggagggccctgagggcagtgagcgggagcaccggcccccggagaagccgccgcggccaccccggcccctgcatctgtccgatcgctctttcaggcggaagaaggactcggtggagagccacccgacctgggtggacgacacgcggatcgatgcggatgccatcgtggagaagatcgtgcagagccaggacttcacagatggcagcaacaccgaggacagcaacctccggctgttcgtgagccgcgatggctctgccacgctgagcggcatccagcttgccaccagggtctcttctggggtctacgagccagttgtgattgaaagccattgaggagcaggtgtccgggctggagaagagtcctgctttctctggagtccagacctgtatcattccatgaggaactttccccttcagatcacctctgcgccacatctcatccatgcctcctccatgcactccagtccacactccccgtagcatcattccattgcccctcccatccatgctgggaccctcctggcccaccaaggcccaggcaccactgtgaatattctcctctgaaccactagagggcaggccaggcaggccaggcgggcccgtgcagcttgtgggcaagaaggagctggcaaggaccggcgctgctggagactgacccagccctctggctgaggacatgcagcagctcctaaatgtagagatgcctgtggctgagggggcctctctacctgtgtccccactcactccaggagcactggctttggtcacgtcttagcagcagggccttgctccgttgttcccttgccctggtggtgggggggccagaccgcctccggaatcctgccacctgtgactgtctgactgcttagtgcttcagctgtcccttccttgtgtcctgggggacctgctggcggcctcttcctgggagccatgacctcagaccccacccacactccagatcgagacccctgcctccccccggcaaatgtcctcccgctgccttgcagcctgcactttgcacatgctcacccccagcacagtcccactggcccctcacctccccttccctgagctccttcccaaggactcctggtcactgcctgctgtgcagtcagaggcccagggtccagcagcccggcgggaacgggtgctgcctcttcctccagttagctccagctcaggtctgagacccgtgctgagaaaggtctgagcaccgaccgtgccctctgcccagggctgggtcctgagcagctggttttcctgcaggaaggttggagcaagcaaagtccttctctgccctcagggtcagctgcccagactggggcggatgccagagaggcaggtgggctgtggctggactggtccggagctggcttccttaccagaaaagcctcagccttcctctggaagcatcccccgttctgggcaagggggaagggctcctttaaggggtgtgctttcccagtggggagcagtctggccctgccccctactaaagcctctgctctcagcactttcccccaagtccttgtaacttgcttgaaggtgggttctggctgccagccagtccctggacaaactctcctgccccttttaaatttcactcattttgtataaacccagcaggctggtgtttacttagccctgtagcttttttcattttttctttccgtctttcttcttgagttcacggttcaatattgcctcctcgccctggtgaggggaggtgctgcttttctgccccacctgccggctggttccagcagcgctggggcccagctggggggccgggatgggggcttctctctctgggaggggtgcaggtgccctccccaggctgggagggttccttccctagctccccatctgcccccgctggtgagagttgggcttcttggtcttggaactccctggcattgggaacagagcatttccagcatttgtgttgttgttttactcacctaacccttagaaaatgaatgttagaaggtgcctgccgaggcgggacagagtgttcgctcgcgctggagaaggctctgctcagccctgagagtcccttcctgccccaccgatactggcactttaaaaaggaagctgaccgcacagtgtccagacgaattggcccccagaagatggggagttctgtcctgcccttctgtgtctgcgtgacctcacccagcctaggagggaggtgcattcagggtagatttgcctctcattcaaagttctggggctttgggcggaaaacagccagctttggcgctgttggggagactcctccagaccaggaaccccagaaggagacagagcctgccacatcctcccacgccaggccctgggccagggtgattggactgagaatttggccacaaccaaattgatgctggctggaaccagaggccagaaagcctggccttgtccccatgtgggagccctgtcctcagccctcttgtccccttgagctcagtgaattcccaccaggtgcccacagctcctggacttcaaattctatatattgagagagttggagagtatatcagagatatttttggaaaggagttggtctatgcaatgtcagtttggaatcttcttgaaagtttaatgtttttattaggagatttaaagaaaataaaggtctacaatatctttaggtttttttttttcctgtttaccgcacaaactgaccacatggcatgtctatcaggatggagggtgtccatgttctcctctgtctttagggaggtgataaggagatgggcggaggggtgtttttttctttgactcccctcctttctaacagaatgttgccaccactgcttgagtgggctgtgtttgttcctctgtcccagcttctgttgtagaaaataacattgttaggggaactcaggctagtgtcagcgtcttggtttggggagaaaaaattaaatgtttcggtttttgtttc

SEQ ID NO: 291395 - DNA, 2010 bp, Homo sapiens
cgcggccgctcgcgcgcagccccgcacctccgcccctgcctctgcctcctgggccatgccctgctgtttacatgccggtgaggtccccggccgctccgaacccctccgagccccggctccccgagggtgaagcccgccggcccgcgaactggactggtggatctctcagacctggggccccggactccgatctccgccgtctccgccaccatcagggcgggatccggctctggtgttttgaggagggggtgtggtgtagggaaaggaatcccgtccctctccaccttttttcgccttcggggcttcagactcagggaactcgctcatggctttcttgatgaagaagaagaaattcaaattccaaactactttcaccctggaggagctgactgcggttcccttcgtgaacggggtcctcttctgcaaggtccggctgctggatggaggggattttgtcagcttgtcgtcaagggaggaggtacaggagaactgtgtgcggtggcgaaagaggttcaccttcgtgtgtaagatgagtgctaacccggccaccggcctgctggacccctgtgtcttccgtgtgtctgtgcgcaaggagctgaaaggcgggaaggcttattccaagctgggcttcgctgacttgaacctggccgagtttgcgggctcgggctccacggtgcgctgctgcctgctcgagggatatgacacgaagaacactcgccaggacaactccatccttaaggtcaccattggtatgttcctgctctctggagatccctgcttcaagacgccaccatcgactgccaagtccatctccatcccaggccaggattcctccctgcagctgacgtgtaagggtggtgggaccagcagtgggggcagcagcaccaactccctgactgggtcccggccccccaaggctcggcccactattctcagctcagggctgccagaggaacccgaccagaacctgtccagccctgaggaggtgttccactctggccactcccgcaactccagctatgccagccagcagtccaagatctccggctacagcacagagcactcgcgctcctccagcctctcagacctgacgcaccgccgcaacacgtccaccagcagcagcgcctctgggggccttggcatgaccgtggagggccctgagggcagtgagcgggagcaccggcccccggagaagccgccgcggccaccccggcccctgcatctgtccgatcgctctttcaggtgaggcctactgcttggtgccccctggagaacagacctctcccggtggtgccttgaacctccgcttctttacctataacacagggaccgtaaggtccccacctcagagggttgggtggtgacgattccactagctgatggccctgaagggtgcagccatgcccggcgtgcagcaggttctgttcatggctgctcttgcggttttgtggatcagacaagagcacgatctgctaggtggccttaggaagctgacttacctgctcattgcctggcatcctcgtctataaaatcggctcatgatggcagctgcaccctattgtgcatgtgaggtttcagtgaagtacagcacggagcgcacagggacattctgagcgccgctgcggctgactggcattattgtcgtcgttctgtgcttgtacctgttactgccctgaccgttgtgacttgtccccccacgacctgacccaggcggaagaaggactcggtggagagccacccgacctgggtggacgacacgcggatcgatgcggatgccatcgtggagaagatcgtgcagagccaggacttcacagatggcagcaacaccgagggtgagccgtgctgggctggtgggggcgaggccacctgcgacctgctgtcctcatccccaaatcctggctcctcctgcgacctgctgtccgcatccccaatcactggctcctcctgcgacatgctgtcctcatccccaattcctggctcctcctgcgacatgctgtcctcatccccaaa

SEQ ID NO: 291396 - DNA, 568 bp, Homo sapiens
ctctcaacagtgtatcttgggtgcttttttctgttctacattttgggctgtggtttcgttggtaaattttgtggttcaaatttcaaaagtaacttctctggaatatttgcactgaaattaacctttagtaactcggacgcagcagctgtagatgaatttttgacttcagttgatgcaattgcctatctgttacaggttttctggacaggtagtagtgtctttttctctgtcctttgctactgcccaggaacttcactttgcttcttttcactacaaggctggggacttaaatgtatgaaattcttagtctactctcctgcttatttctgaaatcactactgacatttttagcttgaaacacctaaaacttacaaccacattagtatgtccacttaaattattgttttaggttcaagctgaagaagaaatattagagagaaatctaactaactgtgaaaaagaaaataaaaggctacaagaaaggtgtggtctatataaaagtgaacttgaaattctgaaagagaaattaaggcagttaaaagaagaaaataacaacgaaaaagaaaaa

SEQ ID NO: 291397 - DNA, 1475 bp, Homo sapiens
cggccgcggcggcggcgaacactccctccgaaagagaagcgcagttctccaaagggtagggactctgggcggggctagcagtcctattccgcaaccgcctcagtctcggccccctcaggccaggcgtgagcgccgcccgcctctccccctgacggcctccggttcccatggcttcccccaccaatgggcatcatggcggtaattgtgggaaatgtagtcccgggcgggctccgctagtgggctcgggcgcgctcgccgaccacgatccccggcaagccccgcgccttcggcggcgcctcacgcagtctgcgccggggcggggcagtgaccgggtaggcgcgtcccaacggctcccgcggcggttcgaattctgtgctgccggggttcgctggttctccgagttgtgtccgaggcttccacgcgcaggggcccgggaaagggtcagaggcttcctaacgcagactcgagtgcgaagcgcgcagtcgccgggtgggtctctccccagcgacgatctgggtgaaatggaatctagttcatcagactactataataaagacaatgaagaggaaagtttgcttgcaaatgttgcttccttaagacatgaactgaagataacagaatggagtttgcagagtttaggggaagagttatccagtgttagtccaagtgaaaattctgattatgcccctaatccttcaaggtctgaaaagctaattttggatgttcagcctagccaccctggacttttgaattattcaccttatgaaaacgtctgtaaaatatctggtagcagcactgattttcaaaaaaagccaagagataagatgttttcatcttctgcccctgtggatcaggagattaaaagccttcgagagaaactaaataaacttaggcaacagaatgcttgtttggtcacacagaatcattccttaatgactaaatttgaatctattcactttgaattaacacagtcaagagcaaaagtttctatgcttgagtctgctcaacagcaggcagccagtgtcccaatcttagaagaacagattataaatttggaagcagaggtttcagctcaagataaagttttgagagaggcagaaaataagctggaacagagccagaaaatggtaattgaaaaggaacagagtttgcaggagtccaaagaggaatgtataaaattaaaggtggacttacttgaacaaaccaaacaaggaaaaagagctgaacgacaaaggaatgaagcactatataatgccgaagagctgagtaaagctttccaacaatataaaaaaaaagtggctgaaaaactggaaaaggttcaagctgaagaagaaatattagagagaaatctaactaactgtgaaaaagaaaataaaaggctacaagaaaggtgtggtctatataaaagtgaacttgaaattctgaaagagaaattaaggcagttaaaagaagaaaataacaacgaaaaagaaaaa

SEQ ID NO: 291398 - DNA, 1276 bp, Homo sapiens
cggccgcggcggcggcgaacactccctccgaaagagaagcgcagttctccaaagggtagggactctgggcggggctagcagtcctattccgcaaccgcctcagtctcggccccctcaggccaggcgtgagcgccgcccgcctctccccctgacggcctccggttcccatggcttcccccaccaatgggcatcatggcggtaattgtgggaaatgtagtcccgggcgggctccgctagtgggctcgggcgcgctcgccgaccacgatccccggcaagccccgcgccttcggcggcgcctcacgcagtctgcgccggggcggggcagtgaccgggtaggcgcgtcccaacggctcccgcggcggttcgaattctgtgctgccggggttcgctggttctccgagttgtgtccgaggcttccacgcgcaggggcccgggaaagggtcagaggcttcctaacgcagactcgagtgcgaagcgcgcagtcgccggaaatggaatctagttcatcagactactataataaagacaatgaagaggaaagtttgcttgcaaatgttgcttccttaagacatgaactgaagataacagaatggagtttgcagagtttaggggaagagttatccagatgttttcatcttctgcccctgtggatcaggagattaaaagccttcgagagaaactaaataaacttaggcaacagaatgcttgtttggtcacacagaatcattccttaatgactaaatttgaatctattcactttgaattaacacagtcaagagcaaaagtttctatgcttgagtctgctcaacagcaggcagccagtgtcccaatcttagaagaacagattataaatttggaagcagaggtttcagctcaagataaagttttgagagaggcagaaaataagctggaacagagccagaaaatggtaattgaaaaggaacagagtttgcaggagtccaaagaggaatgtataaaattaaaggtggacttacttgaacaaaccaaacaaggaaaaagagctgaacgacaaaggaatgaagcactatataatgccgaagagctgagtaaagctttccaacaatataaaaaaaaagtggctgaaaaactggaaaaggttcaagctgaagaagaaatattagagagaaatctaactaactgtgaaaaagaaaataaaaggctacaagaaaggtgtggtctatataaaagtgaacttgaaattctgaaagagaaattaaggcagttaaaagaagaaaataacaacgaaaaagaaaaa

SEQ ID NO: 291399 - DNA, 271 bp, Homo sapiens
agtaacgaagtgaagacagtgaaagagatcagacatggcaaaccggagaaacagaagtgcataatggagaagagatagataacctacttacggacagacaagcgaatacgaggaaagggaaagaaacggtgatgactccttgcattccctcccctcacaacaaagaactccactgtggggatgaagcgcttcttctagccactgctatcgctatttaagaaccctaaatctgtcacccataataaagctgatttgaagtgttaaaaatttt

SEQ ID NO: 291400 - DNA, 6704 bp, Homo sapiens
  misc_feature (3057)..(3057): n is a, c, g, or t
  misc_feature (4233)..(4233): n is a, c, g, or t
gccggccgcgtcgaccctgccccagtgagagctctgagggtccctgcctgaagagggacagggaccggggcttggagaaggggctgtggaatgcagcccccttcactgctgctgctgctgctgctgctgctgctgctatgtgtctcagtggtcagacccagagggctgctgtgtgggagtttcccagaaccctgtgccaatggaggcacctgcctgagcctgtctctgggacaagggacctgccagtgtgcccctggcttcctgggtgagacgtgccagtttcctgacccctgccagaacgcccagctctgccaaaatggaggcagctgccaagccctgcttcccgctcccctagggctccccagctctccctctccattgacacccagcttcttgtgcacttgcctccctggcttcactggtgagagatgccaggccaagcttgaagacccttgtcctccctccttctgttccaaaaggggccgctgccacatccaggcctcgggccgcccacagtgctcctgcatgcctggatggacaggtgagcagtgccagcttcgggacttctgttcagccaacccatgtgttaatggaggggtgtgtctggccacatacccccagatccagtgccactgcccaccgggcttcgagggccatgcctgtgaacgtgatgtcaacgagtgcttccaggacccaggaccctgccccaaaggcacctcctgccataacaccctgggctccttccagtgcctctgccctgtggggcaggagggtccacgttgtgagctgcgggcaggaccctgccctcctaggggctgttcgaatgggggcacctgccagctgatgccagagaaagactccacctttcacctctgcctctgtcccccaggtttcataggcccagactgtgaggtgaatccagacaactgtgtcagccaccagtgtcagaatgggggcacttgccaggatgggctggacacctacacctgcctctgcccagaaacctggacaggctgggactgctccgaagatgtggatgagtgtgagacccagggtccccctcactgcagaaacgggggcacctgccagaactctgctggtagctttcactgcgtgtgtgtgagtggctggggcggcacaagctgtgaggagaacctggatgactgtattgctgccacctgtgccccgggatccacctgcattgaccgggtgggctctttctcctgcctctgcccacctggacgcacaggactcctgtgccacttggaagacatgtgtctgagccagccgtgccatggggatgcccaatgcagcaccaaccccctcacaggctccacactctgcctgtgtcagcctggctattcggggcccacctgccaccaggacctggacgagtgtctgatggcccagcaaggcccaagtccctgtgaacatggcggttcctgcctcaacactcctggctccttcaactgcctctgtccacctggctacacaggctcccgttgtgaggctgatcacaatgagtgcctctcccagccctgccacccaggaagcacctgtctggacctacttgccaccttccactgcctctgcccgccaggcttagaagggcagctctgtgaggtggagaccaacgagtgtgcctcagctccctgcctgaaccacgcggattgccatgacctgctcaacggcttccagtgcatctgcctgcctggattctccggcacccgatgtgaggaggatatcgatgagtgcagaagctctccctgtgccaatggtgggcagtgccaggaccagcctggagccttccactgcaagtgtctcccaggctttgaagggccacgctgtcaaacagaggtggatgagtgcctgagtgacccatgtcccgttggagccagctgccttgatcttccaggagccttcttttgcctctgcccctctggtttcacaggccagctctgtgaggttcccctgtgtgctcccaacctgtgccagcccaagcagatatgtaaggaccagaaagacaaggccaactgcctctgtcctgatggaagccctggctgtgccccacctgaggacaactgcacctgccaccacgggcactgccagagatcctcatgtgtgtgtgacgtgggttggacggggccagagtgtgaggcagagctagggggctgcatctctgcaccctgtgcccatggggggacctgctacccccagccctctggctacaactgcacctgccctacaggctacacaggacccacctgtagtgaggagatgacagcttgtcactcagggccatgtctcaatggcggctcctgcaaccctagccctggaggctactactgcacctgccctccaagccacacagggccccagtgccaaaccagcactgactactgtgtgtctgccccgtgcttcaatgggggtacctgtgtgaacaggcctggcaccttctcctgcctctgtgccatgggcttccagggcccgcgctgtgagggaaagctccgccccagctgtgcagacagcccctgtaggaatagggcaacctgccaggacagccctcagggtccccgctgcctctgccccactggctacaccggaggcagctgccagactctgatggacttatgtgcccagaagccctgcccacgcaattcccactgcctccagactgggccctccttccactgcttgtgcctccagggatggaccgggcctctctgcaaccttccactgtcctcctgccagaaggctgcactgagccaaggcatagacgtctcttccctttgccacaatggaggcctctgtgtcgacagcggcccctcctatttctgccactgcccccctggattccaaggcagcctgtgccaggatcacgtgaacccatgtgagtccaggccttgccagaacggggccacctgcatggcccagcccagtgggtatctctgccagtgtgccccaggctacgatggacagaactgctcaaaggaactcgatgcttgtcagtcccaaccctgtcacaaccatggaacctgtactcccaaacctggaggnttccactgtgcctgccctccaggctttgtggggctacgctgtgagggagacgtggacgagtgtctggaccagccctgccaccccacaggcactgcagcctgccactctctggccaatgccttctactgccagtgtctgcctggacacacaggccagtggtgtgaggtggagatagacccctgccacagccaaccctgctttcatggagggacctgtgaggccacagcaggatcacccctgggtttcatctgccactgccccaagggttttgaaggccccacctgcagccacagggccccttcctgcggcttccatcactgccaccacggaggcctgtgtctgccctcccctaagccaggcttcccaccacgctgtgcctgcctcagtggctatgggggtcctgactgcctgaccccaccagctcctaaaggctgtggccctccctccccatgcctatacaatggcagctgctcagagaccacgggcttggggggcccaggctttcgatgctcctgccctcacagctctccagggccccggtgtcagaaacccggagccaaggggtgtgagggcagaagtggagatggggcctgcgatgctggctgcagtggcccgggaggaaactgggatggaggggactgctctctgggagtcccagacccctggaagggctgcccctcccactctcggtgctggcttctcttccgggacgggcagtgccacccacagtgtgactctgaagagtgtctgtttgatggctacgactgtgagacccctccagcctgcactccagcctatgaccagtactgccatgatcacttccacaacgggcactgtgagaaaggctgcaacactgcagagtgtggctgggatggaggtgactgcaggcctgaagatggggacccagagtgggggccctccctggccctgctggtggtactgagccccccagccctagaccagcagctgtttgccctggcccgggtgctgtccctgactctgagggtaggactctgggtaaggaaggatcgtgatggcagggacatggtgtacccctatcctggggcccgggctgaagaaaagctaggaggaactcgggaccccacctatcaggagagagcagcccctcaaacgcagcccctgggcaaggagaccgactccctcagtgctgggttngtggtggtcatgggtgtggatttgtcccgctgtggccctgaccacccggcatcccgctgtccctgggaccctgggcttctactccgcttccttgctgcgatggctgcagtgggagccctggagcccctgctgcctggaccactgctggctgtccaccctcatgcagggaccgcaccccctgccaaccagcttccctggcctgtgctgtgctccccagtggccggggtgattctcctggccctaggggctcttctcgtcctccagctcatccggcgtcgacgccgagagcatggagctctctggctgccccctggtttcactcgacggcctcggactcagtcagctccccaccgacgccggcccccactaggcgaggacagcattggtctcaaggcactgaagccaaaggcagaagttgatgaggatggagttgtgatgtgctcaggccctgaggagggagaggaggtgggccaggctgaagaaacaggcccaccctccacgtgccagctctggtctctgagtggtggctgtggggcgctccctcaggcagccatgctaactcctccccaggaatctgagatggaagcccctgacctggacacccgtggacctgatggggtgacacccctgatgtcagcagtttgctgtggggaagtacagtccgggaccttccaaggggcatggttgggatgtcctgagccctgggaacctctgctggatggaggggcctgtccccaggctcacaccgtgggcactggggagacccccctgcacctggctgcccgattctcccggccaaccgctgcccgccgcctccttgaggctggagccaaccccaaccagccagaccgggcagggcgcacaccccttcatgctgctgtggctgctgatgctcgggaggtctgccagcttctgctccgtagcagacaaactgcagtggacgctcgcacagaggacgggaccacacccttgatgctggctgccaggctggcggtggaagacctggttgaagaactgattgcagcccaagcagacgtgggggccagagataaatgggggaaaactgcgctgcactgggctgctgccgtgaacaacgcccgagccgcccgctcgcttctccaggccggagccgataaagatgcccaggacaacagggagcagacgccgctattcctggcggcgcgggaaggagcggtggaagtagcccagctactgctggggctgggggcagcccgagagctgcgggaccaggctgggctagcgccggcggacgtcgctcaccaacgtaaccactgggatctgctgacgctgctggaaggggctgggccaccagaggcccgtcacaaagccacgccgggccgcgaggctgggcccttcccgcgcgcacggacggtgtcagtaagcgtgcccccgcatgggggcggggctctgccgcgctgccggacgctgtcagccggagcaggccctcgtgggggcggagcttgtctgcaggctcggacttggtccgtagacttggctgcgcgggggggcggggcctattctcattgccggagcctctcgggagtaggagcaggaggaggcccgacccctcgcggccgtaggttttctgcaggcatgcgcgggcctcggcccaaccctgcgataatgcgaggaagatacggagtggctgccgggcgcggaggcagggtctcaacggatgactggccctgtgattgggtggccctgggagcttgcggttctgcctccaacattccgatcccgcctccttgccttactccgtccccggagcggggatcacctcaacttgactgtggtcccccagccctccaagaaatgcccataaaccaaggaggagagggtaaaaaatagaagaatacatggtagggaggaattccaaaaatgattacccattaaaaggcaggctggaaggccttcctggttttaagatggatcccccaaaatgaagggttgtgagtttagtttctctcctaaaatgaatgtatgcccaccagagcagacatcttccacgtggagaagctgcagctctggaaagagggtttaagatgctaggatgaggcaggcccagtcctcctccagaaaataagacaggccacaggagggcagagtggagtggaaatacccctaagttggaaccaagaattgcaggcatatgggatgtaagatgttctttcctatatatggtttccaaagggtgcccctatgatccattgtccccactgcccacaaatggctgacaaatatttattgggcacctactatgtgccaggcactgtgtaggtgctgaaaagtggccaagggccacccccgctgatgactccttgcattccctcccctcacaacaaagaactccactgtggggatgaagcgcttcttctagccactgctatcgctatttaagaaccctaaatctgtcacccataataaagctgatttgaagtgttaaaaatttt

SEQ ID NO: 291401 - DNA, 6789 bp, Homo sapiens
  misc_feature (2969)..(2969): n is a, c, g, or t
  misc_feature (4145)..(4145): n is a, c, g, or t
gccggccgcgtcgaccctgccccagtgagagctctgagggtccctgcctgaagagggacagggaccggggcttggagaaggggctgtggaatgcagcccccttcactgctgctgctgctgctgctgctgctgctgctatgtgtctcagtggtcagacccagagggctgctgtgtgggagtttcccagaaccctgtgccaatggaggcacctgcctgagcctgtctctgggacaagggacctgccagtgtgcccctggcttcctgggtgagacgtgccagtttcctgacccctgccagaacgcccagctctgccaaaatggaggcagctgccaagccctgcttcccgctcccctagggctccccagctctccctctccattgacacccagcttcttgtgcacttgcctccctggcttcactggtgagagatgccaggccaagcttgaagacccttgtcctccctccttctgttccaaaaggggccgctgccacatccaggcctcgggccgcccacagtgctcctgcatgcctggatggacaggtgagcagtgccagcttcgggacttctgttcagccaacccatgtgttaatggaggggtgtgtctggccacatacccccagatccagtgccactgcccaccgggcttcgagggccatgcctgtgaacgtgatgtcaacgagtgcttccaggacccaggaccctgccccaaaggcacctcctgccataacaccctgggctccttccagtgcctctgccctgtggggcaggagggtccacgttgtgagctgcgggcaggaccctgccctcctaggggctgttcgaatgggggcacctgccagctgatgccagagaaagactccacctttcacctctgcctctgtcccccaggtttcataggcccagactgtgaggtgaatccagacaactgtgtcagccaccagtgtcagaatgggggcacttgccaggatgggctggacacctacacctgcctctgcccagaaacctggacaggctgggactgctccgaagatgtggatgagtgtgagacccagggtccccctcactgcagaaacgggggcacctgccagaactctgctggtagctttcactgcgtgtgtgtgagtggctggggcggcacaagctgtgaggagaacctggatgactgtattgctgccacctgtgccccgggatccacctgcattgaccgggtgggctctttctcctgcctctgcccacctggacgcacaggactcctgtgccacttggaagacatgtgtctgagccagccgtgccatggggatgcccaatgcagcaccaaccccctcacaggctccacactctgcctgtgtcagcctggctattcggggcccacctgccaccaggacctggacgagtgtctgatggcccagcaaggcccaagtccctgtgaacatggcggttcctgcctcaacactcctggctccttcaactgcctctgtccacctggctacacaggctcccgttgtgaggctgatcacaatgagtgcctctcccagccctgccacccaggaagcacctgtctggacctacttgccaccttccactgcctctgcccgccaggcttagaagggcagctctgtgaggtggagaccaacgagtgtgcctcagctccctgcctgaaccacgcggattgccatgacctgctcaacggcttccagtgcatctgcctgcctggattctccggcacccgatgtgaggaggatatcgatgagtgcagaagctctccctgtgccaatggtgggcagtgccaggaccagcctggagccttccactgcaagtgtctcccaggctttgaagggccacgctgtcaaacagaggtggatgagtgcctgagtgacccatgtcccgttggagccagctgccttgatcttccaggagccttcttttgcctctgcccctctggtttcacaggccagctctgtgaggttcccctgtgtgctcccaacctgtgccagcccaagcagatatgtaaggaccagaaagacaaggccaactgcctctgtcctgatggaagccctggctgtgccccacctgaggacaactgcacctgccaccacgggcactgccagagatcctcatgtgtgtgtgacgtgggttggacggggccagagtgtgaggcagagctagggggctgcatctctgcaccctgtgcccatggggggacctgctacccccagccctctggctacaactgcacctgccctacaggctacacaggacccacctgtagtgaggagatgacagcttgtcactcagggccatgtctcaatggcggctcctgcaaccctagccctggaggctactactgcacctgccctccaagccacacagggccccagtgccaaaccagcactgactactgtgtgtctgccccgtgcttcaatgggggtacctgtgtgaacaggcctggcaccttctcctgcctctgtgccatgggcttccagggcccgcgctgtgagggaaagctccgccccagctgtgcagacagactctgatggacttatgtgcccagaagccctgcccacgcaattcccactgcctccagactgggccctccttccactgcttgtgcctccagggatggaccgggcctctctgcaaccttccactgtcctcctgccagaaggctgcactgagccaaggcatagacgtctcttccctttgccacaatggaggcctctgtgtcgacagcggcccctcctatttctgccactgcccccctggattccaaggcagcctgtgccaggatcacgtgaacccatgtgagtccaggccttgccagaacggggccacctgcatggcccagcccagtgggtatctctgccagtgtgccccaggctacgatggacagaactgctcaaaggaactcgatgcttgtcagtcccaaccctgtcacaaccatggaacctgtactcccaaacctggaggnttccactgtgcctgccctccaggctttgtggggctacgctgtgagggagacgtggacgagtgtctggaccagccctgccaccccacaggcactgcagcctgccactctctggccaatgccttctactgccagtgtctgcctggacacacaggccagtggtgtgaggtggagatagacccctgccacagccaaccctgctttcatggagggacctgtgaggccacagcaggatcacccctgggtttcatctgccactgccccaagggttttgaaggccccacctgcagccacagggccccttcctgcggcttccatcactgccaccacggaggcctgtgtctgccctcccctaagccaggcttcccaccacgctgtgcctgcctcagtggctatgggggtcctgactgcctgaccccaccagctcctaaaggctgtggccctccctccccatgcctatacaatggcagctgctcagagaccacgggcttggggggcccaggctttcgatgctcctgccctcacagctctccagggccccggtgtcagaaacccggagccaaggggtgtgagggcagaagtggagatggggcctgcgatgctggctgcagtggcccgggaggaaactgggatggaggggactgctctctgggagtcccagacccctggaagggctgcccctcccactctcggtgctggcttctcttccgggacgggcagtgccacccacagtgtgactctgaagagtgtctgtttgatggctacgactgtgagacccctccagcctgcactccagcctatgaccagtactgccatgatcacttccacaacgggcactgtgagaaaggctgcaacactgcagagtgtggctgggatggaggtgactgcaggcctgaagatggggacccagagtgggggccctccctggccctgctggtggtactgagccccccagccctagaccagcagctgtttgccctggcccgggtgctgtccctgactctgagggtaggactctgggtaaggaaggatcgtgatggcagggacatggtgtacccctatcctggggcccgggctgaagaaaagctaggaggaactcgggaccccacctatcaggagagagcagcccctcaaacgcagcccctgggcaaggagaccgactccctcagtgctgggttngtggtggtcatgggtgtggatttgtcccgctgtggccctgaccacccggcatcccgctgtccctgggaccctgggcttctactccgcttccttgctgcgatggctgcagtgggagccctggagcccctgctgcctggaccactgctggctgtccaccctcatgcagggaccgcaccccctgccaaccagcttccctggcctgtgctgtgctccccagtggccggggtgattctcctggccctaggggctcttctcgtcctccagctcatccggcgtcgacgccgagagcatggagctctctggctgccccctggtttcactcgacggcctcggactcagtcagctccccaccgacgccggcccccactaggcgaggacagcattggtctcaaggcactgaagccaaaggcagaagttgatgaggatggagttgtgatgtgctcaggccctgaggagggagaggaggtgggccaggctgaagaaacaggcccaccctccacgtgccagctctggtctctgagtggtggctgtggggcgctccctcaggcagccatgctaactcctccccaggaatctgagatggaagcccctgacctggacacccgtggacctgatggggtgacacccctgatgtcagcagtttgctgtggggaagtacagtccgggaccttccaaggggcatggttgggatgtcctgagccctgggaacctctgctggatggaggggcctgtccccaggctcacaccgtgggcactggggagacccccctgcacctggctgcccgattctcccggccaaccgctgcccgccgcctccttgaggctggagccaaccccaaccagccagaccgggcagggcgcacaccccttcatgctgctgtggctgctgatgctcgggaggtctgccagcttctgctccgtagcagacaaactgcagtggacgctcgcacagaggacgggaccacacccttgatgctggctgccaggctggcggtggaagacctggttgaagaactgattgcagcccaagcagacgtgggggccagagataaatgggggaaaactgcgctgcactgggctgctgccgtgaacaacgcccgagccgcccgctcgcttctccaggccggagccgataaagatgcccaggacaacagggttagatgggacagagggcttcccacaaaacagtcaggcgcacgagagatggaaagtgcggtaacccgcaaagcctgaagggataggggccagtggtcgcgcaagtgaaggcagaaaggcccagtcctgtgggcgtggccttccctgatatcggccctggctcttctgtacaggagcagacgccgctattcctggcggcgcgggaaggagcggtggaagtagcccagctactgctggggctgggggcagcccgagagctgcgggaccaggctgggctagcgccggcggacgtcgctcaccaacgtaaccactgggatctgctgacgctgctggaaggggctgggccaccagaggcccgtcacaaagccacgccgggccgcgaggctgggcccttcccgcgcgcacggacggtgtcagtaagcgtgcccccgcatgggggcggggctctgccgcgctgccggacgctgtcagccggagcaggccctcgtgggggcggagcttgtctgcaggctcggacttggtccgtagacttggctgcgcgggggggcggggcctattctcattgccggagcctctcgggagtaggagcaggaggaggcccgacccctcgcggccgtaggttttctgcaggcatgcgcgggcctcggcccaaccctgcgataatgcgaggaagatacggagtggctgccgggcgcggaggcagggtctcaacggatgactggccctgtgattgggtggccctgggagcttgcggttctgcctccaacattccgatcccgcctccttgccttactccgtccccggagcggggatcacctcaacttgactgtggtcccccagccctccaagaaatgcccataaaccaaggaggagagggtaaaaaatagaagaatacatggtagggaggaattccaaaaatgattacccattaaaaggcaggctggaaggccttcctggttttaagatggatcccccaaaatgaagggttgtgagtttagtttctctcctaaaatgaatgtatgcccaccagagcagacatcttccacgtggagaagctgcagctctggaaagagggtttaagatgctaggatgaggcaggcccagtcctcctccagaaaataagacaggccacaggagggcagagtggagtggaaatacccctaagttggaaccaagaattgcaggcatatgggatgtaagatgttctttcctatatatggtttccaaagggtgcccctatgatccattgtccccactgcccacaaatggctgacaaatatttattgggcacctactatgtgccaggcactgtgtaggtgctgaaaagtggccaagggccacccccgctgatgactccttgcattccctcccctcacaacaaagaactccactgtggggatgaagcgcttcttctagccactgctatcgctatttaagaaccctaaatctgtcacccataataaagctgatttgaagtgttaaaaatttt

SEQ ID NO: 291402 - DNA, 4020 bp, Homo sapiens
  misc_feature (2969)..(2969): n is a, c, g, or t
gccggccgcgtcgaccctgccccagtgagagctctgagggtccctgcctgaagagggacagggaccggggcttggagaaggggctgtggaatgcagcccccttcactgctgctgctgctgctgctgctgctgctgctatgtgtctcagtggtcagacccagagggctgctgtgtgggagtttcccagaaccctgtgccaatggaggcacctgcctgagcctgtctctgggacaagggacctgccagtgtgcccctggcttcctgggtgagacgtgccagtttcctgacccctgccagaacgcccagctctgccaaaatggaggcagctgccaagccctgcttcccgctcccctagggctccccagctctccctctccattgacacccagcttcttgtgcacttgcctccctggcttcactggtgagagatgccaggccaagcttgaagacccttgtcctccctccttctgttccaaaaggggccgctgccacatccaggcctcgggccgcccacagtgctcctgcatgcctggatggacaggtgagcagtgccagcttcgggacttctgttcagccaacccatgtgttaatggaggggtgtgtctggccacatacccccagatccagtgccactgcccaccgggcttcgagggccatgcctgtgaacgtgatgtcaacgagtgcttccaggacccaggaccctgccccaaaggcacctcctgccataacaccctgggctccttccagtgcctctgccctgtggggcaggagggtccacgttgtgagctgcgggcaggaccctgccctcctaggggctgttcgaatgggggcacctgccagctgatgccagagaaagactccacctttcacctctgcctctgtcccccaggtttcataggcccagactgtgaggtgaatccagacaactgtgtcagccaccagtgtcagaatgggggcacttgccaggatgggctggacacctacacctgcctctgcccagaaacctggacaggctgggactgctccgaagatgtggatgagtgtgagacccagggtccccctcactgcagaaacgggggcacctgccagaactctgctggtagctttcactgcgtgtgtgtgagtggctggggcggcacaagctgtgaggagaacctggatgactgtattgctgccacctgtgccccgggatccacctgcattgaccgggtgggctctttctcctgcctctgcccacctggacgcacaggactcctgtgccacttggaagacatgtgtctgagccagccgtgccatggggatgcccaatgcagcaccaaccccctcacaggctccacactctgcctgtgtcagcctggctattcggggcccacctgccaccaggacctggacgagtgtctgatggcccagcaaggcccaagtccctgtgaacatggcggttcctgcctcaacactcctggctccttcaactgcctctgtccacctggctacacaggctcccgttgtgaggctgatcacaatgagtgcctctcccagccctgccacccaggaagcacctgtctggacctacttgccaccttccactgcctctgcccgccaggcttagaagggcagctctgtgaggtggagaccaacgagtgtgcctcagctccctgcctgaaccacgcggattgccatgacctgctcaacggcttccagtgcatctgcctgcctggattctccggcacccgatgtgaggaggatatcgatgagtgcagaagctctccctgtgccaatggtgggcagtgccaggaccagcctggagccttccactgcaagtgtctcccaggctttgaagggccacgctgtcaaacagaggtggatgagtgcctgagtgacccatgtcccgttggagccagctgccttgatcttccaggagccttcttttgcctctgcccctctggtttcacaggccagctctgtgaggttcccctgtgtgctcccaacctgtgccagcccaagcagatatgtaaggaccagaaagacaaggccaactgcctctgtcctgatggaagccctggctgtgccccacctgaggacaactgcacctgccaccacgggcactgccagagatcctcatgtgtgtgtgacgtgggttggacggggccagagtgtgaggcagagctagggggctgcatctctgcaccctgtgcccatggggggacctgctacccccagccctctggctacaactgcacctgccctacaggctacacaggacccacctgtagtgaggagatgacagcttgtcactcagggccatgtctcaatggcggctcctgcaaccctagccctggaggctactactgcacctgccctccaagccacacagggccccagtgccaaaccagcactgactactgtgtgtctgccccgtgcttcaatgggggtacctgtgtgaacaggcctggcaccttctcctgcctctgtgccatgggcttccagggcccgcgctgtgagggaaagctccgccccagctgtgcagacagactctgatggacttatgtgcccagaagccctgcccacgcaattcccactgcctccagactgggccctccttccactgcttgtgcctccagggatggaccgggcctctctgcaaccttccactgtcctcctgccagaaggctgcactgagccaaggcatagacgtctcttccctttgccacaatggaggcctctgtgtcgacagcggcccctcctatttctgccactgcccccctggattccaaggcagcctgtgccaggatcacgtgaacccatgtgagtccaggccttgccagaacggggccacctgcatggcccagcccagtgggtatctctgccagtgtgccccaggctacgatggacagaactgctcaaaggaactcgatgcttgtcagtcccaaccctgtcacaaccatggaacctgtactcccaaacctggaggnttccactgtgcctgccctccaggctttgtggggctacgctgtgagggagacgtggacgagtgtctggaccagccctgccaccccacaggcactgcagcctgccactctctggccaatgccttctactgccagtgtctgcctggacacacaggccagtggtgtgaggtggagatagacccctgccacagccaaccctgctttcatggagggacctgtgaggccacagcaggatcacccctgggtttcatctgccactgccccaaggcaagtgatcacaaatctgccttctctgttgccccctatgctgacaaggcaagaatacctcagttggaatcccagaagggactgtgggtgagcactgatgtggaaattattggaaaaagccatgccaagctcacagtgggaagtgtctctcagaagcagtcaaaggcaaggcaggatcagttgatagcatgaatggaattttcaaaaatcacaggcgttgcctaagggaaggtcaggagctccccaagctcaagctgcgtggtgggtggcctcagataggttattttaactctgtgtgtttgtatatgtatttatggacctcagatgcatggaattagactaatcttaagctttggttcctgatacactgacattggtttatgcctggtcttcttttattttattattctaacaatgtaacacccatgaacctaacccaagaatttcaatattaataataacttacatctacttaagtcctcctcctgtatcctgttccctctccagaggaagaggaagacatatgatcctatttctaaggagtaagataataatataacagccggccgggcacagtggctcacgcctgtaatcccagcactttgggaggccgaggcaggcggatcacctgaggtcgggcattcgagaccagcctgacaaacatggagaaaccctgtctctactaaaaatacaaattagctgggcgtggtggtgcatggctgtaatcccagctattgggaaggctgaggcaggagaattgcttgaacccgggaggcagaggttgcaa

SEQ ID NO: 291403 - DNA, 1723 bp, Homo sapiens
gccggccgcgtcgaccctgccccagtgagagctctgagggtccctgcctgaagagggacagggaccggggcttggagaaggggctgtggaatgcagcccccttcactgctgctgctgctgctgctgctgctgctgctatgtgtctcagtggtcagacccagagggctgctgtgtgggagtttcccagaaccctgtgccaatggaggcacctgcctgagcctgtctctgggacaagggacctgccagtgtgcccctggcttcctgggtgagacgtgccagtttcctgacccctgccagaacgcccagctctgccaaaatggaggcagctgccaagccctgcttcccgctcccctagggctccccagctctccctctccattgacacccagcttcttgtgcacttgcctccctggcttcactggtgagagatgccaggccaagcttgaagacccttgtcctccctccttctgttccaaaaggggccgctgccacatccaggcctcgggccgcccacagtgctcctgcatgcctggatggacaggtgagcagtgccagcttcgggacttctgttcagccaacccatgtgttaatggaggggtgtgtctggccacatacccccagatccagtgccactgcccaccgggcttcgagggccatgcctgtgaacgtgatgtcaacgagtgcttccaggacccaggaccctgccccaaaggcacctcctgccataacaccctgggctccttccagtgcctctgccctgtggggcaggagggtccacgttgtgagctgcgggcaggaccctgccctcctaggggctgttcgaatgggggcacctgccagctgatgccagagaaagactccacctttcacctctgcctctgtcccccaggtttcataggcccagactgtgaggtgaatccagacaactgtgtcagccaccagtgtcagaatgggggcacttgccaggatgggctggacacctacacctgcctctgcccagaaacctggacaggctgggactgctccgaagatgtggatgagtgtgagacccagggtccccctcactgcagaaacgggggcacctgccagaactctgctggtagctttcactgcgtgtgtgtgagtggctggggcggcacaagctgtgaggagaacctggatgactgtattgctgccacctgtgccccgggatccacctgcattgaccgggtgggctctttctcctgcctctgcccacctggacgcacaggactcctgtgccacttggaagacatgtgtctgagccagccgtgccatggggatgcccaatgcagcaccaaccccctcacaggctccacactctgcctgtgtcagcctggctattcggggcccacctgccaccaggacctggacgagtgtctgatggcccagcaaggcccaagtccctgtgaacatggcggttcctgcctcaacactcctggctccttcaactgcctctgtccacctggctacacaggctcccgttgtgaggctgatcacaatgagtgcctctcccagccctgccacccaggaagcacctgtctggacctacttgccaccttccactgcctctgcccgccagttttaccaagtcacagactgtgtgagatcgacggcccagtgacaagcttcaagccccacgtggaacctactagagatccccgaatgtctgcccatctccatggagtccctggtcagatttctc

SEQ ID NO: 291404 - DNA, 388 bp, Homo sapiens
ccctaggggctcttctcgtcctccagctcatccggcgtcgacgccgagagcatggagctctctggctgccccctggtttcactcgacggcctcggactcagtcagctccccaccgacgccggcccccactaggcgaggacagcattggtctcaagtgagaatgaggagaaacccaggctcaggaaggggagtctctcctatggcgatatttacaatcagaaaagataagaaatactattgcagaagtcaaagataggggaaggagagaggggtgggaagcctgctggaaattttggagaccctgatggtcataattccgtgtaacctctacccacccattcctttccagggcactgaagccaaaggcagaagttgatgaggatggagt

SEQ ID NO: 291405 - DNA, 1731 bp, Homo sapiens
cggtggtctcctgggcaacgcttcccgcctttgagggaccagccggcccgaatagcccttcccccaaggccagaacccgtgggaaaccggaacccaggcgtctggcccccaactggggtaacaacctcccacgtcgtcccctagggaaaactgcgctgcactgggctgctgccgtgaacaacgcccgagccgcccgctcgcttctccaggccggagccgataaagatgcccaggacaacagggttagatgggacagagggcttcccacaaaacagtcaggcgcacgagagatggaaagtgcggtaacccgcaaagcctgaagggataggggccagtggtcgcgcaagtgaaggcagaaaggcccagtcctgtgggcgtggccttccctgatatcggccctggctcttctgtacaggagcagacgccgctattcctggcggcgcgggaaggagcggtggaagtagcccagctactgctggggctgggggcagcccgagagctgcgggaccaggctgggctagcgccggcggacgtcgctcaccaacgtaaccactgggatctgctgacgctgctggaaggggctgggccaccagaggcccgtcacaaagccacgccgggccgcgaggctgggcccttcccgcgcgcacggacggtgtcagtaagcgtgcccccgcatgggggcggggctctgccgcgctgccggacgctgtcagccggagcaggccctcgtgggggcggagcttgtctgcaggctcggacttggtccgtagacttggctgcgcgggggggcggggcctattctcattgccggagcctctcgggagtaggagcaggaggaggcccgacccctcgcggccgtaggttttctgcaggcatgcgcgggcctcggcccaaccctgcgataatgcgaggaagatacggagtggctgccgggcgcggaggcagggtctcaacggatgactggccctgtgattgggtggccctgggagcttgcggttctgcctccaacattccgatcccgcctccttgccttactccgtccccggagcggggatcacctcaacttgactgtggtcccccagccctccaagaaatgcccataaaccaaggaggagagggtaaaaaatagaagaatacatggtagggaggaattccaaaaatgattacccattaaaaggcaggctggaaggccttcctggttttaagatggatcccccaaaatgaagggttgtgagtttagtttctctcctaaaatgaatgtatgcccaccagagcagacatcttccacgtggagaagctgcagctctggaaagagggtttaagatgctaggatgaggcaggcccagtcctcctccagaaaataagacaggccacaggagggcagagtggagtggaaatacccctaagttggaaccaagaattgcaggcatatgggatgtaagatgttctttcctatatatggtttccaaagggtgcccctatgatccattgtccccactgcccacaaatggctgacaaatatttattgggcacctactatgtgccaggcactgtgtaggtgctgaaaagtggccaagggccacccccgctgatgactccttgcattccctcccctcacaacaaagaactccactgtggggatgaagcgcttcttctagccactgctatcgctatttaagaaccctaaatctgtcacccataataaagctgatttgaagtgttaaaaatttt

SEQ ID NO: 291406 - DNA, 6616 bp, Homo sapiens
  misc_feature (2969)..(2969): n is a, c, g, or t
  misc_feature (4145)..(4145): n is a, c, g, or t
gccggccgcgtcgaccctgccccagtgagagctctgagggtccctgcctgaagagggacagggaccggggcttggagaaggggctgtggaatgcagcccccttcactgctgctgctgctgctgctgctgctgctgctatgtgtctcagtggtcagacccagagggctgctgtgtgggagtttcccagaaccctgtgccaatggaggcacctgcctgagcctgtctctgggacaagggacctgccagtgtgcccctggcttcctgggtgagacgtgccagtttcctgacccctgccagaacgcccagctctgccaaaatggaggcagctgccaagccctgcttcccgctcccctagggctccccagctctccctctccattgacacccagcttcttgtgcacttgcctccctggcttcactggtgagagatgccaggccaagcttgaagacccttgtcctccctccttctgttccaaaaggggccgctgccacatccaggcctcgggccgcccacagtgctcctgcatgcctggatggacaggtgagcagtgccagcttcgggacttctgttcagccaacccatgtgttaatggaggggtgtgtctggccacatacccccagatccagtgccactgcccaccgggcttcgagggccatgcctgtgaacgtgatgtcaacgagtgcttccaggacccaggaccctgccccaaaggcacctcctgccataacaccctgggctccttccagtgcctctgccctgtggggcaggagggtccacgttgtgagctgcgggcaggaccctgccctcctaggggctgttcgaatgggggcacctgccagctgatgccagagaaagactccacctttcacctctgcctctgtcccccaggtttcataggcccagactgtgaggtgaatccagacaactgtgtcagccaccagtgtcagaatgggggcacttgccaggatgggctggacacctacacctgcctctgcccagaaacctggacaggctgggactgctccgaagatgtggatgagtgtgagacccagggtccccctcactgcagaaacgggggcacctgccagaactctgctggtagctttcactgcgtgtgtgtgagtggctggggcggcacaagctgtgaggagaacctggatgactgtattgctgccacctgtgccccgggatccacctgcattgaccgggtgggctctttctcctgcctctgcccacctggacgcacaggactcctgtgccacttggaagacatgtgtctgagccagccgtgccatggggatgcccaatgcagcaccaaccccctcacaggctccacactctgcctgtgtcagcctggctattcggggcccacctgccaccaggacctggacgagtgtctgatggcccagcaaggcccaagtccctgtgaacatggcggttcctgcctcaacactcctggctccttcaactgcctctgtccacctggctacacaggctcccgttgtgaggctgatcacaatgagtgcctctcccagccctgccacccaggaagcacctgtctggacctacttgccaccttccactgcctctgcccgccaggcttagaagggcagctctgtgaggtggagaccaacgagtgtgcctcagctccctgcctgaaccacgcggattgccatgacctgctcaacggcttccagtgcatctgcctgcctggattctccggcacccgatgtgaggaggatatcgatgagtgcagaagctctccctgtgccaatggtgggcagtgccaggaccagcctggagccttccactgcaagtgtctcccaggctttgaagggccacgctgtcaaacagaggtggatgagtgcctgagtgacccatgtcccgttggagccagctgccttgatcttccaggagccttcttttgcctctgcccctctggtttcacaggccagctctgtgaggttcccctgtgtgctcccaacctgtgccagcccaagcagatatgtaaggaccagaaagacaaggccaactgcctctgtcctgatggaagccctggctgtgccccacctgaggacaactgcacctgccaccacgggcactgccagagatcctcatgtgtgtgtgacgtgggttggacggggccagagtgtgaggcagagctagggggctgcatctctgcaccctgtgcccatggggggacctgctacccccagccctctggctacaactgcacctgccctacaggctacacaggacccacctgtagtgaggagatgacagcttgtcactcagggccatgtctcaatggcggctcctgcaaccctagccctggaggctactactgcacctgccctccaagccacacagggccccagtgccaaaccagcactgactactgtgtgtctgccccgtgcttcaatgggggtacctgtgtgaacaggcctggcaccttctcctgcctctgtgccatgggcttccagggcccgcgctgtgagggaaagctccgccccagctgtgcagacagactctgatggacttatgtgcccagaagccctgcccacgcaattcccactgcctccagactgggccctccttccactgcttgtgcctccagggatggaccgggcctctctgcaaccttccactgtcctcctgccagaaggctgcactgagccaaggcatagacgtctcttccctttgccacaatggaggcctctgtgtcgacagcggcccctcctatttctgccactgcccccctggattccaaggcagcctgtgccaggatcacgtgaacccatgtgagtccaggccttgccagaacggggccacctgcatggcccagcccagtgggtatctctgccagtgtgccccaggctacgatggacagaactgctcaaaggaactcgatgcttgtcagtcccaaccctgtcacaaccatggaacctgtactcccaaacctggaggnttccactgtgcctgccctccaggctttgtggggctacgctgtgagggagacgtggacgagtgtctggaccagccctgccaccccacaggcactgcagcctgccactctctggccaatgccttctactgccagtgtctgcctggacacacaggccagtggtgtgaggtggagatagacccctgccacagccaaccctgctttcatggagggacctgtgaggccacagcaggatcacccctgggtttcatctgccactgccccaagggttttgaaggccccacctgcagccacagggccccttcctgcggcttccatcactgccaccacggaggcctgtgtctgccctcccctaagccaggcttcccaccacgctgtgcctgcctcagtggctatgggggtcctgactgcctgaccccaccagctcctaaaggctgtggccctccctccccatgcctatacaatggcagctgctcagagaccacgggcttggggggcccaggctttcgatgctcctgccctcacagctctccagggccccggtgtcagaaacccggagccaaggggtgtgagggcagaagtggagatggggcctgcgatgctggctgcagtggcccgggaggaaactgggatggaggggactgctctctgggagtcccagacccctggaagggctgcccctcccactctcggtgctggcttctcttccgggacgggcagtgccacccacagtgtgactctgaagagtgtctgtttgatggctacgactgtgagacccctccagcctgcactccagcctatgaccagtactgccatgatcacttccacaacgggcactgtgagaaaggctgcaacactgcagagtgtggctgggatggaggtgactgcaggcctgaagatggggacccagagtgggggccctccctggccctgctggtggtactgagccccccagccctagaccagcagctgtttgccctggcccgggtgctgtccctgactctgagggtaggactctgggtaaggaaggatcgtgatggcagggacatggtgtacccctatcctggggcccgggctgaagaaaagctaggaggaactcgggaccccacctatcaggagagagcagcccctcaaacgcagcccctgggcaaggagaccgactccctcagtgctgggttngtggtggtcatgggtgtggatttgtcccgctgtggccctgaccacccggcatcccgctgtccctgggaccctgggcttctactccgcttccttgctgcgatggctgcagtgggagccctggagcccctgctgcctggaccactgctggctgtccaccctcatgcagggaccgcaccccctgccaaccagcttccctggcctgtgctgtgctccccagtggccggggtgattctcctggccctaggggctcttctcgtcctccagctcatccggcgtcgacgccgagagcatggagctctctggctgccccctggtttcactcgacggcctcggactcagtcagctccccaccgacgccggcccccactaggcgaggacagcattggtctcaaggcactgaagccaaaggcagaagttgatgaggatggagttgtgatgtgctcaggccctgaggagggagaggaggtgggccaggctgaagaaacaggcccaccctccacgtgccagctctggtctctgagtggtggctgtggggcgctccctcaggcagccatgctaactcctccccaggaatctgagatggaagcccctgacctggacacccgtggacctgatggggtgacacccctgatgtcagcagtttgctgtggggaagtacagtccgggaccttccaaggggcatggttgggatgtcctgagccctgggaacctctgctggatggaggggcctgtccccaggctcacaccgtgggcactggggagacccccctgcacctggctgcccgattctcccggccaaccgctgcccgccgcctccttgaggctggagccaaccccaaccagccagaccgggcagggcgcacaccccttcatgctgctgtggctgctgatgctcgggaggtctgccagcttctgctccgtagcagacaaactgcagtggacgctcgcacagaggacgggaccacacccttgatgctggctgccaggctggcggtggaagacctggttgaagaactgattgcagcccaagcagacgtgggggccagagataaatgggggaaaactgcgctgcactgggctgctgccgtgaacaacgcccgagccgcccgctcgcttctccaggccggagccgataaagatgcccaggacaacagggagcagacgccgctattcctggcggcgcgggaaggagcggtggaagtagcccagctactgctggggctgggggcagcccgagagctgcgggaccaggctgggctagcgccggcggacgtcgctcaccaacgtaaccactgggatctgctgacgctgctggaaggggctgggccaccagaggcccgtcacaaagccacgccgggccgcgaggctgggcccttcccgcgcgcacggacggtgtcagtaagcgtgcccccgcatgggggcggggctctgccgcgctgccggacgctgtcagccggagcaggccctcgtgggggcggagcttgtctgcaggctcggacttggtccgtagacttggctgcgcgggggggcggggcctattctcattgccggagcctctcgggagtaggagcaggaggaggcccgacccctcgcggccgtaggttttctgcaggcatgcgcgggcctcggcccaaccctgcgataatgcgaggaagatacggagtggctgccgggcgcggaggcagggtctcaacggatgactggccctgtgattgggtggccctgggagcttgcggttctgcctccaacattccgatcccgcctccttgccttactccgtccccggagcggggatcacctcaacttgactgtggtcccccagccctccaagaaatgcccataaaccaaggaggagagggtaaaaaatagaagaatacatggtagggaggaattccaaaaatgattacccattaaaaggcaggctggaaggccttcctggttttaagatggatcccccaaaatgaagggttgtgagtttagtttctctcctaaaatgaatgtatgcccaccagagcagacatcttccacgtggagaagctgcagctctggaaagagggtttaagatgctaggatgaggcaggcccagtcctcctccagaaaataagacaggccacaggagggcagagtggagtggaaatacccctaagttggaaccaagaattgcaggcatatgggatgtaagatgttctttcctatatatggtttccaaagggtgcccctatgatccattgtccccactgcccacaaatggctgacaaatatttattgggcacctactatgtgccaggcactgtgtaggtgctgaaaagtggccaagggccacccccgctgatgactccttgcattccctcccctcacaacaaagaactccactgtggggatgaagcgcttcttctagccactgctatcgctatttaagaaccctaaatctgtcacccataataaagctgatttgaagtgttaaaaatttt

SEQ ID NO: 291407 - DNA, 1558 bp, Homo sapiens
cggtggtctcctgggcaacgcttcccgcctttgagggaccagccggcccgaatagcccttcccccaaggccagaacccgtgggaaaccggaacccaggcgtctggcccccaactggggtaacaacctcccacgtcgtcccctagggaaaactgcgctgcactgggctgctgccgtgaacaacgcccgagccgcccgctcgcttctccaggccggagccgataaagatgcccaggacaacagggagcagacgccgctattcctggcggcgcgggaaggagcggtggaagtagcccagctactgctggggctgggggcagcccgagagctgcgggaccaggctgggctagcgccggcggacgtcgctcaccaacgtaaccactgggatctgctgacgctgctggaaggggctgggccaccagaggcccgtcacaaagccacgccgggccgcgaggctgggcccttcccgcgcgcacggacggtgtcagtaagcgtgcccccgcatgggggcggggctctgccgcgctgccggacgctgtcagccggagcaggccctcgtgggggcggagcttgtctgcaggctcggacttggtccgtagacttggctgcgcgggggggcggggcctattctcattgccggagcctctcgggagtaggagcaggaggaggcccgacccctcgcggccgtaggttttctgcaggcatgcgcgggcctcggcccaaccctgcgataatgcgaggaagatacggagtggctgccgggcgcggaggcagggtctcaacggatgactggccctgtgattgggtggccctgggagcttgcggttctgcctccaacattccgatcccgcctccttgccttactccgtccccggagcggggatcacctcaacttgactgtggtcccccagccctccaagaaatgcccataaaccaaggaggagagggtaaaaaatagaagaatacatggtagggaggaattccaaaaatgattacccattaaaaggcaggctggaaggccttcctggttttaagatggatcccccaaaatgaagggttgtgagtttagtttctctcctaaaatgaatgtatgcccaccagagcagacatcttccacgtggagaagctgcagctctggaaagagggtttaagatgctaggatgaggcaggcccagtcctcctccagaaaataagacaggccacaggagggcagagtggagtggaaatacccctaagttggaaccaagaattgcaggcatatgggatgtaagatgttctttcctatatatggtttccaaagggtgcccctatgatccattgtccccactgcccacaaatggctgacaaatatttattgggcacctactatgtgccaggcactgtgtaggtgctgaaaagtggccaagggccacccccgctgatgactccttgcattccctcccctcacaacaaagaactccactgtggggatgaagcgcttcttctagccactgctatcgctatttaagaaccctaaatctgtcacccataataaagctgatttgaagtgttaaaaatttt

SEQ ID NO: 291408 - DNA, 1525 bp, Homo sapiens
ctcctcatagcttatgggtggtggcggctgggctgaagacggcggacaggacatcccgcccggccgcctgtggtcaccctcccgcgcaggcgctctcctggaagacccagcacctggagttccgattggctctgcgtgaggggcgggcctttgcgacatcttggggggcgccttcggtgacgtcacaggggcgggccttctgtcacgtcacaagggctgtacagtgcctggagctgggcagtcttctcagagtggagcctggtaaccgcgacctccccgccagttcctgtgtgttgctggctggaaaggggtagttgacaaactcccacccagcacagtatttatgtcggtcaaaaatggaaaactatgtgtccgggcgtggccaggaaggaggatcccttcaggccaagagcagcctagcaatatggcgcaaccccacctctgtagtccaacctcagcctcccagctacttgaaccccaagattcaaggctccaatgatctgtgatctcaccacagcactcctgcctgcgagactgagagaccaaagaccaacgaactaccacagctggcagttccggaacctgccaatgatgggcaatggaaagtgagggagttcaactctgttttcagagaaatggaataatcatatcgctgatctatgtaaacaagttgaagaattgtctgacagaaaatacgtttcgcttttgttgttctggctggagtgcaatggcgcaatctcggctcaccgcaacctccgcctcccaggttcaagcgattctcctgcctcaacctccagagtagctaggactacaggtgtgcaccaccacgcgcagacatgaacttgtgaattcaacaagtgaagatttacaacttgataaaccagctgcaggagtaaaggaagaatggtatgccagaatcactaaatgaagaaagatggtggatcagcttttctgcaaaaaaatttgctgaggccttggggagcgctgaggccttggggagcactgaagccaaggctctactgtaccaaaaatttgaaggccatgcgaatgatctgtatgtggaaggactaccagaaaacattcctttcagaagtccctcgtggtatggaatcgcaaggctggaaaacatcattcaagtgggcaatcgaattaaatttcttattaaaagtaactccagtcaaactccattgtctccaagtcgactttcgtcctcacccacaactcctccacacaagccctgaacatgtgtccatgtttctcctatttacctcaagcacgtatggagtgaattcttaccttttaatattgccatggcattcacattgaatgtaagttgaactctctcatatggtagctgggttcagattcccttgacaatttccagttctaaccctcacagttcctcagtgtggctggcccagatactgaccctacacagttgcctccccctggtgactacccgccatggaaccgttggatacaatctgcatgactcaccccacagacctcacagcccacttggaca

SEQ ID NO: 291409 - DNA, 570 bp, Homo sapiens
gcaaatctacttctaggtatctacccaaaggtactgaaagcaaggactggaacagatgtctgtataccaatgttccaggtgtggaaagggaagggaccatatttcatccccgtgtgcgcccagccctggcccagaagtctctcaatcgctactgagtgaatgcacgaagccgctccattagcccagttctcagtgagctcttcaccatacagttgatagtttgcttctataccctagaatgctgttctccaattgcttctgctcatcaaatctcctctcccgacacttcagaaattccctgaggatccagattacatttccaacactttcattcacataacactgtctgggacccagcaaactctcaaatgtccgctctacttactcccagtgaaatacatttcgttttcccgccgctgaagatgtcactcagggtctgccaacacgatgccacaagtacccaagaggagcagctcaaaagcatgatcaggattcaaagcatcagtttaatcttaggcattgagaaatgctaaatgtcacataccattaataaataaatcttaaacagcc

SEQ ID NO: 291410 - DNA, 3358 bp, Homo sapiens
gagaagtgtgggctacccggccactgccctggagctgtggtgactgctgcgtttttctcccatgcacttgcacgtccaggactcctgggagaacttgggccacactccttccttgccctcttgagctcattcgtcaccctgttgggtgagcacagccctagctcaggccactgggcaagccacaccatccaaagaggaggtcctctgccccaggacccccacaccaccccagctccctgttttgctgaggcctggagcccccatggcctcactgagccgagccctacgtgtggctgctgcccaccctcgccagagccctacccggggcatggggccatgcaacctgtccagcgcagctggccccacagccgagaagagtgtgccatatcagcggaccctgaaggagggacagggcacctcggtggtggcccaaggcccaagccggcccctgcccagcacggccaacgtggtggtcattggtggaggcagcttgggctgccagaccctgtaccacctggccaagctgggcatgagtggggcggtgctgctggagcgggagcggctgacctccgggaccacctggcacacggcaggcctgctgtggcagctgcggcccagtgacgtggaggtggagcttctggcccacactcggcgggtggtgagccgggagctggaggaggagacgggactacacacgggctggatccagaatgggggcctcttcatcgcgtccaaccggcagcgcctggacgagtacaagaggctcatgtcgctgggcaaggcgtatggtgtggaatcccatgtgctgagcccggcagagaccaagactctgtacccgctgatgaatgtggacgacctctacgggaccctgtatgtgccgcacgacggtaccatggaccccgctggcacctgtaccaccctcgccagggcagcttctgcccgaggagcacaggtcattgagaactgcccagtgaccggcattcgtgtgtggacggatgattttggggtgcggcgggtcgcgggtgtggagactcagcatggttccatccagacaccctgcgtggtcaactgtgcaggagtgtgggcaagtgctgtgggccggatggctggagtcaaggtcccgctggtggccatgcaccatgcctatgtcgtcaccgagcgcatcgaggggattcagaacatgcccaatgtccgtgatcatgatgcctctgtctacctccgcctccaaggggatgccttgtctgtgggtggctatgaggccaaccccatcttttgggaggaggtgtcagacaagtttgccttcggcctctttgacctggactgggaggtgttcacccagcacattgaaggcgccatcaacagggtccccgtgctggagaagacaggaatcaagtccacggtctgcggccctgaatccttcacgcccgaccacaagcccctgatgggggaggcacctgagctccgagggttcttcctgggctgtggcttcaacagcgcaggaatgatgctgggtggtggctgtgggcaggagctggcccactggatcatccatgggcgcccggagaaggacatgcatggctatgacatcaggcgcttccatcactcgctcacggaccacccccgctggatccgagagcgaagccatgagtcctacgccaagaactactccgtcgtcttcccccacgatgagccgctggccgggcgcaacatgaggagagacccgctgcatgaggaactccttggacaaggctgcgtgttccaggagcggcatggctgggagcgaccgggatggtttcatccccgaggcccagctccggtcctcgagtacgactactacggggcttacgggagccgcgcgcacgaggactacgcctaccgcaggctgctggcagacgagtacaccttcgccttcccgccccaccacgacacgatcaagaaggagtgcctggcctgcagaggggccgccgctgtgtttgacatgtcctacttcgggaagttctacctggtggggctggatgcaaggaaggctgccgactggctcttctccgcagatgtcagccgacccccaggctccaccgtgtacacgtgcatgctcaaccaccatgggggcaccgagagtgacctgactgtcagccgcctggcacccagccaccaggcctccccgctggcccccgcctttgaaggggacggttactacctggccgtgggcggggccgtggcccagcacaactggtcccacatcaccaccgtgctgcaggaccagaagtcccagtgccagctcatcgacagctccgaggacctgggtatgatcagtatccagggcccagccagccgagccattttgcaggaggtgctggacgcagacctgagcaacgaggccttcccgttctccacccacaagctactgagagccgcagggcacctggtccgagccatgcggctgtcctttgtcggggagctgggctgggagctgcacattccaaaggcgtcctgcgtgcctgtgtaccgggctgtgatggccgcgggtgccaagcacggcctcatcaacgcagggtaccgcgccattgactccctgagcattgagaaaggctaccggcactggcacgcggacctgcggccagacgacagccccctggaggcaggcctggccttcacctgcaagctcaagtcgccggtgcccttcctggggagggaggccctggagcagcagcgggccgcaggcctccgccggcgcctggtgtgcttcaccatggaggacaaagtacccatgtttggcctggaggccatctggaggaacggccaagtggtgggccatgtccggagggctgactttgggttcgccatcgacaagaccatcgcctacggttacatccatgaccccagcggtgggccggtctcgctggactttgtgaagagcggggactatgccctggagagaatgggggtgacctatggtgcccaggctcacctgaagtcgcccttcgaccccaacaacaagagggtgaagggaatctactgagggctcagaccacatgccccatcccatgctgtccatccattctcacaggtcccaaatggccctgggtcccaggaccctggacccagccagaacttgtgccctccctgtccttagcctaggcctagtcctgcgaaaacccccaaaccagatacggacagagaccaagatggcccatcctgtggtcactgactggaaggcagtctctaatccaccccaatcctcccagaaagcaaacctgtaagtgtcttgggctcagggaccatggcttgtagccctttccaagcttctagaaggtgcttagtaaatacttgataagccccacgtgaaaacaaaaaaaaa

SEQ ID NO: 291411 - DNA, 1475 bp, Homo sapiens
cctggagttccggccaggccactgcttgggaagcaagaaggtgaaggcacctctgctgggccaagcactcttagggccgaggggcactgcagctgacaagagctccctgttttgctgaggcctggagcccccatggcctcactgagccgagccctacgtgtggctgctgcccaccctcgccagagccctacccggggcatggggccatgcaacctgtccagcgcagctggccccacagccgagaagagtgtgccatatcagcggaccctgaaggagggacagggcacctcggtggtggcccaaggcccaagccggcccctgcccagcacggccaacgtggtggtcattggtggaggcagcttgggctgccagaccctgtaccacctggccaagctgggcatgagtggggcggtgctgctggagcgggagcggctgacctccgggaccacctggcacacggcaggcctgctgtggcagctgcggcccagtgacgtggaggtggagcttctggcccacactcggcgggtggtgagccgggagctggaggaggagacgggactacacacgggctggatccagaatgggggcctcttcatcgcgtccaaccggcagcgcctggacgagtacaagaggctcatgtcgctgggcaaggcgtatggtgtggaatcccatgtgctgagcccggcagagaccaagactctgtacccgctgatgaatgtggacgacctctacgggaccctgtatgtgccgcacgacggtaccatggaccccgctggcacctgtaccaccctcgccagggcagcttctgcccgaggagcacaggtcattgagaactgcccagtgaccggcattcgtgtgtggacggatgattttggggtgcggcgggtcgcgggtgtggagactcagcatggttccatccagacaccctgcgtggtcaactgtgcaggagtgtgggcaagtgctgtgggccggatggctggagtcaaggtcccgctggtggccatgcaccatgcctatgtcgtcaccgagcgcatcgaggggattcagaacatgcccaatgtccgtgatcatgatgcctctgtctacctccgcctccaaggggatgccttgtctgtgggtggctatgaggccaaccccatcttttgggaggaggtgtcagacaagtttgccttcggcctctttgacctggactgggaggtgttcacccagcacattgaaggcgccatcaacagggtccccgtgctggagaagacaggaatcaagtccacggtctgcggccctgaatccttcacgcccgaccacaagcccctgatgggggaggcacctgagctccgagggttcttcctgggctgtggcttcaacagcgcagggaaggtccagacagtcctgccactcctgtttaccgtcaacgtctatctgtatctgtaggtcaggaggacaaacataggtcaataaatatgtaatgttagtgaacg

SEQ ID NO: 291412 - DNA, 2384 bp, Homo sapiens
cctggagttccggccaggccactgcttgggaagcaagaaggtgaaggcacctctgctgggccaagcactcttagggccgaggggcactgcagctgacaagagctccctgttttgctgaggcctggagcccccatggcctcactgagccgagccctacgtgtggctgctgcccaccctcgccagagccctacccggggcatggggccatgcaacctgtccagcgcagctggccccacagccgagaagagtgtgccatatcagcggaccctgaaggagggacagggcacctcggtggtggcccaaggcccaagccggcccctgcccagcacggccaacgtggtggtcattggtggaggcagcttgggctgccagaccctgtaccacctggccaagctgggcatgagtggggcggtgctgctggagcgggagcggctgacctccgggaccacctggcacacggcaggcctgctgtggcagctgcggcccagtgacgtggaggtggagcttctggcccacactcggcgggtggtgagccgggagctggaggaggagacgggactacacacgggctggatccagaatgggggcctcttcatcgcgtccaaccggcagcgcctggacgagtacaagaggctcatgtcgctgggcaaggcgtatggtgtggaatcccatgtgctgagcccggcagagaccaagactctgtacccgctgatgaatgtggacgacctctacgggaccctgtatgtgccgcacgacggtaccatggaccccgctggcacctgtaccaccctcgccagggcagcttctgcccgaggagcacaggtcattgagaactgcccagtgaccggcattcgtgtgtggacggatgattttggggtgcggcgggtcgcgggtgtggagactcagcatggttccatccagacaccctgcgtggtcaactgtgcaggagtgtgggcaagtgctgtgggccggatggctggagtcaaggtcccgctggtggccatgcaccatgcctatgtcgtcaccgagcgcatcgaggggattcagaacatgcccaatgtccgtgatcatgatgcctctgtctacctccgcctccaaggggatgccttgtctgtgggtggctatgaggccaaccccatcttttgggaggaggtgtcagacaagtttgccttcggcctctttgacctggactgggaggtgttcacccagcacattgaaggcgccatcaacagggtccccgtgctggagaagacaggaatcaagtccacggtctgcggccctgaatccttcacgcccgaccacaagcccctgatgggggaggcacctgagctccgagggttcttcctgggctgtggcttcaacagcgcaggaatgatgctgggtggtggctgtgggcaggagctggcccactggatcatccatgggcgcccggagaaggacatgcatggctatgacatcaggcgcttccatcactcgctcacggaccacccccgctggatccgagagcgaagccatgagtcctacgccaagaactactccgtcgtcttcccccacgatgagccgctggccgggcgcaacatgaggagagacccgctgcatgaggaactccttggacaaggctgcgtgttccaggagcggcatggctgggagcgaccgggatggtttcatccccgaggcccagctccggtcctcgagtacgactactacggggcttacgggagccgcgcgcacgaggactacgcctaccgcaggctgctggcagacgagtacaccttcgccttcccgccccaccacgacacgatcaagaaggagtgcctggcctgcagaggggccgccgctgtgtttgacatgtcctacttcgggaagttctacctggtggggctggatgcaaggaaggctgccgactggctcttctccgcagatgtcagccgacccccaggctccaccgtgtacacgtgcatgctcaaccaccatgggggcaccgagagtgacctgactgtcagccgcctggcacccagccaccaggcctccccgctggcccccgcctttgaaggggacggttactacctggccgtgggcggggccgtggcccagcacaactggtcccacatcaccaccgtgctgcaggaccagaagtcccagtgccagctcatcgacagctccgaggacctgggtatgatcagtatccagggcccagccaggtgagagaggactgggagcccgcccctgggtgcacctgctgcctggacccaggtcctccaacaggcccttgggcagaacagcttgtccagaatgggccattctgaatagttaagcgctctggtaaaccagagatgccattctgaataaatatcttcaaagcactggaatgcagataagccggt

SEQ ID NO: 291413 - DNA, 1598 bp, Homo sapiens
cctggagttccggccaggccactgcttgggaagcaagaaggtgaaggcacctctgctgggccaagcactcttagggccgaggggcactgcagctgacaagagctccctgttttgctgaggcctggagcccccatggcctcactgagccgagccctacgtgtggctgctgcccaccctcgccagagccctacccggggcatggggccatgcaacctgtccagcgcagctggccccacagccgagaagagtgtgccatatcagcggaccctgaaggagggacagggcacctcggtggtggcccaaggcccaagccggcccctgcccagcacggccaacgtggtggtcattggtggaggcagcttgggctgccagaccctgtaccacctggccaagctgggcatgagtggggcggtgctgctggagcgggagcggctgacctccgggaccacctggcacacggcaggcctgctgtggcagctgcggcccagtgacgtggaggtggagcttctggcccacactcggcgggtggtgagccgggagctggaggaggagacgggactacacacgggctggatccagaatgggggcctcttcatcgcgtccaaccggcagcgcctggacgagtacaagaggctcatgtcgctgggcaaggcgtatggtgtggaatcccatgtgctgagcccggcagagaccaagactctgtacccgctgatgaatgtggacgacctctacgggaccctgtatgtgccgcacgacggtaccatggaccccgctggcacctgtaccaccctcgccagggcagcttctgcccgaggagcacaggtcattgagaactgcccagtgaccggcattcgtgtgtggacggatgattttggggtgcggcgggtcgcgggtgtggagactcagcatggttccatccagacaccctgcgtggtcaactgtgcaggagtgtgggcaagtgctgtgggccggatggctggagtcaaggtcccgctggtggccatgcaccatgcctatgtcgtcaccgagcgcatcgaggggattcagaacatgcccaatgtccgtgatcatgatgcctctgtctacctccgcctccaaggggatgccttgtctgtgggtggctatgaggccaaccccatcttttgggaggaggcagtcaaatacagacccagggcagctggagggctttgcctcaaaacatccacagagaaggtctgcgcagtgtggagtgatgacctcagaagggcatgagagcacacaagtcctacgtccttcagcaaatgacactgccctcccaaccagctgctgcagcggcatttcccctggcctgggctgtttcccgggcagcttctggggttagggcagccctgcagccctgttctatgtgtatatgcatttagtccacacatggaacgactgagtggctactttgggctaaaaactgctttaatttctggagaaagagggaagctaagataaaagtccctgactctgggtgcctatattttggtggagagacatacaataaacaaacaaatggctgggcacggtggctcacacctgtaatcccagcactttgggaggctgaggtgggcgga

SEQ ID NO: 291414 - DNA, 854 bp, Homo sapiens
aacagcaaagtccactcctggttttgatgttttctattcatcccttttactcactcgaagcccgagccctgctgtccaggccaggtgctgggctggctctggggaccagcgtagtcctagtaggccagccctatctgcctggagccacggttgggtgtgcatcatgcagccccccattctcctccaggccgctgtggacgcgtccccaccctgcggtttctggggccccagctttctctactgcttcttccagcaaagtacccatgtttggcctggaggccatctggaggaacggccaagtggtgggccatgtccggagggctgactttgggttcgccatcgacaagaccatcgcctacggttacatccatgaccccagcggtgggccggtctcgctggactttgtgaagagcggggactatgccctggagagaatgggggtgacctatggtgcccaggctcacctgaagtcgcccttcgaccccaacaacaagagggtgaagggaatctactgagggctcagaccacatgccccatcccatgctgtccatccattctcacaggtcccaaatggccctgggtcccaggaccctggacccagccagaacttgtgccctccctgtccttagcctaggcctagtcctgcgaaaacccccaaaccagatacggacagagaccaagatggcccatcctgtggtcactgactggaaggcagtctctaatccaccccaatcctcccagaaagcaaacctgtaagtgtcttgggctcagggaccatggcttgtagccctttccaagcttctagaaggtgcttagtaaatacttgataagccccacgtgaaaacaaaaaaaaa

SEQ ID NO: 291415 - DNA, 1724 bp, Homo sapiens
gagaagtgtgggctacccggccactgccctggagctgtggtgactgctgcgtttttctcccatgcacttgcacgtccaggactcctgggagaacttgggccacactccttccttgccctcttgagctcattcgtcaccctgttgggtgagcacagccctagctcaggccactgggcaagccacaccatccaaagaggaggtcctctgccccaggacccccacaccaccccagctccctgttttgctgaggcctggagcccccatggcctcactgagccgagccctacgtgtggctgctgcccaccctcgccagagccctacccggggcatggggccatgcaacctgtccagcgcagctggccccacagccgagaagagtgtgccatatcagcggaccctgaaggagggacagggcacctcggtggtggcccaaggcccaagccggcccctgcccagcacggccaacgtggtggtcattggtggaggcagcttgggctgccagaccctgtaccacctggccaagctgggcatgagtggggcggtgctgctggagcgggagcggctgacctccgggaccacctggcacacggcaggcctgctgtggcagctgcggcccagtgacgtggaggtggagcttctggcccacactcggcgggtggtgagccgggagctggaggaggagacgggactacacacgggctggatccagaatgggggcctcttcatcgcgtccaaccggcagcgcctggacgagtacaagaggctcatgtcgctgggcaaggcgtatggtgtggaatcccatgtgctgagcccggcagagaccaagactctgtacccgctgatgaatgtggacgacctctacgggaccctgtatgtgccgcacgacggtaccatggaccccgctggcacctgtaccaccctcgccagggcagcttctgcccgaggagcacaggtcattgagaactgcccagtgaccggcattcgtgtgtggacggatgattttggggtgcggcgggtcgcgggtgtggagactcagcatggttccatccagacaccctgcgtggtcaactgtgcaggagtgtgggcaagtgctgtgggccggatggctggagtcaaggtcccgctggtggccatgcaccatgcctatgtcgtcaccgagcgcatcgaggggattcagagtttcactttgttgcccacactggagtacagtggcacagtgtcagctcactgcaacctccgcctcccgggttcaagcaattctcgtgcctcagcctcccatgtagctgggattaaatgtgcccgtcaccacacccggctgatttttttttgtattttagtagagacggagtttcaccatgttgccaaggctggtctcgaactcctgagctcaggcaatccacccatctcggacttccaaagtgctaggattacaggcgtgagccaccatgcttagctgattatgtaaacattgttaatacctgagcaagtagtgtccaactttttgtgtttcttggagttattaacagtttttgtcccagctgctcagtttcttttgtaactgttatgtgtgtgtgtgtaacattatcttcgtgccccaagacccatacccgttatcaatcactccccatttcccaccctgtccccagacttaggcaatcccaaatctgatttctgcctcgatggagtttcctattctggacgtttagtataaatggaatcacatg

SEQ ID NO: 291416 - DNA, 3228 bp, Homo sapiens
cctggagttccggccaggccactgcttgggaagcaagaaggtgaaggcacctctgctgggccaagcactcttagggccgaggggcactgcagctgacaagagctccctgttttgctgaggcctggagcccccatggcctcactgagccgagccctacgtgtggctgctgcccaccctcgccagagccctacccggggcatggggccatgcaacctgtccagcgcagctggccccacagccgagaagagtgtgccatatcagcggaccctgaaggagggacagggcacctcggtggtggcccaaggcccaagccggcccctgcccagcacggccaacgtggtggtcattggtggaggcagcttgggctgccagaccctgtaccacctggccaagctgggcatgagtggggcggtgctgctggagcgggagcggctgacctccgggaccacctggcacacggcaggcctgctgtggcagctgcggcccagtgacgtggaggtggagcttctggcccacactcggcgggtggtgagccgggagctggaggaggagacgggactacacacgggctggatccagaatgggggcctcttcatcgcgtccaaccggcagcgcctggacgagtacaagaggctcatgtcgctgggcaaggcgtatggtgtggaatcccatgtgctgagcccggcagagaccaagactctgtacccgctgatgaatgtggacgacctctacgggaccctgtatgtgccgcacgacggtaccatggaccccgctggcacctgtaccaccctcgccagggcagcttctgcccgaggagcacaggtcattgagaactgcccagtgaccggcattcgtgtgtggacggatgattttggggtgcggcgggtcgcgggtgtggagactcagcatggttccatccagacaccctgcgtggtcaactgtgcaggagtgtgggcaagtgctgtgggccggatggctggagtcaaggtcccgctggtggccatgcaccatgcctatgtcgtcaccgagcgcatcgaggggattcagaacatgcccaatgtccgtgatcatgatgcctctgtctacctccgcctccaaggggatgccttgtctgtgggtggctatgaggccaaccccatcttttgggaggaggtgtcagacaagtttgccttcggcctctttgacctggactgggaggtgttcacccagcacattgaaggcgccatcaacagggtccccgtgctggagaagacaggaatcaagtccacggtctgcggccctgaatccttcacgcccgaccacaagcccctgatgggggaggcacctgagctccgagggttcttcctgggctgtggcttcaacagcgcaggaatgatgctgggtggtggctgtgggcaggagctggcccactggatcatccatgggcgcccggagaaggacatgcatggctatgacatcaggcgcttccatcactcgctcacggaccacccccgctggatccgagagcgaagccatgagtcctacgccaagaactactccgtcgtcttcccccacgatgagccgctggccgggcgcaacatgaggagagacccgctgcatgaggaactccttggacaaggctgcgtgttccaggagcggcatggctgggagcgaccgggatggtttcatccccgaggcccagctccggtcctcgagtacgactactacggggcttacgggagccgcgcgcacgaggactacgcctaccgcaggctgctggcagacgagtacaccttcgccttcccgccccaccacgacacgatcaagaaggagtgcctggcctgcagaggggccgccgctgtgtttgacatgtcctacttcgggaagttctacctggtggggctggatgcaaggaaggctgccgactggctcttctccgcagatgtcagccgacccccaggctccaccgtgtacacgtgcatgctcaaccaccatgggggcaccgagagtgacctgactgtcagccgcctggcacccagccaccaggcctccccgctggcccccgcctttgaaggggacggttactacctggccgtgggcggggccgtggcccagcacaactggtcccacatcaccaccgtgctgcaggaccagaagtcccagtgccagctcatcgacagctccgaggacctgggtatgatcagtatccagggcccagccagccgagccattttgcaggaggtgctggacgcagacctgagcaacgaggccttcccgttctccacccacaagctactgagagccgcagggcacctggtccgagccatgcggctgtcctttgtcggggagctgggctgggagctgcacattccaaaggcgtcctgcgtgcctgtgtaccgggctgtgatggccgcgggtgccaagcacggcctcatcaacgcagggtaccgcgccattgactccctgagcattgagaaaggctaccggcactggcacgcggacctgcggccagacgacagccccctggaggcaggcctggccttcacctgcaagctcaagtcgccggtgcccttcctggggagggaggccctggagcagcagcgggccgcaggcctccgccggcgcctggtgtgcttcaccatggaggacaaagtacccatgtttggcctggaggccatctggaggaacggccaagtggtgggccatgtccggagggctgactttgggttcgccatcgacaagaccatcgcctacggttacatccatgaccccagcggtgggccggtctcgctggactttgtgaagagcggggactatgccctggagagaatgggggtgacctatggtgcccaggctcacctgaagtcgcccttcgaccccaacaacaagagggtgaagggaatctactgagggctcagaccacatgccccatcccatgctgtccatccattctcacaggtcccaaatggccctgggtcccaggaccctggacccagccagaacttgtgccctccctgtccttagcctaggcctagtcctgcgaaaacccccaaaccagatacggacagagaccaagatggcccatcctgtggtcactgactggaaggcagtctctaatccaccccaatcctcccagaaagcaaacctgtaagtgtcttgggctcagggaccatggcttgtagccctttccaagcttctagaaggtgcttagtaaatacttgataagccccacgtgaaaacaaaaaaaaa

SEQ ID NO: 291417 - DNA, 2025 bp, Homo sapiens
ggggggaggcacctgagctcccccatcagggcttgtggtcgggcgtgaaggattcagggccgcagaccgtggacttgattcctgtcttctccagcacggggacccctgatgggggaggcacctgagctccgagggttcttcctgggctgtggcttcaacagcgcaggaatgatgctgggtggtggctgtgggcaggagctggcccactggatcatccatgggcgcccggagaaggacatgcatggctatgacatcaggcgcttccatcactcgctcacggaccacccccgctggatccgagagcgaagccatgagtcctacgccaagaactactccgtcgtcttcccccacgatgagccgctggccgggcgcaacatgaggagagacccgctgcatgaggaactccttggacaaggctgcgtgttccaggagcggcatggctgggagcgaccgggatggtttcatccccgaggcccagctccggtcctcgagtacgactactacggggcttacgggagccgcgcgcacgaggactacgcctaccgcaggctgctggcagacgagtacaccttcgccttcccgccccaccacgacacgatcaagaaggagtgcctggcctgcagaggggccgccgctgtgtttgacatgtcctacttcgggaagttctacctggtggggctggatgcaaggaaggctgccgactggctcttctccgcagatgtcagccgacccccaggctccaccgtgtacacgtgcatgctcaaccaccatgggggcaccgagagtgacctgactgtcagccgcctggcacccagccaccaggcctccccgctggcccccgcctttgaaggggacggttactacctggccgtgggcggggccgtggcccagcacaactggtcccacatcaccaccgtgctgcaggaccagaagtcccagtgccagctcatcgacagctccgaggacctgggtatgatcagtatccagggcccagccagccgagccattttgcaggaggtgctggacgcagacctgagcaacgaggccttcccgttctccacccacaagctactgagagccgcagggcacctggtccgagccatgcggctgtcctttgtcggggagctgggctgggagctgcacattccaaaggcgtcctgcgtgcctgtgtaccgggctgtgatggccgcgggtgccaagcacggcctcatcaacgcagggtaccgcgccattgactccctgagcattgagaaaggctaccggcactggcacgcggacctgcggccagacgacagccccctggaggcaggcctggccttcacctgcaagctcaagtcgccggtgcccttcctggggagggaggccctggagcagcagcgggccgcaggcctccgccggcgcctggtgtgcttcaccatggaggacaaagtacccatgtttggcctggaggccatctggaggaacggccaagtggtgggccatgtccggagggctgactttgggttcgccatcgacaagaccatcgcctacggttacatccatgaccccagcggtgggccggtctcgctggactttgtgaagagcggggactatgccctggagagaatgggggtgacctatggtgcccaggctcacctgaagtcgcccttcgaccccaacaacaagagggtgaagggaatctactgagggctcagaccacatgccccatcccatgctgtccatccattctcacaggtcccaaatggccctgggtcccaggaccctggacccagccagaacttgtgccctccctgtccttagcctaggcctagtcctgcgaaaacccccaaaccagatacggacagagaccaagatggcccatcctgtggtcactgactggaaggcagtctctaatccaccccaatcctcccagaaagcaaacctgtaagtgtcttgggctcagggaccatggcttgtagccctttccaagcttctagaaggtgcttagtaaatacttgataagccccacgtgaaaacaaaaaaaaa

SEQ ID NO: 291418 - DNA, 852 bp, Homo sapiens
gggctgccgtggccacacactgtgtccccagcctcgaaggaacaaacccaaaactatcgcagccacatcatctccggtcccaggcgctggattgggcagccgctccccagacacagctgggattttcccccagagactctgtacctcttgggtccctggtctgacccacagacgaggcccagctttgggatcacagacttggggaggcctgatgggacaggcggccacccttgcccccactcccctgctggcgggtggaaaggggggttccttgatgaggagggggacactggtgttctgacgcatcaccaggctaaacttcaaagacccttcacatggaccctccccagagcattctggggatctgagcccatccctcccaggggccgctccctccccagtcatgtaggggcaccccaggactccccagcactggaacctaggcagcagacagcaatgtgtggagagcgaggccggagtcccatgtccctgtgggggatgagagcctcagctgggccctctgtccacaacgcccactcactgagggccactggggtggggtggctctgggggagaaagctgagttcacccaagggtggggcgaatggagagtcaggggcccgctcaatgctgagccacaaaggggactctggtgcaggggaccggggtccaggcttaccctgggtcctaggctagcccttccctgacgggccatccccaaagcagtgacccgtccccctgtctgcggcaggcgcttccatcactcgctcacggaccacccccgctggatccgagagcgaagccatgagtcctacgccaagaactactccgtcgtcttcccccacgatgagc

SEQ ID NO: 291419 - DNA, 3689 bp, Homo sapiens
gccgcagtagctggggccaccctcgggaaggaagagtctgtcgcgagcgcgagcttctgagctcgacgggccgagctggcagctggttggtgcttacaccttggccgcagcggcaggtccttccacgtgctttcggcggcgacatggagctggaggagttggggatccgagaggaatgtggcgtgttcgggtgcatcgcctcaggagagtggcccacgcagctggatgtaccgcatgtgatcactctgggactcgtggggctgcagcaccggggtcaggagagtgctggtattgtgactagtgatgggagttcggtgccaacattcaaatcacacaagggaatgggtcttgtaaatcacgtctttactgaagacaatttgaaaaaattatatgtttcaaatcttggaattggacacaccaggtatgccaccacaggaaaatgtgaactagaaaattgtcagcccttcgttgttgaaacacttcatgggaagatagctgtggcacataatggcgaattggtaaatgctgctcgattaaggaaaaagcttctgcgtcatggtattggtctgtctacaagttctgatagtgaaatgattacccagttactggcgtatacccctcctcaggaacaagatgacaccccagactgggtagccaggattaaaaacttgatgaaggaagcacccacagcatactccctgcttataatgcacagagatgttatttatgcagtacgagatccttatggaaatcgtcccttatgcattggtcgtcttattccagtgtctgatataaatgacaaagagaaaaaaacatcagaaacagaaggatgggtggtgtcttcagaatcttgtagcttcttatctattggtgcaagatattaccgtgaagtcttgcctggagaaattgtggaaatatccagacacaatgtccaaactcttgatattatatcaaggtctgaaggaaacccagtggctttttgtatctttgaatatgtttattttgcaagaccagacagtatgttcgaagaccaaatggtttatacagtaagataccgttgtggccagcagctagcgattgaagcacctgtggatgcagatttggttagcactgttccagaatctgctacgcctgctgctcttgcttacgcaggaaagtgtggacttccatatgtggaggtgctgtgtaaaaaccggtatgtagggagaaccttcattcagccaaacatgaggttaagacaacttggtgttgcaaaaaaatttggagtattgtcagacaactttaaaggcaaaagaattgttcttgtagatgattcaattgtcagaggcaataccatctcacctataataaaactgctcaaagaatctggtgcaaaagaggtacacattcgagtagcttcaccaccaattaaatatccatgcttcatgggaataaacattcctacaaaagaagagctcattgccaataaaccagaatttgatcaccttgcagaatatctaggagcaaacagtgttgtgtatctgtcagtagaaggactggtttcatctgtacaagaagggataaagtttaaaaaacagaaagagaaaaagcacgatattatgatccaagaaaatggaaatggtctggaatgttttgaaaagagtggtcattgtacagcttgtctcactggaaaatatcctgtagaattagaatggtagctggtagggttggatgtgtgtagtttcaagatagaaagttggtcaagaagttatagtggtcacacctcatctatttactgttactcagttggtacaatgtaaaatgccatgcttatgtttataagttttgagatttttttttttttctgaaaaggataccaaagtgcgataactgaacatttccaattgcatataatacaacaatatgtggtgttcttttttttacacaagcattggctagcctttttaacctggtcagagaaggcaggtggtcactgacatttcccaagtccatgctttaaagggtttgcaagaagttagggttaaggagaggtgatgccaacaagacaggtgagttaaatataccatttcacacaaagtttgaatagaatacattatacctcataggtgtctagcctctacagttctggctgtagttatgaccttggcttccctgtctaactgtagacaaatctttaaaaaaaaataataataatctggtgcctcagtttccccacatgtgcaatgggatacttattaaataattaataagaatgtgaataagtgtcatacttttgtgatttgagccatcatttcacttctgattttaagacaactcatgattgttagctttcagaaagctaatgattgttaactttttgaaattagtttacaattaattaagatttcattatgatggaaggagacataattggcagatctttgccatctctctttgagatgtcctaaaaagggttgtaaaaatctgtgaaaaagtttttcctacatttgactagaaaatgtgatccatagtatttagtgccctgatactataagctcagcaagtaacctggtacatttgaaataaaaaccaaatttttagattcaaacaatccctttatccttaatttaattaattatcatatgctttttttaatgaagtgcttgatcacttgcaaacatatatacatgtagatgtacatatacatgtacacatacacataaatattattgcaattaagtgatcaagtacagacacaataggggccagttttgtttaaggatcaaagagacaaccactttggggaattagtatcaacttacaatccaagtccaagtatcatcttataatcacttttttctactatattaagatctaatgaatttgatttcttttttgaagttttttcttgtaacatctgagattagaagtttaagatgacttgaccccaaacctttgtttatgtaagaatttttaaacataaaagtgtttgtttctgttatgttaccataatttgatgtatatagtgtccagatccatttagaaatttaatatttattaataactgaaactgtttgtcttcctttggtatatagtctcgcatattatattatagcaggccaagataaaattttgacagctctttaagcccacatgcagcagtgggtcagataaccctgtggcagtgacacgggcaaattggcatttgaataaagccctgggaccacctcaacatgcgtagcctcttgtcttaaatgtactccccatggcagcatggaggaggcaagacctgtgggtcaattttgaactggccttactttgatttttaaaacaagagactcagggaaagtactaaaccaaaatctctgattttactttgcgttttctgtagtttttgttttactgagatgcttttgtaaaggaaaataatactgtgacagtttagtaattctacagattcttaatatttctccatcatggccttttacttcacaattttctgaagtctgaattcaattacaattttttttttaccaatttaatctcaaatgttgtttaactgctttaaattcatatacgtagagtattataaactgcagagatgaaaaatgtgttttcacgggatttatattgtgaactaaactaagcctactttttgtgacttatttgtgatgccttgttgataaatatgtgtaataagtatgtttaaa

SEQ ID NO: 291420 - DNA, 649 bp, Homo sapiens
ttgctaagcgtcgccgagttgggagtgtcttcagccctaaggcagcatcagagatcataatcttctgctctcgtggcaagaaatttgtgcggatagagttgatacacctcacttgaagttggcctggagaaaagaggcgtcggactcctggacggggttgggaaacggtcaccagtttcggctcaaagcagcctgtttccaggagaccgccatggtcgaggcagcgtcctggtcccacggtgcggggccggacgatcatttatgggatataaataaaaggactatgaggtggtaaataaaagactaccaactagaagccatagggagtcatttgaaggagaaataggcacggctcatctgtggttgagggaaagggatcttgaaagatgattaggagaacttgggttctggggaaagtgcgggaagacattctggcagagaagcaaacgtgaggaaaggtaagaaggcaagaatctcccattacaaagggtttggtgaaaccctttgcctgtccttttcgctcccttcgggagcagtcggcaataagctggaagggtaatggggtgaaaatgcccgtggtcagttccctggctctgcgactcactagatgtctgacaataaacaagttacttagcttctgggaaactgt

SEQ ID NO: 291421 - DNA, 3829 bp, Homo sapiens
gccgcagtagctggggccaccctcgggaaggaagagtctgtcgcgagcgcgagcttctgagctcgacgggccgagctggcagctggttggtgcttacaccttggccgcagcggcaggtccttccacgtgctttcggcggcgacatggagctggaggagttggggatccgagaggaatgtggcgtgttcgggtgcatcgcctcaggagagtggcccacgcagctggatgtaccgcatgtgatcactctgggactcgtggggctgcagcaccggggtcaggagagtgctggtattgtgactagtgatgggagttcggtgccaacattcaaatcacacaagggaatgggtcttgtaaatcacgtctttactgaagacaatttgaaaaaattatatgtttcaaatcttggaattggacacaccaggtatgccaccacaggaaaatgtgaactagaaaattgtcagcccttcgttgttgaaacacttcatgggaagatagctgtggcacataatggcgaattggtaaatgctgctcgattaaggaaaaagcttctgcgtcatggtattggtctgtctacaagttctgatagtgaaatgattacccagttactggcgtatacccctcctcaggaacaagatgacaccccagactgggtagccaggattaaaaacttgatgaaggaagcacccacagcatactccctgcttataatgcacagagatgttatttatgcagtacgagatccttatggaaatcgtcccttatgcattggtcgtcttattccagtgtctgatataaatgacaaagagaaaaaaacatcagaaacagaaggatgggtggtgtcttcagaatcttgtagcttcttatctattggtgcaagatattaccgtgaagtcttgcctggagaaattgtggaaatatccagacacaatgtccaaactcttgatattatatcaaggtctgaaggaaacccagtggctttttgtatctttgaatatgtttattttgcaagaccagacagtatgttcgaagaccaaatggtttatacagtaagataccgttgtggccagcagctagcgattgaagcacctgtggatgcagatttggttagcactgttccagaatctgctacgcctgctgctcttgcttacgcaggaaagtgtggacttccatatgtggaggtgctgtgtaaaaaccggtatgtagggagaaccttcattcagccaaacatgaggttaagacaacttggtgttgcaaaaaaatttggagtattgtcagacaactttaaaggcaaaagaattgttcttgtagatgattcaattgtcagaggcaataccatctcacctataataaaactgctcaaagaatctggtgcaaaagaggtacacattcgagtagcttcaccaccaattaaatatccatgcttcatgggaataaacattcctacaaaagaagagctcattgccaataaaccagaatttgatcaccttgcagaatatctaggagcaaacagtgttgtgtatctgtcagtagaaggactggtttcatctgtacaagaagggataaagtttaaaaaacagaaagagaaaaagcacgatattatgatccaagaaaatggaaatggtctggaatgttttgaaaagagtggtcattgtacagcttgtctcactggaaaatatcctgtagaattagaatggtagctggtagggttggatgtgtgtagtttcaagatagaaagttggtcaagaagttatagtggtcacacctcatctatttactgttactcagttggtacaatgtaaaatgccatgcttatgtttataagttttgagatttttttttttttctgaaaaggataccaaagtgcgataactgaacatttccaattgcatataatacaacaatatgtggtgttcttttttttacacaagcattggctagcctttttaacctggtcagagaaggcaggtggtcactgacatttcccaagtccatgctttaaagggtttgcaagaagttagggttaaggagaggtgatgccaacaagacaggtgagttaaatataccatttcacacaaagtttgaatagaatacattatacctcataggtgtctagcctctacagttctggctgtagttatgaccttggcttccctgtctaactgtagacaaatctttaaaaaaaaataataataatctggtgcctcagtttccccacatgtgcaatgggatacttattaaataattaataagaatgtgaataagtgtcatacttttgtgatttgagccatcatttcacttctgattttaagacaactcatgattgttagctttcagaaagctaatgattgttaactttttgaaattagtttacaattaattaagatttcattatgatggaaggagacataattggcagatctttgccatctctctttgagatgtcctaaaaagggttgtaaaaatctgtgaaaaagtttttcctacatttgactagaaaatgtgatccatagtatttagtgccctgatactataagctcagcaagtaacctggtacatttgaaataaaaaccaaatttttagattcaaacaatccctttatccttaatttaattaattatcatatgctttttttaatgaagtgcttgatcacttgcaaacatatatacatgtagatgtacatatacatgtacacatacacataaatattattgcaattaagtgatcaagtacagacacaataggggccagttttgtttaaggatcaaagagacaaccactttggggaattagtatcaacttacaatccaagtccaagtatcatcttataatcacttttttctactatattaagatctaatgaatttgatttcttttttgaagttttttcttgtaacatctgagattagaagtttaagatgacttgaccccaaacctttgtttatgtaagaatttttaaacataaaagtgtttgtttctgttatgttaccataatttgatgtatatagtgtccagatccatttagaaatttaatatttattaataactgaaactgtttgtcttcctttggtatatagtctcgcatattatattatagcaggccaagataaaattttgacagctctttaagcccacatgcagcagtgggtcagataaccctgtggcagtgacacgggcaaattggcatttgaataaagccctgggaccacctcaacatgcgtagcctcttgtcttaaatgtactccccatggcagcatggaggaggcaagacctgtgggtcaattttgaactggccttactttgatttttaaaacaagagactcagggaaagtactaaaccaaaatctctgattttactttgcgttttctgtagtttttgttttactgagatgcttttgtaaaggaaaataatactgtgacagtttagtaattctacagattcttaatatttctccatcatggccttttacttcacaattttctgaagtctgaattcaattacaattttttttttaccaatttaatctcaaatgttgtttaactgctttaaattcatatacgtagagtattataaactgcagagatgaaaaatgtgttttcacgggatttatattgtgaactaaactaagcctactttttgtgacttatttgtgatgccttgttgataaatatgtgtaataagtatgtttaaaaaaaaaagaggcagaataaaagagaaggaggaagacaggagacgggaaacaggaaaagaaggagaaagagaaaggaaaagagaagagaaaaaaagaggaggagaaaagaaagaacgagaaaacaaatgaagaacaaaaga

SEQ ID NO: 291422 - DNA, 3366 bp, Homo sapiens
tcatccccaaatcatcccctgtccctggtccatggaaaaattgtcttccaccaaactggtccctggtgccaaaaaggttggggactgctgcattagtgggatgcaggatttttgtaactggacatccacagaatgccttattttcattatggttggctactgggtttggggtggggtggagcttcccctctgatgattaaacttctctttttttctatatagcttctgcgtcatggtattggtctgtctacaagttctgatagtgaaatgattacccagttactggcgtatacccctcctcaggaacaagatgacaccccagactgggtagccaggattaaaaacttgatgaaggaagcacccacagcatactccctgcttataatgcacagagatgttatttatgcagtacgagatccttatggaaatcgtcccttatgcattggtcgtcttattccagtgtctgatataaatgacaaagagaaaaaaacatcagaaacagaaggatgggtggtgtcttcagaatcttgtagcttcttatctattggtgcaagatattaccgtgaagtcttgcctggagaaattgtggaaatatccagacacaatgtccaaactcttgatattatatcaaggtctgaaggaaacccagtggctttttgtatctttgaatatgtttattttgcaagaccagacagtatgttcgaagaccaaatggtttatacagtaagataccgttgtggccagcagctagcgattgaagcacctgtggatgcagatttggttagcactgttccagaatctgctacgcctgctgctcttgcttacgcaggaaagtgtggacttccatatgtggaggtgctgtgtaaaaaccggtatgtagggagaaccttcattcagccaaacatgaggttaagacaacttggtgttgcaaaaaaatttggagtattgtcagacaactttaaaggcaaaagaattgttcttgtagatgattcaattgtcagaggcaataccatctcacctataataaaactgctcaaagaatctggtgcaaaagaggtacacattcgagtagcttcaccaccaattaaatatccatgcttcatgggaataaacattcctacaaaagaagagctcattgccaataaaccagaatttgatcaccttgcagaatatctaggagcaaacagtgttgtgtatctgtcagtagaaggactggtttcatctgtacaagaagggataaagtttaaaaaacagaaagagaaaaagcacgatattatgatccaagaaaatggaaatggtctggaatgttttgaaaagagtggtcattgtacagcttgtctcactggaaaatatcctgtagaattagaatggtagctggtagggttggatgtgtgtagtttcaagatagaaagttggtcaagaagttatagtggtcacacctcatctatttactgttactcagttggtacaatgtaaaatgccatgcttatgtttataagttttgagatttttttttttttctgaaaaggataccaaagtgcgataactgaacatttccaattgcatataatacaacaatatgtggtgttcttttttttacacaagcattggctagcctttttaacctggtcagagaaggcaggtggtcactgacatttcccaagtccatgctttaaagggtttgcaagaagttagggttaaggagaggtgatgccaacaagacaggtgagttaaatataccatttcacacaaagtttgaatagaatacattatacctcataggtgtctagcctctacagttctggctgtagttatgaccttggcttccctgtctaactgtagacaaatctttaaaaaaaaataataataatctggtgcctcagtttccccacatgtgcaatgggatacttattaaataattaataagaatgtgaataagtgtcatacttttgtgatttgagccatcatttcacttctgattttaagacaactcatgattgttagctttcagaaagctaatgattgttaactttttgaaattagtttacaattaattaagatttcattatgatggaaggagacataattggcagatctttgccatctctctttgagatgtcctaaaaagggttgtaaaaatctgtgaaaaagtttttcctacatttgactagaaaatgtgatccatagtatttagtgccctgatactataagctcagcaagtaacctggtacatttgaaataaaaaccaaatttttagattcaaacaatccctttatccttaatttaattaattatcatatgctttttttaatgaagtgcttgatcacttgcaaacatatatacatgtagatgtacatatacatgtacacatacacataaatattattgcaattaagtgatcaagtacagacacaataggggccagttttgtttaaggatcaaagagacaaccactttggggaattagtatcaacttacaatccaagtccaagtatcatcttataatcacttttttctactatattaagatctaatgaatttgatttcttttttgaagttttttcttgtaacatctgagattagaagtttaagatgacttgaccccaaacctttgtttatgtaagaatttttaaacataaaagtgtttgtttctgttatgttaccataatttgatgtatatagtgtccagatccatttagaaatttaatatttattaataactgaaactgtttgtcttcctttggtatatagtctcgcatattatattatagcaggccaagataaaattttgacagctctttaagcccacatgcagcagtgggtcagataaccctgtggcagtgacacgggcaaattggcatttgaataaagccctgggaccacctcaacatgcgtagcctcttgtcttaaatgtactccccatggcagcatggaggaggcaagacctgtgggtcaattttgaactggccttactttgatttttaaaacaagagactcagggaaagtactaaaccaaaatctctgattttactttgcgttttctgtagtttttgttttactgagatgcttttgtaaaggaaaataatactgtgacagtttagtaattctacagattcttaatatttctccatcatggccttttacttcacaattttctgaagtctgaattcaattacaattttttttttaccaatttaatctcaaatgttgtttaactgctttaaattcatatacgtagagtattataaactgcagagatgaaaaatgtgttttcacgggatttatattgtgaactaaactaagcctactttttgtgacttatttgtgatgccttgttgataaatatgtgtaataagtatgtttaaa

SEQ ID NO: 291423 - DNA, 3876 bp, Homo sapiens
ttgctaagcgtcgccgagttgggagtgtcttcagccctaaggcagcatcagagatcataatcttctgctctcgtggcaagaaatttgtgcggatagagttgatacacctcacttgaagttggcctggagaaaagaggcgtcggactcctggacggggttgggaaacggtcaccagtttcggctcaaagcagcctgtttccaggagaccgccatggtcgaggcagcgtcctggtcccacggtgcggggccggacgatcatttatgggatataaataaaaggactatgaggtggtaaataaaagactaccaactagaagccatagggagtcatttgaaggagaaataggcacggctcatctgtggttgagggaaagggatcttgaaagatgattaggagaacttgggttctggggaaagtgcgggaagacattctggcagagaagcaaacgtgaggaaaggggtcaggagagtgctggtattgtgactagtgatgggagttcggtgccaacattcaaatcacacaagggaatgggtcttgtaaatcacgtctttactgaagacaatttgaaaaaattatatgtttcaaatcttggaattggacacaccaggtatgccaccacaggaaaatgtgaactagaaaattgtcagcccttcgttgttgaaacacttcatgggaagatagctgtggcacataatggcgaattggtaaatgctgctcgattaaggaaaaagcttctgcgtcatggtattggtctgtctacaagttctgatagtgaaatgattacccagttactggcgtatacccctcctcaggaacaagatgacaccccagactgggtagccaggattaaaaacttgatgaaggaagcacccacagcatactccctgcttataatgcacagagatgttatttatgcagtacgagatccttatggaaatcgtcccttatgcattggtcgtcttattccagtgtctgatataaatgacaaagagaaaaaaacatcagaaacagaaggatgggtggtgtcttcagaatcttgtagcttcttatctattggtgcaagatattaccgtgaagtcttgcctggagaaattgtggaaatatccagacacaatgtccaaactcttgatattatatcaaggtctgaaggaaacccagtggctttttgtatctttgaatatgtttattttgcaagaccagacagtatgttcgaagaccaaatggtttatacagtaagataccgttgtggccagcagctagcgattgaagcacctgtggatgcagatttggttagcactgttccagaatctgctacgcctgctgctcttgcttacgcaggaaagtgtggacttccatatgtggaggtgctgtgtaaaaaccggtatgtagggagaaccttcattcagccaaacatgaggttaagacaacttggtgttgcaaaaaaatttggagtattgtcagacaactttaaaggcaaaagaattgttcttgtagatgattcaattgtcagaggcaataccatctcacctataataaaactgctcaaagaatctggtgcaaaagaggtacacattcgagtagcttcaccaccaattaaatatccatgcttcatgggaataaacattcctacaaaagaagagctcattgccaataaaccagaatttgatcaccttgcagaatatctaggagcaaacagtgttgtgtatctgtcagtagaaggactggtttcatctgtacaagaagggataaagtttaaaaaacagaaagagaaaaagcacgatattatgatccaagaaaatggaaatggtctggaatgttttgaaaagagtggtcattgtacagcttgtctcactggaaaatatcctgtagaattagaatggtagctggtagggttggatgtgtgtagtttcaagatagaaagttggtcaagaagttatagtggtcacacctcatctatttactgttactcagttggtacaatgtaaaatgccatgcttatgtttataagttttgagatttttttttttttctgaaaaggataccaaagtgcgataactgaacatttccaattgcatataatacaacaatatgtggtgttcttttttttacacaagcattggctagcctttttaacctggtcagagaaggcaggtggtcactgacatttcccaagtccatgctttaaagggtttgcaagaagttagggttaaggagaggtgatgccaacaagacaggtgagttaaatataccatttcacacaaagtttgaatagaatacattatacctcataggtgtctagcctctacagttctggctgtagttatgaccttggcttccctgtctaactgtagacaaatctttaaaaaaaaataataataatctggtgcctcagtttccccacatgtgcaatgggatacttattaaataattaataagaatgtgaataagtgtcatacttttgtgatttgagccatcatttcacttctgattttaagacaactcatgattgttagctttcagaaagctaatgattgttaactttttgaaattagtttacaattaattaagatttcattatgatggaaggagacataattggcagatctttgccatctctctttgagatgtcctaaaaagggttgtaaaaatctgtgaaaaagtttttcctacatttgactagaaaatgtgatccatagtatttagtgccctgatactataagctcagcaagtaacctggtacatttgaaataaaaaccaaatttttagattcaaacaatccctttatccttaatttaattaattatcatatgctttttttaatgaagtgcttgatcacttgcaaacatatatacatgtagatgtacatatacatgtacacatacacataaatattattgcaattaagtgatcaagtacagacacaataggggccagttttgtttaaggatcaaagagacaaccactttggggaattagtatcaacttacaatccaagtccaagtatcatcttataatcacttttttctactatattaagatctaatgaatttgatttcttttttgaagttttttcttgtaacatctgagattagaagtttaagatgacttgaccccaaacctttgtttatgtaagaatttttaaacataaaagtgtttgtttctgttatgttaccataatttgatgtatatagtgtccagatccatttagaaatttaatatttattaataactgaaactgtttgtcttcctttggtatatagtctcgcatattatattatagcaggccaagataaaattttgacagctctttaagcccacatgcagcagtgggtcagataaccctgtggcagtgacacgggcaaattggcatttgaataaagccctgggaccacctcaacatgcgtagcctcttgtcttaaatgtactccccatggcagcatggaggaggcaagacctgtgggtcaattttgaactggccttactttgatttttaaaacaagagactcagggaaagtactaaaccaaaatctctgattttactttgcgttttctgtagtttttgttttactgagatgcttttgtaaaggaaaataatactgtgacagtttagtaattctacagattcttaatatttctccatcatggccttttacttcacaattttctgaagtctgaattcaattacaattttttttttaccaatttaatctcaaatgttgtttaactgctttaaattcatatacgtagagtattataaactgcagagatgaaaaatgtgttttcacgggatttatattgtgaactaaactaagcctactttttgtgacttatttgtgatgccttgttgataaatatgtgtaataagtatgtttaaa

SEQ ID NO: 291424 - DNA, 2315 bp, Homo sapiens
aaagaaaggctaaaggagaaatttatcctagcttaaattattctgtttgtaactattctctgttgacgcgtttcttcctttctaaaggaattcttattacatttttatttttccctctttctttaggagcaaacagtgttgtgtatctgtcagtagaaggactggtttcatctgtacaagaagggataaagtttaaaaaacagaaagagaaaaagcacgatattatgatccaagaaaatggaaatggtctggaatgttttgaaaagagtggtcattgtacagcttgtctcactggaaaatatcctgtagaattagaatggtagctggtagggttggatgtgtgtagtttcaagatagaaagttggtcaagaagttatagtggtcacacctcatctatttactgttactcagttggtacaatgtaaaatgccatgcttatgtttataagttttgagatttttttttttttctgaaaaggataccaaagtgcgataactgaacatttccaattgcatataatacaacaatatgtggtgttcttttttttacacaagcattggctagcctttttaacctggtcagagaaggcaggtggtcactgacatttcccaagtccatgctttaaagggtttgcaagaagttagggttaaggagaggtgatgccaacaagacaggtgagttaaatataccatttcacacaaagtttgaatagaatacattatacctcataggtgtctagcctctacagttctggctgtagttatgaccttggcttccctgtctaactgtagacaaatctttaaaaaaaaataataataatctggtgcctcagtttccccacatgtgcaatgggatacttattaaataattaataagaatgtgaataagtgtcatacttttgtgatttgagccatcatttcacttctgattttaagacaactcatgattgttagctttcagaaagctaatgattgttaactttttgaaattagtttacaattaattaagatttcattatgatggaaggagacataattggcagatctttgccatctctctttgagatgtcctaaaaagggttgtaaaaatctgtgaaaaagtttttcctacatttgactagaaaatgtgatccatagtatttagtgccctgatactataagctcagcaagtaacctggtacatttgaaataaaaaccaaatttttagattcaaacaatccctttatccttaatttaattaattatcatatgctttttttaatgaagtgcttgatcacttgcaaacatatatacatgtagatgtacatatacatgtacacatacacataaatattattgcaattaagtgatcaagtacagacacaataggggccagttttgtttaaggatcaaagagacaaccactttggggaattagtatcaacttacaatccaagtccaagtatcatcttataatcacttttttctactatattaagatctaatgaatttgatttcttttttgaagttttttcttgtaacatctgagattagaagtttaagatgacttgaccccaaacctttgtttatgtaagaatttttaaacataaaagtgtttgtttctgttatgttaccataatttgatgtatatagtgtccagatccatttagaaatttaatatttattaataactgaaactgtttgtcttcctttggtatatagtctcgcatattatattatagcaggccaagataaaattttgacagctctttaagcccacatgcagcagtgggtcagataaccctgtggcagtgacacgggcaaattggcatttgaataaagccctgggaccacctcaacatgcgtagcctcttgtcttaaatgtactccccatggcagcatggaggaggcaagacctgtgggtcaattttgaactggccttactttgatttttaaaacaagagactcagggaaagtactaaaccaaaatctctgattttactttgcgttttctgtagtttttgttttactgagatgcttttgtaaaggaaaataatactgtgacagtttagtaattctacagattcttaatatttctccatcatggccttttacttcacaattttctgaagtctgaattcaattacaattttttttttaccaatttaatctcaaatgttgtttaactgctttaaattcatatacgtagagtattataaactgcagagatgaaaaatgtgttttcacgggatttatattgtgaactaaactaagcctactttttgtgacttatttgtgatgccttgttgataaatatgtgtaataagtatgtttaaa

SEQ ID NO: 291425 - DNA, 2180 bp, Homo sapiens
gccgcagtagctggggccaccctcgggaaggaagagtctgtcgcgagcgcgagcttctgagctcgacgggccgagctggcagctggttggtgcttacaccttggccgcagcggcaggtccttccacgtgctttcggcggcgacatggagctggaggagttggggatccgagaggaatgtggcgtgttcgggtgcatcgcctcaggagagtggcccacgcagctggatgtaccgcatgtgatcactctgggactcgtggggctgcagcaccggggtcaggagagtgctggtattgtgactagtgatgggagttcggtgccaacattcaaatcacacaagggaatgggtcttgtaaatcacgtctttactgaagacaatttgaaaaaattatatgtttcaaatcttggaattggacacaccaggtatgccaccacaggaaaatgtgaactagaaaattgtcagcccttcgttgttgaaacacttcatgggaagatagctgtggcacataatggcgaattggtaaatgctgctcgattaaggaaaaagcttctgcgtcatggtattggtctgtctacaagttctgatagtgaaatgattacccagttactggcgtatacccctcctcaggaacaagatgacaccccagactgggtagccaggattaaaaacttgatgaaggaagcacccacagcatactccctgcttataatgcacagagatgttatttatgcagtacgagatccttatggaaatcgtcccttatgcattggtcgtcttattccagtgtctgatataaatgacaaagagaaaaaaacatcagaaacagaaggatgggtggtgtcttcagaatcttgtagcttcttatctattggtgcaagatattaccgtgaagtcttgcctggagaaattgtggaaatatccagacacaatgtccaaactcttgatattatatcaaggtctgaaggaaacccagtggctttttgtatctttgaatatgtttattttgcaagaccagacagtatgttcgaagaccaaatggtttatacagtaagataccgttgtggccagcagctagcgattgaagcacctgtggatgcagatttggttagcactgttccagaatctgctacgcctgctgctcttgcttacgcaggaaagtgtggacttccatatgtggaggtgctgtgtaaaaaccggtatgtagggagaaccttcattcagccaaacatgaggttaagacaacttggtgttgcaaaaaaatttggagtattgtcagacaactttaaaggcaaaagaattgttcttgtagatgattcaattgtcagaggcaataccatctcacctataataaaactgctcaaagaatctggtgcaaaagaggtacacattcgagtagcttcaccaccaattaaatatccatgcttcatgggaataaacattcctacaaaagaagagctcattgccaataaaccagaatttgatcaccttgcagaatatctaggagcaaacagtgttgtgtatctgtcagtagaaggactggtttcatctgtacaagaagggataaagtttaaaaaacagaaagagaaaaagcacgatattatgatccaagaaaatggaaatggtctggaatgttttgaaaagagtggtcattgtacagcttgtctcactggaaaatatcctgtagaattagaatggtagctggtagggttggatgtgtgtagtttcaagatagaaagttggtcaagaagttatagtggtcacacctcatctatttactgttactcagttggtacaatgtaaaatgccatgcttatgtttataagttttgagatttttttttttttctgaaaaggataccaaagtgcgataactgaacatttccaattgcatataatacaacaatatgtggtgttcttttttttacacaagcattggctagcctttttaacctggtcagagaaggcaggtggtcactgacatttcccaagtccatgctttaaagggtttgcaagaagttagggttaaggagaggtgatgccaacaagacaggtgagttaaatataccatttcacacaaagtttgaatagaatacattatacctcataggtgtctagcctctacagttctggctgtagttatgaccttggcttccctctcattgtagcccccccctttcccccg

SEQ ID NO: 291426 - DNA, 1804 bp, Homo sapiens
gccgcagtagctggggccaccctcgggaaggaagagtctgtcgcgagcgcgagcttctgagctcgacgggccgagctggcagctggttggtgcttacaccttggccgcagcggcaggtccttccacgtgctttcggcggcgacatggagctggaggagttggggatccgagaggaatgtggcgtgttcgggtgcatcgcctcaggagagtggcccacgcagctggatgtaccgcatgtgatcactctgggactcgtggggctgcagcaccggggtcaggagagtgctggtattgtgactagtgatgggagttcggtgccaacattcaaatcacacaagggaatgggtcttgtaaatcacgtctttactgaagacaatttgaaaaaattatatgtttcaaatcttggaattggacacaccaggtatgccaccacaggaaaatgtgaactagaaaattgtcagcccttcgttgttgaaacacttcatgggaagatagctgtggcacataatggcgaattggtaaatgctgctcgattaaggaaaaagcttctgcgtcatggtattggtctgtctacaagttctgatagtgaaatgattacccagttactggcgtatacccctcctcaggaacaagatgacaccccagactgggtagccaggattaaaaacttgatgaaggaagcacccacagcatactccctgcttataatgcacagagatgttatttatgcagtacgagatccttatggaaatcgtcccttatgcattggtcgtcttattccagtgtctgatataaatgacaaagagaaaaaaacatcagaaacagaaggatgggtggtgtcttcagaatcttgtagcttcttatctattggtgcaagatattaccgtgaagtcttgcctggagaaattgtggaaatatccagacacaatgtccaaactcttgatattatatcaaggtctgaaggaaacccagtggctttttgtatctttgaatatgtttattttgcaagaccagacagtatgttcgaagaccaaatggtttatacagtaagataccgttgtggccagcagctagcgattgaagcacctgtggatgcagatttggttagcactgttccagaatctgctacgcctgctgctcttgcttacgcaggaaagtgtggacttccatatgtggaggtgctgtgtaaaaaccggtatgtagggagaaccttcattcagccaaacatgaggttaagacaacttggtgttgcaaaaaaatttggagtattgtcagacaactttaaaggcaaaagaattgttcttgtagatgattcaattgtcagaggcaataccatctcacctataataaaactgctcaaagaatctggtgcaaaagaggtaagtaatattaaaacatatcctaaagcataagttaacaataagatactggcataaaattgcaattcagggtagtgaatcaaaatggatgttcaatataataaattaactttttttatcagtttggtttaggaataactgtgtagcaacttgaagaacatgtcacagccacacttacattaaatgtaatccttaatagattaaaaaagctcaatataaaagcttaaggctgggcgaggtagctcatgcctgtaatcccagtactttgggagcctgaggtaggaggttgcttgagcccaggagttcgagaacagcctgggcaatatagtgagaccctgtctctacaaaaataaaagataataataaaattaaattttaaaaaacctaaaatttttacaaaatttattcaaagactaactacacaa

SEQ ID NO: 291427 - DNA, 621 bp, Homo sapiens
  misc_feature (497)..(497): n is a, c, g, or t
  misc_feature (500)..(500): n is a, c, g, or t
  misc_feature (595)..(595): n is a, c, g, or t
gccgcagtagctggggccaccctcgggaaggaagagtctgtcgcgagcgcgagcttctgagctcgacgggccgagctggcagctggttggtgcttacaccttggccgcagcggcaggtccttccacgtgctttcggcggcgacatggagctggaggagttggggatccgagaggaatgtggcgtgttcgggtgcatcgcctcaggagagtggcccacgcagctggatgtaccgcatgtgatcactctgggactcgtggggctgcagcaccggggtcaggagagtgctggtattgtgactagtgatgggagttcggtgccaacattcaaatcacacaagggaatgggtcttgtaaatcacgtctttactgaagacaatttgaaaaaattatatgtttcaaatcttggaattggacacaccaggtatgccaccacaggaaaatgtgaactagaaaattgtcagcccttcgttgttgaaacacttcatgggaagataccncgntccaaattatccataaggccgaatgcatcagtcaggttcctaaaacaggagcactaagtcttggcctagcgagaaaacggtgtagactcattgtnggaaatacggatgccacgagaaaaag

SEQ ID NO: 291428 - DNA, 405 bp, Homo sapiens
gtgtaacgagggtcacacaactctgaatatatactaaaaaaaagtgaggccgggcacagtggctcatgcctgtaatgccagcacttggggaggctgaggtgggtggatcacctgaggtcaggagttcaagaccatcttggccaacatgatgaaaccccgtttctactaaaaatacaaaaaattagccaggcattgtggtgcgcacctatagtcccagttccttgggaggctgaggtgggagaattgcttgagtccaggagacggaggttacagtgagctgtgatcacaccgctgcactccagcctgggcgacagcgagaccccatttcagaaagaatttaaaagggcagtgatgtgcagggtggtgggaggacatcccccagaagagggggcagacacagtacca

SEQ ID NO: 291429 - DNA, 4300 bp, Homo sapiens
cgttagttctccgggtacctcaggcgcctcagcctccttagtctcctcatcctgcttcacaggctccgcggcctccggcctcctcggcccccgtcccccggcctcctcggcccccgtcccccgccatccgccgcccggatcctcgccgccctccctaggccgccccgccgccatgggcctgcgcccgccgcgccgccgggccgagggcagctgaggcgcggtgcgaagatgggcgaggacagagcagggcccgagcgccagccccagcagcccgggcgccccgcgcgcgcccgcccgcgccgccgaggggatgcccgcgcccgccgccgcgccctgagcgcctttgtctgccgcccgcgccctccgcaccactagcctctcgggagcatggcgtcggccccgccggcctcgcccccgggctcggagccgccggggcccgacccggagccgggcgggccggacgggccgggggcggcgcaactggctccgggccctgcggagctacgcctcggagcgcccgtcggcggccccgacccgcagtccccgggcctggatgagcctgcgcccggggccgctgcagatggcggggcgcgttggagcgccgggccggccccggggctggagggaggcccgcgagaccccgggccgtccgccccgccgccgcgctccggcccgcgggggcagcttgcgagccccgacgccccgggcccagggccgcgctccgaagcgccgcttccagaactcgacccgttgttctcctggactgaggagcccgaggagtgtggccccgcgagctgcccggagagcgcgcctttccgcttgcaggggtccagcagcagccaccgagcgcggggcgaggtcgacgtcttctctcccttccccgcgcccacggcgggcgagctggcgctggagcaaggtcccgggtccccgccgcagccctcggacctcagccagacccacccccttccgagcgagcccgtggggagtcaggaggacggcccccgcctccgagccgtgttcgatgccctggacggggatggggacggtttcgtccgcatcgaggacttcatccagtttgctacggtctacggggcagagcaggtgaaggacttaactaagtacttggatcccagtgggctcggcgtgatcagctttgaagacttctaccaagggatcacagccatcagaaacggagatcctgatggccagtgctacggtggtgtcgcttctgcccaagatgaggagcccctggcctgcccggacgagttcgatgacttcgtcacctatgaggccaacgaggtgacggacagcgcgtacatgggctccgagagcacctacagtgagtgtgagaccttcacggacgaggacaccagcaccctggtgcaccctgagctgcaacctgaaggggacgcagacagtgccggcggctcggccgtgccctctgagtgcctggacgccatggaggagcccgaccatggtgccctgctgctgctcccaggcaggcctcacccccatggccagtctgtcatcacggtgatcgggggcgaggagcactttgaggactacggtgaaggcagtgaggcggagctgtccccagagaccctatgcaacgggcagctgggctgcagtgaccccgctttcctcacgcccagtccgacaaagcggctctccagcaagaaggtggcaaggtacctgcaccagtcaggggccctgaccatggaggccctggaggacccttcccccgagctcatggagggcccagaggaggacattgctgacaaggttgtcttcctggaaaggcgtgtgctggagctggaaaaggacacggcagccaccggtgagcaacacagccgcctgaggcaggagaacctgcagctggtgcacagagcaaacgccctggaggagcagctgaaggagcaggagctgagagcctgcgagatggtcctggaagagacccggcgtcagaaggagctcctgtgcaagatggagagggagaagagcattgagatcgagaacctgcagaccaggctacagcaactggacgaggagaacagtgaactccggtcctgcacgccctgtctgaaggccaacattgagcgtctggaggaggagaagcagaagctgttggatgagatagagtcgctgacgctgcggctcagtgaagagcaggagaacaagaggagaatgggggacaggctgagtcacgagaggcaccagttccagagggacaaggaggccacccaggagctgatcgaggacctccgaaagcagctggagcacctgcagctcctcaagctggaggccgagcagcggcggggccgcagcagcagcatgggcctgcaggagtaccacagccgcgcccgggagagcgagctggagcaggaggtccgcaggctgaagcaggacaaccgcaacctgaaggagcagaacgaggagctgaacgggcagatcattaccctcagcatccagggcgccaagagcctcttctccacagccttctctgagtccctggctgcagagatcagctccgtctcccgagatgagctcatggaggcgattcagaagcaggaggagatcaacttccgcctgcaggactacatcgacaggatcatcgtggccatcatggagaccaacccgtccatcctggaggtcaagtagaggcaggaaggtccagcctgagctggattcgggactccaacaccctggagtggttccgtcagaccatgaggagccaagaccagcaggtcccacagccgacagtgcccagagcatgcagggaaccctcgtgcagctgagctggggccgccaaagaccggggctgccaaaggggcagagggtggtggagaggagagggagaaagggaagtcccagggcccggggtccacagaggatgagggttgtggcagggccgtccatcagcgctgaccttccgggggcccagagcttcccagccctgagtcaagctggccatgaacgcgtacacttcagttcagcaggatgggctggagagcctctctgtgcagcggtgtggggtgagccctgctgtggcctccttgtggtggtccctcttcccacgtgcagccctgttgggaagaaaggaagaaaacaggtccctccaggggtgctgctgcctaagccacccacataagtacgctggtgccgtgtcacccatgttgagccgctcctgatggctgacgggctcccagaccctcacctcggacatggtggtgggggaaggacgggtgggcaaggctggtgcgttccccagctctccctacgctgctcgggccattgcccagccagatgtggtcacctcagtccagctctggggcctccaggccatgtggctgttcccacggcccagtcctcgctgcagtaacccctgggggctctgaccacctatgggggccgggcaggagcctctggggcctccactccgacatcaggacctgagatgaccgctgtgtggcgctctctccctgggcagggtggatgccacaggcccctctggctcccaggtgctgcttctccacaggtgcggcctggcccggcctcctaaaggccacaccctccccacgcacttcccaggccagaatccaaacatcgggaaccctgttttcttctgggtgtgtctcacttagaaatcgtggttcttccccgagggtgcatgttgcaggagggagagggcagggaagactcacagcagagcaggagggggcctgtgcttctcggggtctgcaccccaggcacagcggtgtcaccccgcaggaccgcgggcctgccccaacccccagcattcccgggtgggcccagaccccatcaccaagactggccacccgctgcgtgtgtgtgcgcgcgcgtgtacgtgtggccccacatccgccgccttccacgctaggatgtaagaggtcgcctcctattgtacatttggggaaagccttgggtgtaaatcagtgtaaacttggaggagagatttttctatcatgtagagtaggtattttttatagattgaaggttgatcaattttttaatactttcaagagaaaactgtgtatacacatgaaatatatatatatatatatatatatatatgtataatatataaagactggcaccctgcctctctgtgcccaggcccagccctggtgacatggcaccactcagcagtgctgtcactgtaagcatggactcccaggagacagtgtgggaaacgctcctgctttaattccccgagaaacggctcttcctgcctggatgcaggagggcaggggccaccacagattaaagctgttactgcaca

SEQ ID NO: 291430 - DNA, 4435 bp, Homo sapiens
cgttagttctccgggtacctcaggcgcctcagcctccttagtctcctcatcctgcttcacaggctccgcggcctccggcctcctcggcccccgtcccccggcctcctcggcccccgtcccccgccatccgccgcccggatcctcgccgccctccctaggccgccccgccgccatgggcctgcgcccgccgcgccgccgggccgagggcagctgaggcgcggtgcgaagatgggcgaggacagagcagggcccgagcgccagccccagcagcccgggcgccccgcgcgcgcccgcccgcgccgccgaggggatgcccgcgcccgccgccgcgccctgagcgcctttgtctgccgcccgcgccctccgcaccactagcctctcgggagcatggcgtcggccccgccggcctcgcccccgggctcggagccgccggggcccgacccggagccgggcgggccggacgggccgggggcggcgcaactggctccgggccctgcggagctacgcctcggagcgcccgtcggcggccccgacccgcagtccccgggcctggatgagcctgcgcccggggccgctgcagatggcggggcgcgttggagcgccgggccggccccggggctggagggaggcccgcgagaccccgggccgtccgccccgccgccgcgctccggcccgcgggggcagcttgcgagccccgacgccccgggcccagggccgcgctccgaagcgccgcttccagaactcgacccgttgttctcctggactgaggagcccgaggagtgtggccccgcgagctgcccggagagcgcgcctttccgcttgcaggggtccagcagcagccaccgagcgcggggcgaggtcgacgtcttctctcccttccccgcgcccacggcgggcgagctggcgctggagcaaggtcccgggtccccgccgcagccctcggacctcagccagacccacccccttccgagcgagcccgtggggagtcaggaggacggcccccgcctccgagccgtgttcgatgccctggacggggatggggacggtttcgtccgcatcgaggacttcatccagtttgctacggtctacggggcagagcaggtgaaggacttaactaagtacttggatcccagtgggctcggcgtgatcagctttgaagacttctaccaagggatcacagccatcagaaacggagatcctgatggccagtgctacggtggtgtcgcttctgcccaagatgaggagcccctggcctgcccggacgagttcgatgacttcgtcacctatgaggccaacgaggtgacggacagcgcgtacatgggctccgagagcacctacagtgagtgtgagaccttcacggacgaggacaccagcaccctggtgcaccctgagctgcaacctgaaggggacgcagacagtgccggcggctcggccgtgccctctgagtgcctggacgccatggaggagcccgaccatggtgccctgctgctgctcccaggcaggcctcacccccatggccagtctgtcatcacggtgatcgggggcgaggagcactttgaggactacggtgaaggcagtgaggcggagctgtccccagagaccctatgcaacgggcagctgggctgcagtgaccccgctttcctcacgcccagcactgaccctcttgccgcaaagctgcacagcatcctcactgatgaggcgtttgagttttactgtagccagtgccacaaacaaatcaaccgccttgaggatctttctgcccgcctgagtgatcttgaaatgaatagtccgacaaagcggctctccagcaagaaggtggcaaggtacctgcaccagtcaggggccctgaccatggaggccctggaggacccttcccccgagctcatggagggcccagaggaggacattgctgacaaggttgtcttcctggaaaggcgtgtgctggagctggaaaaggacacggcagccaccggtgagcaacacagccgcctgaggcaggagaacctgcagctggtgcacagagcaaacgccctggaggagcagctgaaggagcaggagctgagagcctgcgagatggtcctggaagagacccggcgtcagaaggagctcctgtgcaagatggagagggagaagagcattgagatcgagaacctgcagaccaggctacagcaactggacgaggagaacagtgaactccggtcctgcacgccctgtctgaaggccaacattgagcgtctggaggaggagaagcagaagctgttggatgagatagagtcgctgacgctgcggctcagtgaagagcaggagaacaagaggagaatgggggacaggctgagtcacgagaggcaccagttccagagggacaaggaggccacccaggagctgatcgaggacctccgaaagcagctggagcacctgcagctcctcaagctggaggccgagcagcggcggggccgcagcagcagcatgggcctgcaggagtaccacagccgcgcccgggagagcgagctggagcaggaggtccgcaggctgaagcaggacaaccgcaacctgaaggagcagaacgaggagctgaacgggcagatcattaccctcagcatccagggcgccaagagcctcttctccacagccttctctgagtccctggctgcagagatcagctccgtctcccgagatgagctcatggaggcgattcagaagcaggaggagatcaacttccgcctgcaggactacatcgacaggatcatcgtggccatcatggagaccaacccgtccatcctggaggtcaagtagaggcaggaaggtccagcctgagctggattcgggactccaacaccctggagtggttccgtcagaccatgaggagccaagaccagcaggtcccacagccgacagtgcccagagcatgcagggaaccctcgtgcagctgagctggggccgccaaagaccggggctgccaaaggggcagagggtggtggagaggagagggagaaagggaagtcccagggcccggggtccacagaggatgagggttgtggcagggccgtccatcagcgctgaccttccgggggcccagagcttcccagccctgagtcaagctggccatgaacgcgtacacttcagttcagcaggatgggctggagagcctctctgtgcagcggtgtggggtgagccctgctgtggcctccttgtggtggtccctcttcccacgtgcagccctgttgggaagaaaggaagaaaacaggtccctccaggggtgctgctgcctaagccacccacataagtacgctggtgccgtgtcacccatgttgagccgctcctgatggctgacgggctcccagaccctcacctcggacatggtggtgggggaaggacgggtgggcaaggctggtgcgttccccagctctccctacgctgctcgggccattgcccagccagatgtggtcacctcagtccagctctggggcctccaggccatgtggctgttcccacggcccagtcctcgctgcagtaacccctgggggctctgaccacctatgggggccgggcaggagcctctggggcctccactccgacatcaggacctgagatgaccgctgtgtggcgctctctccctgggcagggtggatgccacaggcccctctggctcccaggtgctgcttctccacaggtgcggcctggcccggcctcctaaaggccacaccctccccacgcacttcccaggccagaatccaaacatcgggaaccctgttttcttctgggtgtgtctcacttagaaatcgtggttcttccccgagggtgcatgttgcaggagggagagggcagggaagactcacagcagagcaggagggggcctgtgcttctcggggtctgcaccccaggcacagcggtgtcaccccgcaggaccgcgggcctgccccaacccccagcattcccgggtgggcccagaccccatcaccaagactggccacccgctgcgtgtgtgtgcgcgcgcgtgtacgtgtggccccacatccgccgccttccacgctaggatgtaagaggtcgcctcctattgtacatttggggaaagccttgggtgtaaatcagtgtaaacttggaggagagatttttctatcatgtagagtaggtattttttatagattgaaggttgatcaattttttaatactttcaagagaaaactgtgtatacacatgaaatatatatatatatatatatatatatatgtataatatataaagactggcaccctgcctctctgtgcccaggcccagccctggtgacatggcaccactcagcagtgctgtcactgtaagcatggactcccaggagacagtgtgggaaacgctcctgctttaattccccgagaaacggctcttcctgcctggatgcaggagggcaggggccaccacagattaaagctgttactgcaca

SEQ ID NO: 291431 - DNA, 2514 bp, Homo sapiens
aggcaggttctctggaggtcctgaggcagcttctgggcatgggtggagccactgcacaccctgcctggagacagctcagctcctccctttgcctttcaagagcaaacgccctggaggagcagctgaaggagcaggagctgagagcctgcgagatggtcctggaagagacccggcgtcagaaggagctcctgtgcaagatggagagggagaagagcattgagatcgagaacctgcagaccaggctacagcaactggacgaggagaacagtgaactccggtcctgcacgccctgtctgaaggccaacattgagcgtctggaggaggagaagcagaagctgttggatgagatagagtcgctgacgctgcggctcagtgaagagcaggagaacaagaggagaatgggggacaggctgagtcacgagaggcaccagttccagagggacaaggaggccacccaggagctgatcgaggacctccgaaagcagctggagcacctgcagctcctcaagctggaggccgagcagcggcggggccgcagcagcagcatgggcctgcaggagtaccacagccgcgcccgggagagcgagctggagcaggaggtccgcaggctgaagcaggacaaccgcaacctgaaggagcagaacgaggagctgaacgggcagatcattaccctcagcatccagggcgccaagagcctcttctccacagccttctctgagtccctggctgcagagatcagctccgtctcccgagatgagctcatggaggcgattcagaagcaggaggagatcaacttccgcctgcaggactacatcgacaggatcatcgtggccatcatggagaccaacccgtccatcctggaggtcaagtagaggcaggaaggtccagcctgagctggattcgggactccaacaccctggagtggttccgtcagaccatgaggagccaagaccagcaggtcccacagccgacagtgcccagagcatgcagggaaccctcgtgcagctgagctggggccgccaaagaccggggctgccaaaggggcagagggtggtggagaggagagggagaaagggaagtcccagggcccggggtccacagaggatgagggttgtggcagggccgtccatcagcgctgaccttccgggggcccagagcttcccagccctgagtcaagctggccatgaacgcgtacacttcagttcagcaggatgggctggagagcctctctgtgcagcggtgtggggtgagccctgctgtggcctccttgtggtggtccctcttcccacgtgcagccctgttgggaagaaaggaagaaaacaggtccctccaggggtgctgctgcctaagccacccacataagtacgctggtgccgtgtcacccatgttgagccgctcctgatggctgacgggctcccagaccctcacctcggacatggtggtgggggaaggacgggtgggcaaggctggtgcgttccccagctctccctacgctgctcgggccattgcccagccagatgtggtcacctcagtccagctctggggcctccaggccatgtggctgttcccacggcccagtcctcgctgcagtaacccctgggggctctgaccacctatgggggccgggcaggagcctctggggcctccactccgacatcaggacctgagatgaccgctgtgtggcgctctctccctgggcagggtggatgccacaggcccctctggctcccaggtgctgcttctccacaggtgcggcctggcccggcctcctaaaggccacaccctccccacgcacttcccaggccagaatccaaacatcgggaaccctgttttcttctgggtgtgtctcacttagaaatcgtggttcttccccgagggtgcatgttgcaggagggagagggcagggaagactcacagcagagcaggagggggcctgtgcttctcggggtctgcaccccaggcacagcggtgtcaccccgcaggaccgcgggcctgccccaacccccagcattcccgggtgggcccagaccccatcaccaagactggccacccgctgcgtgtgtgtgcgcgcgcgtgtacgtgtggccccacatccgccgccttccacgctaggatgtaagaggtcgcctcctattgtacatttggggaaagccttgggtgtaaatcagtgtaaacttggaggagagatttttctatcatgtagagtaggtattttttatagattgaaggttgatcaattttttaatactttcaagagaaaactgtgtatacacatgaaatatatatatatatatatatatatatatgtataatatataaagactggcaccctgcctctctgtgcccaggcccagccctggtgacatggcaccactcagcagtgctgtcactgtaagcatggactcccaggagacagtgtgggaaacgctcctgctttaattccccgagaaacggctcttcctgcctggatgcaggagggcaggggccaccacagattaaagctgttactgcaca

SEQ ID NO: 291432 - DNA, 4990 bp, Homo sapiens
cgttagttctccgggtacctcaggcgcctcagcctccttagtctcctcatcctgcttcacaggctccgcggcctccggcctcctcggcccccgtcccccggcctcctcggcccccgtcccccgccatccgccgcccggatcctcgccgccctccctaggccgccccgccgccatgggcctgcgcccgccgcgccgccgggccgagggcagctgaggcgcggtgcgaagatgggcgaggacagagcagggcccgagcgccagccccagcagcccgggcgccccgcgcgcgcccgcccgcgccgccgaggggatgcccgcgcccgccgccgcgccctgagcgcctttgtctgccgcccgcgccctccgcaccactagcctctcgggagcatggcgtcggccccgccggcctcgcccccgggctcggagccgccggggcccgacccggagccgggcgggccggacgggccgggggcggcgcaactggctccgggccctgcggagctacgcctcggagcgcccgtcggcggccccgacccgcagtccccgggcctggatgagcctgcgcccggggccgctgcagatggcggggcgcgttggagcgccgggccggccccggggctggagggaggcccgcgagaccccgggccgtccgccccgccgccgcgctccggcccgcgggggcagcttgcgagccccgacgccccgggcccagggccgcgctccgaagcgccgcttccagaactcgacccgttgttctcctggactgaggagcccgaggagtgtggccccgcgagctgcccggagagcgcgcctttccgcttgcaggggtccagcagcagccaccgagcgcggggcgaggtcgacgtcttctctcccttccccgcgcccacggcgggcgagctggcgctggagcaaggtcccgggtccccgccgcagccctcggacctcagccagacccacccccttccgagcgagcccgtggggagtcaggaggacggcccccgcctccgagccgtgttcgatgccctggacggggatggggacggtttcgtccgcatcgaggacttcatccagtttgctacggtctacggggcagagcaggtgaaggacttaactaagtacttggatcccagtgggctcggcgtgatcagctttgaagacttctaccaagggatcacagccatcagaaacggagatcctgatggccagtgctacggtggtgtcgcttctgcccaagatgaggagcccctggcctgcccggacgagttcgatgacttcgtcacctatgaggccaacgaggtgacggacagcgcgtacatgggctccgagagcacctacagtgagtgtgagaccttcacggacgaggacaccagcaccctggtgcaccctgagctgcaacctgaaggggacgcagacagtgccggcggctcggccgtgccctctgagtgcctggacgccatggaggagcccgaccatggtgccctgctgctgctcccaggcaggcctcacccccatggccagtctgtcatcacggtgatcgggggcgaggagcactttgaggactacggtgaaggcagtgaggcggagctgtccccagagaccctatgcaacgggcagctgggctgcagtgaccccgctttcctcacgcccagcactgaccctcttgccgcaaagctgcacagcatcctcactgatgaggcgtttgagttttactgtagccagtgccacaaacaaatcaaccgccttgaggatctttctgcccgcctgagtgatcttgaaatgaatagtccgacaaagcggctctccagcaagaaggtggcaaggtacctgcaccagtcaggggccctgaccatggaggccctggaggacccttcccccgagctcatggagggcccagaggaggacattgctgacaaggttgtcttcctggaaaggcgtgtgctggagctggaaaaggacacggcagccaccggtgagcaacacagccgcctgaggcaggagaacctgcagctggtgcacagagcaaacgccctggaggagcagctgaaggagcaggagctgagagcctgcgagatggtcctggaagagacccggcgtcagaaggagctcctgtgcaagatggagagggagaagagcattgagatcgagaacctgcagaccaggctacagcaactggacgaggagaacagtgaactccggtcctgcacgccctgtctgaaggccaacattgagcgtctggaggaggagaagcagaagctgttggatgagatagagtcgctgacgctgcggctcagtgaagagcaggagaacaagaggagaatgggggacaggctgagtcacgagaggcaccagttccagagggacaaggaggccacccaggagctgatcgaggacctccgaaagcagctggagcacctgcagctcctcaagctggaggccgagcagcggcggggccgcagcagcagcatgggcctgcaggagtaccacagccgcgcccgggagagcgagctggagcaggaggtccgcaggctgaagcaggacaaccgcaacctgaaggagcagaacgaggagctgaacgggcagatcattaccctcagcatccagggcgccaagagcctcttctccacagccttctctgagtccctggctgcagagatcagctccgtctcccgagatgagctcatggaggcgattcagaagcaggaggagatcaacttccgcctgcaggactacatcgacaggatcatcgtggccatcatggagaccaacccgtccatcctggaggtcaagtagaggcaggaaggtccagcctgagctggattcgggactccaacaccctggagtggttccgtcagaccatgaggagccaagaccagcaggtcccacagccgacagtgcccagagcatgcagggaaccctcgtgcagctgagctggggccgccaaagaccggggctgccaaaggggcagagggtggtggagaggagagggagaaagggaagtcccagggcccggggtccacagaggatgagggttgtggcagggccgtccatcagcgctgaccttccgggggcccagagcttcccagccctgagtcaagctggccatgaacgcgtacacttcagttcagcaggatgggctggagagcctctctgtgcagcggtgtggggtgagccctgctgtggcctccttgtggtggtccctcttcccacgtgcagccctgttgggaagaaaggaagaaaacaggtccctccaggggtgctgctgcctaagccacccacataagtacgctggtgccgtgtcacccatgttgagccgctcctgatggctgacgggctcccagaccctcacctcggacatggtggtgggggaaggacgggtgggcaaggctggtgcgttccccagctctccctacgctgctcgggccattgcccagccagatgtggtcacctcagtccagctctggggcctccaggccatgtggctgttcccacggcccagtcctcgctgcagtaacccctgggggctctgaccacctatgggggccgggcaggagcctctggggcctccactccgacatcaggacctgagatgaccgctgtgtggcgctctctccctgggcagggtggatgccacaggcccctctggctcccaggtgctgcttctccacaggtgcggcctggcccggcctcctaaaggccacaccctccccacgcacttcccaggccagaatccaaacatcgggaaccctgttttcttctgggtgtgtctcacttagaaatcgtggttcttccccgagggtgcatgttgcaggagggagagggcagggaagactcacagcagagcaggagggggcctgtgcttctcggggtctgcaccccaggcacagcggtgtcaccccgcaggaccgcgggcctgccccaacccccagcattcccgggtgggcccagaccccatcaccaagactggccacccgctgcgtgtgtgtgcgcgcgcgtgtgtgtgcgcgcatgtgtgcgtgcgtgcacgtgtggccccacatccgccgccttccacgctaggatgtaagaggtcgcctcctattgtacatttggggaaagccttgggtgtaaatcagtgtaaacttggaggagagatttttctatcatgtagagtaggtattttttatagattgaaggttgatcaattttttaatactttcaagagaaaactgtgtatacacatgaaatatatatatatatatatatatatatatgtataatatataaagactggcaccctgcctctctgtgcccaggcccagccctggtgacatggcaccactcagcagtgctgtcactgtaagcatggactcccaggagacagtgtgggaaacgctcctgctttaattccccgagaaacggctcttcctgcctggatgcaggagggcaggggccaccacagattaaagctgttactgcacacgcagaggccggcttcttcctccaggggggccacagggtggggtgggagtcttctgggcctggcccagcttccctcaaggcgtccgaggccatcagttgtctgagctcagaacccagcagacctgcctggctctgcagcttggtcagactaagacccttccaaggccgtaggattgcacctccaggcccagtggagcctggcagctttccagccaggttctggatcctgacgagctgctgagacagcatcaaggtggggcaggtggggcggggcaaattgggcagcacagggctgtgtgggcatcagggctctgggtcacacgcctctggggacgtacgtcccatgtcgggagagccgtcaaaacgtccccgggattaagagaagagtggggggcagggcgcagaggctcacgccataatctcagcactttgggaggccaaggcaggaggatcgcttgaacccgggagttcaagaccagcctgggcaacatagcaaggccccatctctaaaaaataaaaaattaaccag

SEQ ID NO: 291433 - DNA, 2907 bp, Homo sapiens
cgttagttctccgggtacctcaggcgcctcagcctccttagtctcctcatcctgcttcacaggctccgcggcctccggcctcctcggcccccgtcccccggcctcctcggcccccgtcccccgccatccgccgcccggatcctcgccgccctccctaggccgccccgccgccatgggcctgcgcccgccgcgccgccgggccgagggcagctgaggcgcggtgcgaagatgggcgaggacagagcagggcccgagcgccagccccagcagcccgggcgccccgcgcgcgcccgcccgcgccgccgaggggatgcccgcgcccgccgccgcgccctgagcgcctttgtctgccgcccgcgccctccgcaccactagcctctcgggagcatggcgtcggccccgccggcctcgcccccgggctcggagccgccggggcccgacccggagccgggcgggccggacgggccgggggcggcgcaactggctccgggccctgcggagctacgcctcggagcgcccgtcggcggccccgacccgcagtccccgggcctggatgagcctgcgcccggggccgctgcagatggcggggcgcgttggagcgccgggccggccccggggctggagggaggcccgcgagaccccgggccgtccgccccgccgccgcgctccggcccgcgggggcagcttgcgagccccgacgccccgggcccagggccgcgctccgaagcgccgcttccagaactcgacccgttgttctcctggactgaggagcccgaggagtgtggccccgcgagctgcccggagagcgcgcctttccgcttgcaggggtccagcagcagccaccgagcgcggggcgaggtcgacgtcttctctcccttccccgcgcccacggcgggcgagctggcgctggagcaaggtcccgggtccccgccgcagccctcggacctcagccagacccacccccttccgagcgagcccgtggggagtcaggaggacggcccccgcctccgagccgtgttcgatgccctggacggggatggggacggtttcgtccgcatcgaggacttcatccagtttgctacggtctacggggcagagcaggtgaaggacttaactaagtacttggatcccagtgggctcggcgtgatcagctttgaagacttctaccaagggatcacagccatcagaaacggagatcctgatggccagtgctacggtggtgtcgcttctgcccaagatgaggagcccctggcctgcccggacgagttcgatgacttcgtcacctatgaggccaacgaggtgacggacagcgcgtacatgggctccgagagcacctacagtgagtgtgagaccttcacggacgaggacaccagcaccctggtgcaccctgagctgcaacctgaaggggacgcagacagtgccggcggctcggccgtgccctctgagtgcctggacgccatggaggagcccgaccatggtgccctgctgctgctcccaggcaggcctcacccccatggccagtctgtcatcacggtgatcgggggcgaggagcactttgaggactacggtgaaggcagtgaggcggagctgtccccagagaccctatgcaacgggcagctgggctgcagtgaccccgctttcctcacgcccagcactgaccctcttgccgcaaagctgcacagcatcctcactgatgaggcgtttgagttttactgtagccagtgccacaaacaaatcaaccgccttgaggatctttctgcccgcctgagtgatcttgaaatgaatagtccgacaaagcggctctccagcaagaaggtggcaaggtaggtgggtctctggttcctgctgaaaaacgttctgaagtggataattaatcatagttttttaaaaaacattttaaaatgttcttttccaaggtattttttaaactcttgcaagttactttacatggtttggggctgaaggtatcctgaaggagtgttgggaaaggggtttccagggctgtgaatttggacctggatttgtgaccagggagggtacgtgtcagagcttttggtgctgggcctcttgtgtgttcactaaggtctggaaggggccgccatccccagatgtctgctctatgttagctctgaggtagcgagacccagtgaggagcctggcttctcagagccgggtctgggcagctccccaaggtgagtcgaaggtgagggatgggtctgactccaattcctaaagaccatttcttcattttccagcttcgtatagatctgttggcttcctgctgtgaaagatggcaacatacacttttatcttcctcccctgccagttcttaccgaaataaacatgcagggttaaggcccttcccagggagccactcagtgtggctgccgggtggcctctgctgccgtcagagtctgcctttgtgtctttatctgctttgccttcctagtccccgtcctgcttcgtggcccggcatctggcagggctgggagacgcctctccagcttcctctggagcatcccctctggagcctcctctctgccctgttgtgccgggcgttctccaggcctcgtggctgtggtcctggacaggtctccccacactggtgggttcctttgtttcgggggttggatcctctagctccctggccccgtcttccttctcatttgttttctctggtttttgtccagcgtatcttcctgtagcttcttgagaaaagaggtgctcaggagataaacttgagcttgggttggtttgtactgtgagagtgggatcattttcctgtaagatttttgacggcattgcttatcttctagagctaaagttgttaccatgaagtttaacctttctgactcggtttctttgggaccagcctgagcaacttagtgaaaccctgtctctacaaaa

SEQ ID NO: 291434 - DNA, 2475 bp, Homo sapiens
cgttagttctccgggtacctcaggcgcctcagcctccttagtctcctcatcctgcttcacaggctccgcggcctccggcctcctcggcccccgtcccccggcctcctcggcccccgtcccccgccatccgccgcccggatcctcgccgccctccctaggccgccccgccgccatgggcctgcgcccgccgcgccgccgggccgagggcagctgaggcgcggtgcgaagatgggcgaggacagagcagggcccgagcgccagccccagcagcccgggcgccccgcgcgcgcccgcccgcgccgccgaggggatgcccgcgcccgccgccgcgccctgagcgcctttgtctgccgcccgcgccctccgcaccactagcctctcgggagcatggcgtcggccccgccggcctcgcccccgggctcggagccgccggggcccgacccggagccgggcgggccggacgggccgggggcggcgcaactggctccgggccctgcggagctacgcctcggagcgcccgtcggcggccccgacccgcagtccccgggcctggatgagcctgcgcccggggccgctgcagatggcggggcgcgttggagcgccgggccggccccggggctggagggaggcccgcgagaccccgggccgtccgccccgccgccgcgctccggcccgcgggggcagcttgcgagccccgacgccccgggcccagggccgcgctccgaagcgccgcttccagaactcgacccgttgttctcctggactgaggagcccgaggagtgtggccccgcgagctgcccggagagcgcgcctttccgcttgcaggggtccagcagcagccaccgagcgcggggcgaggtcgacgtcttctctcccttccccgcgcccacggcgggcgagctggcgctggagcaaggtcccgggtccccgccgcagccctcggacctcagccagacccacccccttccgagcgagcccgtggggagtcaggaggacggcccccgcctccgagccgtgttcgatgccctggacggggatggggacggtttcgtccgcatcgaggacttcatccagtttgctacggtctacggggcagagcaggtgaaggacttaactaagtacttggatcccagtgggctcggcgtgatcagctttgaagacttctaccaagggatcacagccatcagaaacggagatcctgatggccagtgctacggtggtgtcgcttctgcccaagatgaggagcccctggcctgcccggacgagttcgatgacttcgtcacctatgaggccaacgaggtgacggacagcgcgtacatgggctccgagagcacctacagtgagtgtgagaccttcacggacgaggacaccagcaccctggtgcaccctgagctgcaacctgaaggggacgcagacagtgccggcggctcggccgtgccctctgagtgcctggacgccatggaggagcccgaccatggtgccctgctgctgctcccaggcaggcctcacccccatggccagtctgtcatcacggtgatcgggggcgaggagcactttgaggactacggtgaaggcagtgaggcggagctgtccccagagaccctatgcaacgggcagctgggctgcagtgaccccgctttcctcacgcccagcactgaccctcttgccgcaaagctgcacagcatcctcactgatgaggcgtttgagttttactgtagccagtgccacaaacaaatcaaccgccttgaggatctttctgcccgcctgagtgatcttgaaatgaatagtccgacaaagcggctctccagcaagaaggtggcaagcttcgtatagatctgttggcttcctgctgtgaaagatggcaacatacacttttatcttcctcccctgccagttcttaccgaaataaacatgcagggttaaggcccttcccagggagccactcagtgtggctgccgggtggcctctgctgccgtcagagtctgcctttgtgtctttatctgctttgccttcctagtccccgtcctgcttcgtggcccggcatctggcagggctgggagacgcctctccagcttcctctggagcatcccctctggagcctcctctctgccctgttgtgccgggcgttctccaggcctcgtggctgtggtcctggacaggtctccccacactggtgggttcctttgtttcgggggttggatcctctagctccctggccccgtcttccttctcatttgttttctctggtttttgtccagcgtatcttcctgtagcttcttgagaaaagaggtgctcaggagataaacttgagcttgggttggtttgtactgtgagagtgggatcattttcctgtaagatttttgacggcattgcttatcttctagagctaaagttgttaccatgaagtttaacctttctgactcggtttctttgggaccagcctgagcaacttagtgaaaccctgtctctacaaaa

SEQ ID NO: 291435 - DNA, 2340 bp, Homo sapiens
cgttagttctccgggtacctcaggcgcctcagcctccttagtctcctcatcctgcttcacaggctccgcggcctccggcctcctcggcccccgtcccccggcctcctcggcccccgtcccccgccatccgccgcccggatcctcgccgccctccctaggccgccccgccgccatgggcctgcgcccgccgcgccgccgggccgagggcagctgaggcgcggtgcgaagatgggcgaggacagagcagggcccgagcgccagccccagcagcccgggcgccccgcgcgcgcccgcccgcgccgccgaggggatgcccgcgcccgccgccgcgccctgagcgcctttgtctgccgcccgcgccctccgcaccactagcctctcgggagcatggcgtcggccccgccggcctcgcccccgggctcggagccgccggggcccgacccggagccgggcgggccggacgggccgggggcggcgcaactggctccgggccctgcggagctacgcctcggagcgcccgtcggcggccccgacccgcagtccccgggcctggatgagcctgcgcccggggccgctgcagatggcggggcgcgttggagcgccgggccggccccggggctggagggaggcccgcgagaccccgggccgtccgccccgccgccgcgctccggcccgcgggggcagcttgcgagccccgacgccccgggcccagggccgcgctccgaagcgccgcttccagaactcgacccgttgttctcctggactgaggagcccgaggagtgtggccccgcgagctgcccggagagcgcgcctttccgcttgcaggggtccagcagcagccaccgagcgcggggcgaggtcgacgtcttctctcccttccccgcgcccacggcgggcgagctggcgctggagcaaggtcccgggtccccgccgcagccctcggacctcagccagacccacccccttccgagcgagcccgtggggagtcaggaggacggcccccgcctccgagccgtgttcgatgccctggacggggatggggacggtttcgtccgcatcgaggacttcatccagtttgctacggtctacggggcagagcaggtgaaggacttaactaagtacttggatcccagtgggctcggcgtgatcagctttgaagacttctaccaagggatcacagccatcagaaacggagatcctgatggccagtgctacggtggtgtcgcttctgcccaagatgaggagcccctggcctgcccggacgagttcgatgacttcgtcacctatgaggccaacgaggtgacggacagcgcgtacatgggctccgagagcacctacagtgagtgtgagaccttcacggacgaggacaccagcaccctggtgcaccctgagctgcaacctgaaggggacgcagacagtgccggcggctcggccgtgccctctgagtgcctggacgccatggaggagcccgaccatggtgccctgctgctgctcccaggcaggcctcacccccatggccagtctgtcatcacggtgatcgggggcgaggagcactttgaggactacggtgaaggcagtgaggcggagctgtccccagagaccctatgcaacgggcagctgggctgcagtgaccccgctttcctcacgcccagtccgacaaagcggctctccagcaagaaggtggcaagcttcgtatagatctgttggcttcctgctgtgaaagatggcaacatacacttttatcttcctcccctgccagttcttaccgaaataaacatgcagggttaaggcccttcccagggagccactcagtgtggctgccgggtggcctctgctgccgtcagagtctgcctttgtgtctttatctgctttgccttcctagtccccgtcctgcttcgtggcccggcatctggcagggctgggagacgcctctccagcttcctctggagcatcccctctggagcctcctctctgccctgttgtgccgggcgttctccaggcctcgtggctgtggtcctggacaggtctccccacactggtgggttcctttgtttcgggggttggatcctctagctccctggccccgtcttccttctcatttgttttctctggtttttgtccagcgtatcttcctgtagcttcttgagaaaagaggtgctcaggagataaacttgagcttgggttggtttgtactgtgagagtgggatcattttcctgtaagatttttgacggcattgcttatcttctagagctaaagttgttaccatgaagtttaacctttctgactcggtttctttgggaccagcctgagcaacttagtgaaaccctgtctctacaaaa

SEQ ID NO: 291436 - DNA, 2163 bp, Homo sapiens
cgttagttctccgggtacctcaggcgcctcagcctccttagtctcctcatcctgcttcacaggctccgcggcctccggcctcctcggcccccgtcccccggcctcctcggcccccgtcccccgccatccgccgcccggatcctcgccgccctccctaggccgccccgccgccatgggcctgcgcccgccgcgccgccgggccgagggcagctgaggcgcggtgcgaagatgggcgaggacagagcagggcccgagcgccagccccagcagcccgggcgccccgcgcgcgcccgcccgcgccgccgaggggatgcccgcgcccgccgccgcgccctgagcgcctttgtctgccgcccgcgccctccgcaccactagcctctcgggagcatggcgtcggccccgccggcctcgcccccgggctcggagccgccggggcccgacccggagccgggcgggccggacgggccgggggcggcgcaactggctccgggccctgcggagctacgcctcggagcgcccgtcggcggccccgacccgcagtccccgggcctggatgagcctgcgcccggggccgctgcagatggcggggcgcgttggagcgccgggccggccccggggctggagggaggcccgcgagaccccgggccgtccgccccgccgccgcgctccggcccgcgggggcagcttgcgagccccgacgccccgggcccagggccgcgctccgaagcgccgcttccagaactcgacccgttgttctcctggactgaggagcccgaggagtgtggccccgcgagctgcccggagagcgcgcctttccgcttgcaggggtccagcagcagccaccgagcgcggggcgaggtcgacgtcttctctcccttccccgcgcccacggcgggcgagctggcgctggagcaaggtcccgggtccccgccgcagccctcggacctcagccagacccacccccttccgagcgagcccgtggggagtcaggaggacggcccccgcctccgagccgtgttcgatgccctggacggggatggggacggtttcgtccgcatcgaggacttcatccagtttgctacggtctacggggcagagcaggtgaaggacttaactaagtacttggatcccagtgggctcggcgtgatcagctttgaagacttctaccaagggatcacagccatcagaaacggagatcctgatggccagtgctacggtggtgtcgcttctgcccaagatgaggagcccctggcctgcccggacgagttcgatgacttcgtcacctatgaggccaacgaggtgacggacagcgcgtacatgggctccgagagcacctacagtgagtgtgagaccttcacggacgaggacaccagcaccctggtgcaccctgagctgcaacctgaaggggacgcagacagtgccggcggctcggccgtgccctctgagtgcctggacgccatggaggagcccgaccatggtgccctgctgctgctcccaggcaggcctcacccccatggccagtctgtcatcacggtgatcgggggcgaggagcactttgaggactacggtgaaggcagtgaggcggagctgtccccagagaccctatgcaacgggcagctgggctgcagtgaccccgctttcctcacgcccagcactgaccctcttgccgcaaagctgcacagcatcctcactgatgaggcgtttgagttttactgtagccagtgccacaaacaaatcaaccgccttgaggatctttctgcccgcctgagtgatcttgaaatgaatagtccgacaaagcggctctccagcaagaaggtggcaagcttcgtatagatctgttggcttcctgctgtgaaagatggcaacatacacttttatcttcctcccctgccagttcttaccgaaataaacatgcagggttaaggcccttcccagggagccactcagtgtggctgccgggtggcctctgctgccgtcagaaacaaaaacaacacggagacaagagaacgaagaacgcgcaagaagtgaaagaaacgggcgcagtttgtgggggcggggacagagtggtagtagaaggcacatgcgatcgagtggcagagcccgttgttgaaggaggggggacaggggggcccctagagggggaatatagagacgaggcccgag

SEQ ID NO: 291437 - DNA, 2202 bp, Homo sapiens
cgttagttctccgggtacctcaggcgcctcagcctccttagtctcctcatcctgcttcacaggctccgcggcctccggcctcctcggcccccgtcccccggcctcctcggcccccgtcccccgccatccgccgcccggatcctcgccgccctccctaggccgccccgccgccatgggcctgcgcccgccgcgccgccgggccgagggcagctgaggcgcggtgcgaagatgggcgaggacagagcagggcccgagcgccagccccagcagcccgggcgccccgcgcgcgcccgcccgcgccgccgaggggatgcccgcgcccgccgccgcgccctgagcgcctttgtctgccgcccgcgccctccgcaccactagcctctcgggagcatggcgtcggccccgccggcctcgcccccgggctcggagccgccggggcccgacccggagccgggcgggccggacgggccgggggcggcgcaactggctccgggccctgcggagctacgcctcggagcgcccgtcggcggccccgacccgcagtccccgggcctggatgagcctgcgcccggggccgctgcagatggcggggcgcgttggagcgccgggccggccccggggctggagggaggcccgcgagaccccgggccgtccgccccgccgccgcgctccggcccgcgggggcagcttgcgagccccgacgccccgggcccagggccgcgctccgaagcgccgcttccagaactcgacccgttgttctcctggactgaggagcccgaggagtgtggccccgcgagctgcccggagagcgcgcctttccgcttgcaggggtccagcagcagccaccgagcgcggggcgaggtcgacgtcttctctcccttccccgcgcccacggcgggcgagctggcgctggagcaaggtcccgggtccccgccgcagccctcggacctcagccagacccacccccttccgagcgagcccgtggggagtcaggaggacggcccccgcctccgagccgtgttcgatgccctggacggggatggggacggtttcgtccgcatcgaggacttcatccagtttgctacggtctacggggcagagcaggtgaaggacttaactaagtacttggatcccagtgggctcggcgtgatcagctttgaagacttctaccaagggatcacagccatcagaaacggagatcctgatggccagtgctacggtggtgtcgcttctgcccaagatgaggagcccctggcctgcccggacgagttcgatgacttcgtcacctatgaggccaacgaggtgacggacagcgcgtacatgggctccgagagcacctacagtgagtgtgagaccttcacggacgaggacaccagcaccctggtgcaccctgagctgcaacctgaaggggacgcagacagtgccggcggctcggccgtgccctctgagtgcctggacgccatggaggagcccgaccatggtgccctgctgctgctcccaggcaggcctcacccccatggccagtctgtcatcacggtgatcgggggcgaggagcactttgaggactacggtgaaggcagtgaggcggagctgtccccagagaccctatgcaacgggcagctgggctgcagtgaccccgctttcctcacgcccagcactgaccctcttgccgcaaagctgcacagcatcctcactgatgaggcgtttgagttttactgtagccagtgccacaaacaaatcaaccgccttgaggatctttctgcccgcctgagtgatcttgaaatgaatagtccgacaaagcggctctccagcaagaaggtggcaaggtacctgcaccagtcaggggccctgaccatggaggccctggaggacccttcccccgagctcatggagggcccagaggaggacattgctgacaaggttgtcttcctggaaaggcgtgtgctggagctggaaaaggacacggcagccaccggtgagcaacacagccgcctgaggcaggagaacctgcagctggtgcacagcagagacgccctgcaggagcagatgaacaggacgcagagagcaggaggaagacctgcgaagaatgcgatccaagagacagacgaacgcagagcgatgagaaagagaagcgtcactgtgcaacgactggagacgggagaacaagcactaagagaatagagaaacgactaaaagaatcagaaa

SEQ ID NO: 291438 - DNA, 465 bp, Homo sapiens
aaacgtggctcccaggactcacgtgtggcttgtagcacaccctatggaaagcaccttccacaccctcagctcgggggtgccctggccttcagtcagaagacatcatttctgttttactttgcaggcctcacccccatggccagtctgtcatcacggtgatcgggggcgaggagcactttgaggactacggtgaaggcagtgaggcggagctgtccccagagaccctatgcaacgggcagctgggctgcagtgaccccgctttcctcacgcccaggtaatgacgccttgttccagcacaccctcctccctcttcttcccgtggttagtagtgggaagtttccctttttggttcgtgcattggtgagagaacttgctttccttgacgtcatgtgattaagtaaaccatattcaaacattttaaatttatacctggatttatgaaagttgggagaagtccctcttctc

SEQ ID NO: 291439 - DNA, 787 bp, Homo sapiens
ccccgcctccgagccgtgttcgatgccctggacggggatggggacggtttcgtccgcatcgaggacttcatccagtttgctacggtctacggggcagagcaggtacggagcggcccgggccggggcgtgggaactgggcaggtgcgcgctggccggcggggttgatgtgggaccggtcgacgctgcccctggagtcgggaaaggcactgtcaagacctgacggtcctgctttttctgcttattcaccacttcggccctggatttctggttgaattgcgctggagtccctcttcccttcttaaaaggaggttctattctggggagtcagtttcttcccctccccccagcgcctcgtcagctggatcttaccgaggtcagctcctcgcctggggacacccccccagggggcctgatcgccacccccccagggtgcctgatcgacgtgcccctgaatgaagaagttccccgcgattcccccacccgagggcccagatactgctcggctgaattcacccaagttctagccgcagaggccaggctgcccagacgccttgagatcctactgatagacacctattttgagtacaattactttactgtgtgtggttgacatcttttctacttagatttcatcttttatttgggagacagtcaatgcttgtagagagtcctggaattaagaatttttactttggtgcctttggggaggaaggcaatgagcctcggagcttgttggcaaatgcagaagtctagcagaactccgttagggccacgtccactctcgtag

SEQ ID NO: 291440 - DNA, 314 bp, Homo sapiens
ggcgtctgttggtcacagggcggccccagcagggtttccctgagacacagggcacactggccctgtagaggcgagcttcctggagtgagtttcagctttgttcttgtgtcccaggctacagcaactggacgaggagaacagtgaactccggtcctgcacgccctgtctgaaggccaacattgagcgtctggaggaggtgagctgccaacagcctggagctgtggccagtggggccagcccatgccctgcctgtggggcagctgaggtagccctgagctctgtgctgagcgggatactgtgctgtgtgtgaggga

SEQ ID NO: 291441 - DNA, 467 bp, Homo sapiens
gtgaaggacttaactaagtacttggatcccagtgggctcggcgtgatcagctttgaagacttctaccaagggatcacagccatcagaaacggaggtcagtcatccccgccatgagctcccacctcctctcccgttcctcagccaccctctcagccacctgcacatcaccaggctcctcgtgctgactctaacatctttccttctccttgaagcccccaacataccccaggtttccaggtggtctctttcctttcttgttaccttctcctcacataccctgttttccagaatttgctgcgttaactacttttccataatgctagaaagcaactgcccccttcctcaaagatttcatgatgacaatttgagaattttcaaaatattgaaagaatgattccatggccacccaagtgggtgttcatcacccgtgctctgcaggcagcacttcgtcgcactctctccccacg

SEQ ID NO: 291442 - DNA, 4829 bp, Homo sapiens
cgttagttctccgggtacctcaggcgcctcagcctccttagtctcctcatcctgcttcacaggctccgcggcctccggcctcctcggcccccgtcccccggcctcctcggcccccgtcccccgccatccgccgcccggatcctcgccgccctccctaggccgccccgccgccatgggcctgcgcccgccgcgccgccgggccgagggcagctgaggcgcggtgcgaagatgggcgaggacagagcagggcccgagcgccagccccagcagcccgggcgccccgcgcgcgcccgcccgcgccgccgaggggatgcccgcgcccgccgccgcgccctgagcgcctttgtctgccgcccgcgccctccgcaccactagcctctcgggagcatggcgtcggccccgccggcctcgcccccgggctcggagccgccggggcccgacccggagccgggcgggccggacgggccgggggcggcgcaactggctccgggccctgcggagctacgcctcggagcgcccgtcggcggccccgacccgcagtccccgggcctggatgagcctgcgcccggggccgctgcagatggcggggcgcgttggagcgccgggccggccccggggctggagggaggcccgcgagaccccgggccgtccgccccgccgccgcgctccggcccgcgggggcagcttgcgagccccgacgccccgggcccagggccgcgctccgaagcgccgcttccagaactcgacccgttgttctcctggactgaggagcccgaggagtgtggccccgcgagctgcccggagagcgcgcctttccgcttgcaggggtccagcagcagccaccgagcgcggggcgaggtcgacgtcttctctcccttccccgcgcccacggcgggcgagctggcgctggagcaaggtcccgggtccccgccgcagccctcggacctcagccagacccacccccttccgagcgagcccgtggggagtcaggaggacggcccccgcctccgagccgtgttcgatgccctggacggggatggggacggtttcgtccgcatcgaggacttcatccagtttgctacggtctacggggcagagcaggtgaaggacttaactaagtacttggatcccagtgggctcggcgtgatcagctttgaagacttctaccaagggatcacagccatcagaaacggagatcctgatggccagtgctacggtggtgtcgcttctgcccaagatgaggagcccctggcctgcccggacgagttcgatgacttcgtcacctatgaggccaacgaggtgacggacagcgcgtacatgggctccgagagcacctacagtgagtgtgagaccttcacggacgaggacaccagcaccctggtgcaccctgagctgcaacctgaaggggacgcagacagtgccggcggctcggccgtgccctctgagtgcctggacgccatggaggagcccgaccatggtgccctgctgctgctcccaggcaggcctcacccccatggccagtctgtcatcacggtgatcgggggcgaggagcactttgaggactacggtgaaggcagtgaggcggagctgtccccagagaccctatgcaacgggcagctgggctgcagtgaccccgctttcctcacgcccagtccgacaaagcggctctccagcaagaaggtggcaaggtacctgcaccagtcaggggccctgaccatggaggccctggaggacccttcccccgagctcatggagggcccagaggaggacattgctgacaaggttgtcttcctggaaaggcgtgtgctggagctggaaaaggacacggcagccaccggtgagcaacacagccgcctgaggcaggagaacctgcagctggtgcacagagcaaacgccctggaggagcagctgaaggagcaggagctgagagcctgcgagatggtcctggaagagacccggcgtcagaaggagctcctgtgcaagatggagagggagaagagcattgagatcgagaacctgcagaccaggctacagcaactggacgaggagaacagtgaactccggtcctgcacgccctgtctgaaggccaacattgagcgtctggaggaggagaagcagaagctgttggatgagatagagtcgctgacgctgcggctcagtgaagagcaggagaacaagaggagaatgggggacaggctgagtcacgagaggcaccagttccagagggacaaggaggccacccaggagctgatcgaggacctccgaaagcagctggagcacctgcagctcctcaagctggaggccgagcagcggcggggccgcagcagcagcatgggcctgcaggagtaccacagccgcgcccgggagagcgagctggagcaggaggtccgcaggctgaagcaggacaaccgcaacctgaaggagcagaacgaggagctgaacgggcagatcattaccctcagcatccagggcgccaagagcctcttctccacagccttctctgagtccctggctgcagagatcagctccgtctcccgagatgagctcatggaggcgattcagaagcaggaggagatcaacttccgcctgcaggactacatcgacaggatcatcgtggccatcatggagaccaacccgtccatcctggaggtcaagtagaggcaggaaggtccagcctgagctggattcgggactccaacaccctggagtggttccgtcagaccatgaggagccaagaccagcaggtcccacagccgacagtgcccagagcatgcagggaaccctcgtgcagctgagctggggccgccaaagaccggggctgccaaaggggcagagggtggtggagaggagagggagaaagggaagtcccagggcccggggtccacagaggatgagggttgtggcagggccgtccatcagcgctgaccttccgggggcccagagcttcccagccctgagtcaagctggccatgaacgcgtacacttcagttcagcaggatgggctggagagcctctctgtgcagcggtgtggggtgagccctgctgtggcctccttgtggtggtccctcttcccacgtgcagccctgttgggaagaaaggaagaaaacaggtccctccaggggtgctgctgcctaagccacccacataagtacgctggtgccgtgtcacccatgttgagccgctcctgatggctgacgggctcccagaccctcacctcggacatggtggtgggggaaggacgggtgggcaaggctggtgcgttccccagctctccctacgctgctcgggccattgcccagccagatgtggtcacctcagtccagctctggggcctccaggccatgtggctgttcccacggcccagtcctcgctgcagtaacccctgggggctctgaccacctatgggggccgggcaggagcctctggggcctccactccgacatcaggacctgagatgaccgctgtgtggcgctctctccctgggcagggtggatgccacaggcccctctggctcccaggtgctgcttctccacaggtgcggcctggcccggcctcctaaaggccacaccctccccacgcacttcccaggccagaatccaaacatcgggaaccctgttttcttctgggtgtgtctcacttagaaatcgtggttcttccccgagggtgcatgttgcaggagggagagggcagggaagactcacagcagagcaggagggggcctgtgcttctcggggtctgcaccccaggcacagcggtgtcaccccgcaggaccgcgggcctgccccaacccccagcattcccgggtgggcccagaccccatcaccaagactggccacccgctgcgtgtgtgtgcgcgcgcgtgtacgtgtggccccacatccgccgccttccacgctaggatgtaagaggtcgcctcctattgtacatttggggaaagccttgggtgtaaatcagtgtaaacttggaggagagatttttctatcatgtagagtaggtattttttatagattgaaggttgatcaattttttaatactttcaagagaaaactgtgtatacacatgaaatatatatatatatatatatatatatatgtataatatataaagactggcaccctgcctctctgtgcccaggcccagccctggtgacatggcaccactcagcagtgctgtcactgtaagcatggactcccaggagacagtgtgggaaacgctcctgctttaattccccgagaaacggctcttcctgcctggatgcaggagggcaggggccaccacagattaaagctgttactgcacacgcagaggccggcttcttcctccaggggggccacagggtggggtgggagtcttctgggcctggcccagcttccctcaaggcgtccgaggccatcagttgtctgagctcagaacccagcagacctgcctggctctgcagcttggtcagactaagacccttccaaggccgtaggattgcacctccaggcccagtggagcctggcagctttccagccaggttctggatcctgacgagctgctgagacagcatcaaggtggggcaggtggggcggggcaaattgggcagcacagggctgtgtgggcatcagggctctgggtcacacgcctctggggacgtacgtcccatgtcgggagagccgtcaaaacgtccccgggattaagagaagagtggggggcagggcgcagaggctcacgccataatctcagcactttgggaggccaaggcaggaggatcgcttgaacccgggagttcaagaccagcctgggcaacatagcaaggccccatctctaaaaaataaaaaattaaccag

SEQ ID NO: 291443 - DNA, 562 bp, Homo sapiens
agaaggtgggctgcggactttcagacgtggcccttaacctccccgaactgacctaggctagtcagtcagccggcggtctgaccttctccatctgtgactgagtcacagtcacagggcttccctagaccccggttccagtagctggctcggtgctcttctcggccacctgccatggcccgggggctgcccaccattgctagcctggcacgcttatgccagaagctgaaccgcctgaagccgctggaggactccaccatggagacgtcactgcggcgctgcctgtccacactggacctgactcttctgggcgtgggtggcatggtgggctcgggtctctacgtgctcacaggtgccgtggccaaggaggtggctggccctgctgtgctcttgtccttcggtgtggccgctgtggcctccctgctggcagccctatgctatgcagaatttggggcacgtgtgccacgcacgggctctgcctacctgttcacctacgtatccacagcccaagggatccataataataattgcttggccagccatgtggcctgctggcgtaaaaaaa

SEQ ID NO: 291444 - DNA, 2330 bp, Homo sapiens
actcaattggcacgagggcagcggctgcggcagcagcaggttccagtagctggctcggtgctcttctcggccacctgccatggcccgggggctgcccaccattgctagcctggcacgcttatgccagaagctgaaccgcctgaagccgctggaggactccaccatggagacgtcactgcggcgctgcctgtccacactggacctgactcttctgggcgtgggtggcatggtgggctcgggtctctacgtgctcacaggtgccgtggccaaggaggtggctggccctgctgtgctcttgtccttcggtgtggccgctgtggcctccctgctggcagccctatgctatgcagaatttggggcacgtgtgccacgcacgggctctgcctacctgttcacctacgtatccatgggcgagctgtgggccttcctcatcggctggaatgttctcctcgaatacatcatcggtggcgccgccgtggcccgtgcctggagtggctacctggactctatgttcagccacagcatccgcaacttcactgagacccacgtgggttcttggcaggtgcccctcctgggccactacccggacttcctggctgctggcatcatcctcctggcctctgcctttgtctcctgtggagcccgcgtgtcctcctggctcaatcacaccttctcggccatcagcctgcttgtcattctcttcattgtcatcctgggcttcatcctggcccagcctcacaactggagcgctgacgaaggcggctttgcacccttcggcttctccggcgtcatggccggcactgcctcctgcttctatgctttcgtgggcttcgacgtcattgccgcctccagtgaggaggcccagaacccacggcggtctgtgcctctggccatcgccatctcgcttgccattgcagctggtgcctacatccttgtctccaccgtgctaaccctcatggtgccctggcacagcctggaccccgactcagcgcttgcagatgccttctaccagcggggctacaggtgggctggcttcatcgtggcagctggctccatctgcgccatgaacaccgtcctgctcagcctcctcttctccctgccacgcattgtctatgccatggccgccgatgggctcttcttccaggtgtttgcccatgtgcacccccggacacaggtgcctgtggcgggcaccctggcgttcgggctcctcacggccttcctggcactgctgctggacctggagtcgctggttcagttcctgtcccttggcacactcctggcctacacattcgtggccaccagtatcattgtgctgcgcttccagaagtcttccccgcccagctccccaggcccagccagccctggccccctgaccaagcagcagagctccttctcagaccacctacagctggtgggcactgtacacgcctccgtccctgagccaggggagctgaagccagccctgaggccctacctgggcttcttggatgggtacagccctggagcagtggtgacttgggcgcttggcgttatgttggcctcagccatcaccataggctgcgtgcttgtctttgggaactcgaccctgcacctcccacactggggttacatcctgctgctcctgctcaccagtgtcatgtttctgctcagcctccttgtcctgggggctcaccagcaacagtatcgggaagacttatttcagatccccatggttcccctgattccagccctgagcatcgtcctcaacatctgcctcatgctgaaacttagctatctgacctgggtgcgcttctccatctggctgctgatgggacttgcagtgtatttcggctatggcatccggcatagcaaggagaaccagcgggagctgccagggctgaactccacacactacgtggtattccccaggggcagcctggaggagacagtgcaggctatgcagccccccagccaggcaccagcacaggaccctggccatatggagtagctgatcagcccacacttgccccgccctcccacacctgcttgggaggccagagaggccagacaagccgagagccccttctgttgtgggcagcctgggtttgcaggcctgcacaggctggggagtcctcaggaccttaggaccttcatccaggggctgggcttcgggtcttcaggagtgggccttggctggtgctggtgccatggactctgcccagagccttcttgtttatgatcagctccagctacctgggcagttgtggtggggtggatgggaaggcccacagcccaagggatccataataataattgcttggccagccatgtggcctgctggcgtaaaaaaa

SEQ ID NO: 291445 - DNA, 467 bp, Homo sapiens
aagaattcggcacgagggcggctgcggcagcagcaggttccagtagctggctcggtgctcttctcggccacctgccatggcccgggggctgcccaccattgctagcctggcacgcttatgccagaagctgaaccgcctgaagccgctggaggactccaccatggagacgtcactgcggcgctgcctgtccacactggacctgactcttctgggcgtgggtggcatggtgggctcgggtctctacgtgctcacaggtgccgtggccaaggaggtggctggccctgctgtgctcttgtccttcggtgtggccgctgtggcctccctgctggcagccctatgctatgcagaatttggggcacgtgtgccacgcacgggctctgcctacctgttcacctacgtatccacagcccaagggatccataataataattgcttggccagccatgtggcctgctggcgtaaaaaaa

SEQ ID NO: 291446 - DNA, 2156 bp, Homo sapiens
aagaattcggcacgagggcggctgcggcagcagcaggttccagtagctggctcggtgctcttctcggccacctgccatggcccgggggctgcccaccattgctagcctggcacgcttatgccagaagctgaaccgcctgaagccgctggaggactccaccatggagacgtcactgcggcgctgcctgtccacactggacctgactcttctgggcgtgggtggcatggtgggctcgggtctctacgtgctcacaggtgccgtggccaaggaggtggctggccctgctgtgctcttgtccttcggtgtggccgctgtggcctccctgctggactctatgttcagccacagcatccgcaacttcactgagacccacgtgggttcttggcaggtgcccctcctgggccactacccggacttcctggctgctggcatcatcctcctggcctctgcctttgtctcctgtggagcccgcgtgtcctcctggctcaatcacaccttctcggccatcagcctgcttgtcattctcttcattgtcatcctgggcttcatcctggcccagcctcacaactggagcgctgacgaaggcggctttgcacccttcggcttctccggcgtcatggccggcactgcctcctgcttctatgctttcgtgggcttcgacgtcattgccgcctccagtgaggaggcccagaacccacggcggtctgtgcctctggccatcgccatctcgcttgccattgcagctggtgcctacatccttgtctccaccgtgctaaccctcatggtgccctggcacagcctggaccccgactcagcgcttgcagatgccttctaccagcggggctacaggtgggctggcttcatcgtggcagctggctccatctgcgccatgaacaccgtcctgctcagcctcctcttctccctgccacgcattgtctatgccatggccgccgatgggctcttcttccaggtgtttgcccatgtgcacccccggacacaggtgcctgtggcgggcaccctggcgttcgggctcctcacggccttcctggcactgctgctggacctggagtcgctggttcagttcctgtcccttggcacactcctggcctacacattcgtggccaccagtatcattgtgctgcgcttccagaagtcttccccgcccagctccccaggcccagccagccctggccccctgaccaagcagcagagctccttctcagaccacctacagctggtgggcactgtacacgcctccgtccctgagccaggggagctgaagccagccctgaggccctacctgggcttcttggatgggtacagccctggagcagtggtgacttgggcgcttggcgttatgttggcctcagccatcaccataggctgcgtgcttgtctttgggaactcgaccctgcacctcccacactggggttacatcctgctgctcctgctcaccagtgtcatgtttctgctcagcctccttgtcctgggggctcaccagcaacagtatcgggaagacttatttcagatccccatggttcccctgattccagccctgagcatcgtcctcaacatctgcctcatgctgaaacttagctatctgacctgggtgcgcttctccatctggctgctgatgggacttgcagtgtatttcggctatggcatccggcatagcaaggagaaccagcgggagctgccagggctgaactccacacactacgtggtattccccaggggcagcctggaggagacagtgcaggctatgcagccccccagccaggcaccagcacaggaccctggccatatggagtagctgatcagcccacacttgccccgccctcccacacctgcttgggaggccagagaggccagacaagccgagagccccttctgttgtgggcagcctgggtttgcaggcctgcacaggctggggagtcctcaggaccttaggaccttcatccaggggctgggcttcgggtcttcaggagtgggccttggctggtgctggtgccatggactctgcccagagccttcttgtttatgatcagctccagctacctgggcagttgtggtggggtggatgggaaggcccacagcccaagggatccataataataattgcttggccagccatgtggcctgctggcgtaaaaaaa

SEQ ID NO: 291447 - DNA, 2443 bp, Homo sapiens
  misc_feature (365)..(365): n is a, c, g, or t
tctcataagagcgtaatgcgcatgcagggtggccgcaagcattaacgcgttccacatacttggttcgtagctaacatctgcgtcgcgtactcctgacattgggactcggtgagctaccgcaccagttggtagcctgagcacgcttatgacatgaagctgacatgcgactgtaagcagtctgtgagtgactcgaatcattggcattactgttgactggtgagcagtatagtcgtgatccaccgcatgcgaacatgacatctttcataggcgtcgttgagggtgagcaatagtgaggagtcttctgcgatcttcttatcagatgcttctatcaagacgtacgctgttgcgactcaatagggtatggntggcttggaccacgtgcttgtgtcttacttgatccatgcagtttgtgaccagcttgttagtcctcccgtgcgtgtactggcagccctatgctatgcagaatttggggcacgtgtgccacgcacgggctctgcctacctgttcacctacgtatccatgggcgagctgtgggccttcctcatcggctggaatgttctcctcgaatacatcatcggtggcgccgccgtggcccgtgcctggagtggctacctggactctatgttcagccacagcatccgcaacttcactgagacccacgtgggttcttggcaggtgcccctcctgggccactacccggacttcctggctgctggcatcatcctcctggcctctgcctttgtctcctgtggagcccgcgtgtcctcctggctcaatcacaccttctcggccatcagcctgcttgtcattctcttcattgtcatcctgggcttcatcctggcccagcctcacaactggagcgctgacgaaggcggctttgcacccttcggcttctccggcgtcatggccggcactgcctcctgcttctatgctttcgtgggcttcgacgtcattgccgcctccagtgaggaggcccagaacccacggcggtctgtgcctctggccatcgccatctcgcttgccattgcagctggtgcctacatccttgtctccaccgtgctaaccctcatggtgccctggcacagcctggaccccgactcagcgcttgcagatgccttctaccagcggggctacaggtgggctggcttcatcgtggcagctggctccatctgcgccatgaacaccgtcctgctcagcctcctcttctccctgccacgcattgtctatgccatggccgccgatgggctcttcttccaggtgtttgcccatgtgcacccccggacacaggtgcctgtggcgggcaccctggcgttcgggctcctcacggccttcctggcactgctgctggacctggagtcgctggttcagttcctgtcccttggcacactcctggcctacacattcgtggccaccagtatcattgtgctgcgcttccagaagtcttccccgcccagctccccaggcccagccagccctggccccctgaccaagcagcagagctccttctcagaccacctacagctggtgggcactgtacacgcctccgtccctgagccaggggagctgaagccagccctgaggccctacctgggcttcttggatgggtacagccctggagcagtggtgacttgggcgcttggcgttatgttggcctcagccatcaccataggctgcgtgcttgtctttgggaactcgaccctgcacctcccacactggggttacatcctgctgctcctgctcaccagtgtcatgtttctgctcagcctccttgtcctgggggctcaccagcaacagtatcgggaagacttatttcagatccccatggttcccctgattccagccctgagcatcgtcctcaacatctgcctcatgctgaaacttagctatctgacctgggtgcgcttctccatctggctgctgatgggacttgcagtgtatttcggctatggcatccggcatagcaaggagaaccagcgggagctgccagggctgaactccacacactacgtggtattccccaggggcagcctggaggagacagtgcaggctatgcagccccccagccaggcaccagcacaggaccctggccatatggagtagctgatcagcccacacttgccccgccctcccacacctgcttgggaggccagagaggccagacaagccgagagccccttctgttgtgggcagcctgggtttgcaggcctgcacaggctggggagtcctcaggaccttaggaccttcatccaggggctgggcttcgggtcttcaggagtgggccttggctggtgctggtgccatggactctgcccagagccttcttgtttatgatcagctccagctacctgggcagttgtggtggggtggatgggaaggcccacagcccaagggatccataataataattgcttggccagccatgtggcctgctggcgtaaaaaaa

SEQ ID NO: 291448 - DNA, 2422 bp, Homo sapiens
agaaggtgggctgcggactttcagacgtggcccttaacctccccgaactgacctaggctagtcagtcagccggcggtctgaccttctccatctgtgactgagtcacagtcacagggcttccctagaccccggttccagtagctggctcggtgctcttctcggccacctgccatggcccgggggctgcccaccattgctagcctggcacgcttatgccagaagctgaaccgcctgaagccgctggaggactccaccatggagacgtcactgcggcgctgcctgtccacactggacctgactcttctgggcgtgggtggcatggtgggctcgggtctctacgtgctcacaggtgccgtggccaaggaggtggctggccctgctgtgctcttgtccttcggtgtggccgctgtggcctccctgctggcagccctatgctatgcagaatttggggcacgtgtgccacgcacgggctctgcctacctgttcacctacgtatccatgggcgagctgtgggccttcctcatcggctggaatgttctcctcgaatacatcatcggtggcgccgccgtggcccgtgcctggagtggctacctggactctatgttcagccacagcatccgcaacttcactgagacccacgtgggttcttggcaggtgcccctcctgggccactacccggacttcctggctgctggcatcatcctcctggcctctgcctttgtctcctgtggagcccgcgtgtcctcctggctcaatcacaccttctcggccatcagcctgcttgtcattctcttcattgtcatcctgggcttcatcctggcccagcctcacaactggagcgctgacgaaggcggctttgcacccttcggcttctccggcgtcatggccggcactgcctcctgcttctatgctttcgtgggcttcgacgtcattgccgcctccagtgaggaggcccagaacccacggcggtctgtgcctctggccatcgccatctcgcttgccattgcagctggtgcctacatccttgtctccaccgtgctaaccctcatggtgccctggcacagcctggaccccgactcagcgcttgcagatgccttctaccagcggggctacaggtgggctggcttcatcgtggcagctggctccatctgcgccatgaacaccgtcctgctcagcctcctcttctccctgccacgcattgtctatgccatggccgccgatgggctcttcttccaggtgtttgcccatgtgcacccccggacacaggtgcctgtggcgggcaccctggcgttcgggctcctcacggccttcctggcactgctgctggacctggagtcgctggttcagttcctgtcccttggcacactcctggcctacacattcgtggccaccagtatcattgtgctgcgcttccagaagtcttccccgcccagctccccaggcccagccagccctggccccctgaccaagcagcagagctccttctcagaccacctacagctggtgggcactgtacacgcctccgtccctgagccaggggagctgaagccagccctgaggccctacctgggcttcttggatgggtacagccctggagcagtggtgacttgggcgcttggcgttatgttggcctcagccatcaccataggctgcgtgcttgtctttgggaactcgaccctgcacctcccacactggggttacatcctgctgctcctgctcaccagtgtcatgtttctgctcagcctccttgtcctgggggctcaccagcaacagtatcgggaagacttatttcagatccccatggttcccctgattccagccctgagcatcgtcctcaacatctgcctcatgctgaaacttagctatctgacctgggtgcgcttctccatctggctgctgatgggacttgcagtgtatttcggctatggcatccggcatagcaaggagaaccagcgggagctgccagggctgaactccacacactacgtggtattccccaggggcagcctggaggagacagtgcaggctatgcagccccccagccaggcaccagcacaggaccctggccatatggagtagctgatcagcccacacttgccccgccctcccacacctgcttgggaggccagagaggccagacaagccgagagccccttctgttgtgggcagcctgggtttgcaggcctgcacaggctggggagtcctcaggaccttaggaccttcatccaggggctgggcttcgggtcttcaggagtgggccttggctggtgctggtgccatggactctgcccagagccttcttgtttatgatcagctccagctacctgggcagttgtggtggggtggatgggaaggcccacagcccaagggatccataataataattgcttggccagccatgtggcctgctggcgtaaaaaaa

SEQ ID NO: 291449 - DNA, 577 bp, Homo sapiens
ctcctgggccactacccggacttcctggctgctggcatcatcctcctggcctctgcctttgtctcctgtggagcccgcgtgtcctcctggctcaatcacaccttctcggccatcagcctgcttgtcattctcttcattgtcatcctgggcttcatcctggcccagcctcacaactggagcgctgacgaaggcggctttgcacccttcggcttctccggcgtcatggccggcactgcctcctgcttctatgctttcgtgggcttcgacgtcattgccgcctccagtgaggaggcccagaacccacggcggtctgtgcctctggccatcgccatctcgcttgccattgcagctggtgcctacatccttgtctccaccgtgctaaccctcatggtgccctggcacagcctggaccccgactcagcgcttgcagatgccttctaccagcggggctacaggtgggctggcttcatcgtggcagctggctccatctgcggtgagagactcttcctgggcagggtggcagggaaaagagcaagggggaccttgtcctcagattcttggggaatgcaccttcaac

SEQ ID NO: 291450 - DNA, 513 bp, Homo sapiens
tgagatggagtcttgctctgtcgaccaggctggagggtagtggggtgatctcagctcattgtaacctccacctcctgggttcatgcaattctcctgcctcagcctcccgagtagctgggattacaggcacgagccacctcgcccacccaagatcatgacttttcaacaccactcagtctgtgggtcactaatgaattgccacattgaaccataaaagcagagggctgcaaagcaaactttctagtactacctacttggcttgagccatgttccgagtgagaatgaagggtttcactggaggcctctcctggcgagatgagttagaagttgatgcctaagaaggaaattaattatgagaggtgaatttgccattttacccaacataccatacgggctcttaagtcttcaggtgcttgaaaagctctggattcaaaattcactcactttctatttatcagtctctaagatatagcagcagaacactaacggtagagattccttagctctcctgag

SEQ ID NO: 291451 - DNA, 271 bp, Homo sapiens
ccttccagctggctgcagctgcatagagaaaaagaagacatgaggagatggagggtgtggtgttgcgggaagtcagggaccccaaacggagggaccggctgaagccatggcagaacgtggattgtgaagacttcatggacatttattagttccccaaattaatacttttataatttcctatacctgtctttactgcaatcttggaacataaaattgtgaagatttcatggacacttaccacttccccaatcaatacccttgtgatttccta

SEQ ID NO: 291452 - DNA, 1103 bp, Homo sapiens
tgtgttacttcccccagtggaaaggaaaagggcccataggagctgaatctgactttgggaccctcagtgggtgaggtggtgagcccgcagtgacgtacgcaatgcctgtcacagtgcaggctaaaaccacaggctataaccaatagcagtaactgaaaaacaaaataaagctaaaagcagtgctgtacaatcagctccaggagattttccacattcatccttttcgcttacactctacacttacttgaatgcattcacggccactactactggaattccaaacattctggcattttcaatttgtttcttcaagttactgaagcctttttcaaccagctccaggttctgtaaaaacaacagtgaaaggcctatgagatcagagagttgaaaaccactgcaggttcttcttcaaaggcaaacaacctccttgagccagcagccactcactatcaggacaaggaggccaagaaagaagagagaaggtcccttggtgcattttttccagtgcggtgagtggatgctatggagaactgcagctttcactccagcctatgacactagagtagagctctgcttgtttcccagccttcaagaaaaaaagagctggtatgtttcctgtcattatgccacatcattatagcttatttgctgtttgaaaggaattagttacccttacccaaattatatttaccaattgtgtttatagattttatgtattcatagggttatgataatacaaattaactctactctgcacagcacagacccttccatcagaagacagagcctaacaacatagtggctggcacagaagaggtattcgttatatggctgccgtaaatactgccaggaaatatgaagtaagcagtgatgttttcaaaggttttaatgaactcgaccgtgaacgagggcaagaaataagataaatactatctttaggaatcaggccagtggctgggcccagtggctcacacttgtaatcccaggactttgggaggctgaggcaggagaatccacttgagcccaggagtttgagacaagcctaggaaacataacaagaccccatctctacaactgagaagttaattaaaaaaaaaaaaaaa

SEQ ID NO: 291453 - DNA, 555 bp, Homo sapiens
tgtgttacttcccccagtggaaaggaaaagggcccataggagctgaatctgactttgggaccctcagtgggtgaggtggtgagcccgcagtgacgtacgcaatgcctgtcacagtgcaggctaaaaccacaggctataaccaatagcagtaactgaaaaacaaaataaagctaaaagcagtgctgtacaatcagctccaggagattttccacattcatccttttcgcttacactctacacttacttgaatgcattcacggccactactactggaattccaaacattctggcattttcaatttgtttcttcaagttactgaagcctttttcaaccagctccaggttctgtaaaaacaacagtgaaaggcctatgagatcagagagttgaaaaccactgcaggttcttcttcaaaggcaaacaacctccttgagccagcagccactcactatcaggacaaggaggccaagaaagaagagagaaggtcccttggtgcattttttccagtgcggtaagagacacatatctttgactacatgactaaacgcagcactggt

SEQ ID NO: 291454 - DNA, 1213 bp, Homo sapiens
aacgccactccacgacatccctaggccggcgacacgccgctctcaagcctgtggatgacccagcgccagaaaaccgggtggccgtcatgaagccctagcccagctccgcagcccctcaccttatagacggccacacaggctgaggtgcagcccaggtaaagaagcttgtgtaatcgcagaggaaggacataacagtttgagcctcactctgtcacccaggttggagtacagtggaacagtctcagctcactgcaacttccgtcttccaggctcaagtgatcctccctcctcagcctcctgagtagctggactacagtatgtaaagaattcttgaaccgattctacaagtcactgatagacagaggagttaacttttcgctggacactatagagaaagaattgatcagtttttgcttggacaccaaaggaaaagaaaaccgcctgtgctattatctaggagccacaaaagacgcagccacaaagatcctaagtgaagtcactcgcccaatgagtgtgcatatgcctgcaatgaagatttgtgagaagctgaagaagttggatagccagatctgtgagctgaaatatgaaaaaacactggacttggcatcagttgacctgcggaagatgagagtggcagagctgaagcagatcctgcatagctggggggaggagtgcagggcctgtgcagaaaaaactgactatgtgaatctcattcaagagctggcccccaagtatgcagcgacacaccccaaaacagagctctgatctccaatgccagcacatttgtgacttgtaattagagagaaaagtgactctctaggatatggacatgttgattaaggataactgggaatgcatcatatttggtctcatgctttttgtgttggtattattcctcagaattttgttacgtgggtttatgagtgaaactaatactactgataacttacatttgcagtgtaccaaaagctaaaagttcctttctcataagtttcttggaatgactatgccagttttcattgcctgtctcctaaaagtgacctactgacaaattgatggagtaaattgattccaagaaagaagaaggcattcagagactcctctctggatgcaattttaaaatatattggactaaaacaaaagacacaacagtcagcttatctaatgcacaacttcaatcccaaatacagaatcaaaagtttttttcaagtga

SEQ ID NO: 291455 - DNA, 1145 bp, Homo sapiens
gtgttcagttgcgtcatttgtcctggcaactactggcagattctttccaacctcgaattctgctcagctcgctttggcagcttggtgggcggtgggcgcgggtggcggaggcgattgaagctgctggcccagcatgtggtgcgcgagcccagttgctgtggtggccttttgcgccgggcttttggtctctcacccggtgctgacgcagggccaggaggccggggggcggccaggggccgactgtgaagtatgtaaagaattcttgaaccgattctacaagtcactgatagacagaggagttaacttttcgctggacactatagagaaagaattgatcagtttttgcttggacaccaaaggaaaagaaaaccgcctgtgctattatctaggagccacaaaagacgcagccacaaagatcctaagtgaagtcactcgcccaatgagtgtgcatatgcctgcaatgaagatttgtgagaagctgaagaagttggatagccagatctgtgagctgaaatatgaaaaaacactggacttggcatcagttgacctgcggaagatgagagtggcagagctgaagcagatcctgcatagctggggggaggagtgcagggcctgtgcagaaaaaactgactatgtgaatctcattcaagagctggcccccaagtatgcagcgacacaccccaaaacagagctctgatctccaatgccagcacatttgtgacttgtaattagagagaaaagtgactctctaggatatggacatgttgattaaggataactgggaatgcatcatatttggtctcatgctttttgtgttggtattattcctcagaattttgttacgtgggtttatgagtgaaactaatactactgataacttacatttgcagtgtaccaaaagctaaaagttcctttctcataagtttcttggaatgactatgccagttttcattgcctgtctcctaaaagtgacctactgacaaattgatggagtaaattgattccaagaaagaagaaggcattcagagactcctctctggatgcaattttaaaatatattggactaaaacaaaagacacaacagtcagcttatctaatgcacaacttcaatcccaaatacagaatcaaaagtttttttcaagtga

SEQ ID NO: 291456 - DNA, 294 bp, Homo sapiens
tgaatctgcagatgcagaacccactgatagagagggctgctgtaccacattttccttgggtgtgtcttggtttccatggaaactggaattcttccctgccttggatcatagggtagtcagcaccaagataagcaaactatatgccttttgaagtgattcatagggattttttttccatttattttgtaattggcttttttcctttttgccatttaggtgagctgaaatatgaaaaaacactggacttggcatcagttgacctgcggaagatgagagtggcagagctgaagcaga

SEQ ID NO: 291457 - DNA, 343 bp, Homo sapiens
agcccagttgctgtggtggccttttgcgccgggcttttggtctctcacccggtgctgacgcagggccaggaggccggggggcggccaggggccgactgtgaaggtgagcggtgtgacaactgcttgcatggcggcggccccgcgctgcggcgcagcagctgtcggctttggcttctcctggccctggctataaataacattccgcccaggaaatgcaggccctgtccctcgttttagatcgcccaagcccagctcgagtaaaaagctcaagccgggcctggtggtaacgtgaggccacgttgtggttttgctgtgaatattaaacttcagcagtaaaagctgg

SEQ ID NO: 291458 - DNA, 1535 bp, Homo sapiens
gcgtgtaacgtgcgctatggagccgaaagtcgcagagctgaagcagaagatcgaggacacgctatgtccttttggcttcgaggtttaccccttccaggtggcatggtacaatgaactcttgcctccagccttccacctaccgctgccaggacctaccctggccttcctggtactcagcacgcctgccatgtttgaccgggccctcaagcccttcttgcagagctgccacctccgaatgctgactgacccagtggaccagtgtgtggcctaccatctgggccgtgttagagagagcctcccagagctgcagatagaaatcattgctgactacgaggtgcaccccaaccgacgccccaagatcctggcccagacagcagcccatgtagctggggctgcttactactaccaacgacaagatgtggaggctgacccatgggggaaccagcgcatatcaggtgtgtgcatacacccccgatttgggggctggtttgccatccgaggggtagtgctgctgccagggatagaggtgccagatctgccacccagaaaacctcatgactgtgtacctacaagagctgaccgtatcgccctactcgaaggcttcaatttccactggcgtgattggacttaccgggatgctgtgacaccccaggagcgctactcagaagagcagaaggcctacttctccactccacctgcccaacgattggccctattgggcttggctcagccctcagagaagcctagttctccctccccggaccttccctttaccacacccgcccccaagaagcctgggaatcccagcagagcccggagctggctcagccccagggtctcaccacctgcatcccctggcccttgattttctcccatgtggaccctgatttatggtggtacttgctaggacttaattggctttggcaaagcaaaaggttttgagtacaagattactatttttgataatatagtagagatcttccatgaagataacaagactatctctaatcaaggctagaaccaagggaaggctaagaattgcccagtactgtgcaactactgaaagccctacccaaggccaccagccttgtcttcctctttcctctgtcagttcaaaaagaacagaaacctccagctcttttacatagcaggtaccaggcatttatcagaagaggccaagcttctggttcccatgcagccctttgaatagtgtgtctaaacaaaaataggtgtccaagtagtcacactgagactttaactggtaacccagcctgtggcgtcagtcgcagtgctctggccaacactatagcagggcttattcttctccctcatgtgtagtgaaacaaaatgtaacaccttgggttcattcagttccattccctatgtctacctgtgtcaatataattccctgatttggaggcagctctcctcattttccccaaaacagggaaagcaaggagtaaattcctcttaaaatcaaaagctaataatatgcttcctaaaataaagactcatcaaggtctcagttcaagttt

SEQ ID NO: 291459 - DNA, 1168 bp, Homo sapiens
agacagagtcttactctgtcacctaggctggagtgcagtggcacagtctctactcactgcaacctctgcctcctgggctgaggcagtagaatcatttgaaccagggaggcagagattgcagtgagccgagattgcatggctgcactctagcctgggtgacagtgtgagactctgtctcaaaaaaaaaaaaaaaagtacctacctcaggtagggactgaataaacacgtgtaaggcactttggaaaaatacctggcatatatagtaagcagtatgttggccattaccaaaggccctgggaattctgtactgctgctcatgggtgtagtcggttctagaggggtgggcaggtgggagtagctgaggaagacaagtggctggaatggtatcacatgatacacagaagtatcctcagttctgaatctaccttggcctcaagggcccaggagaataacttttcccagctgacagcctctctgaggacaatgacatatgaatgaggatcaaaacgagctttggccaggcactgtggcgctcacctgtaatcccaccattttgggaggctgaggcggaggaccacctgaggcaaggaattcagaaccactctgggcaacataatgacactaaaaaagactatctctaatcaaggctagaaccaagggaaggctaagaattgcccagtactgtgcaactactgaaagccctacccaaggccaccagccttgtcttcctctttcctctgtcagttcaaaaagaacagaaacctccagctcttttacatagcaggtaccaggcatttatcagaagaggccaagcttctggttcccatgcagccctttgaatagtgtgtctaaacaaaaataggtgtccaagtagtcacactgagactttaactggtaacccagcctgtggcgtcagtcgcagtgctctggccaacactatagcagggcttattcttctccctcatgtgtagtgaaacaaaatgtaacaccttgggttcattcagttccattccctatgtctacctgtgtcaatataattccctgatttggaggcagctctcctcattttccccaaaacagggaaagcaaggagtaaattcctcttaaaatcaaaagctaataatatgcttcctaaaataaagactcatcaaggtctcagttcaagttt

SEQ ID NO: 291460 - DNA, 2494 bp, Homo sapiens
gcgtgtaacgtgcgctatggagccgaaagtcgcagagctgaagcagaagatcgaggacacgctatgtccttttggcttcgaggtttaccccttccaggtggcatggtacaatgaactcttgcctccagccttccacctaccgctgccaggacctaccctggccttcctggtactcagcacgcctgccatgtttgaccgggccctcaagcccttcttgcagagctgccacctccgaatgctgactgacccagtggaccagtgtgtggcctaccatctgggccgtgttagagagagcctcccagagctgcagatagaaatcattgctgactacgaggtgcaccccaaccgacgccccaagatcctggcccagacagcagcccatgtagctggggctgcttactactaccaacgacaagatgtggaggctgacccatgggggaaccagcgcatatcaggtgtgtgcatacacccccgatttgggggctggtttgccatccgaggggtagtgctgctgccagggatagaggtgccagatctgccacccagaaaacctcatgactgtgtacctacaagagctgaccgtatcgccctactcgaaggcttcaatttccactggcgtgattggacttaccgggatgctgtgacaccccaggagcgctactcagaagagcagaaggcctacttctccactccacctgcccaacgattggccctattgggcttggctcagccctcagagaagcctagttctccctccccggaccttccctttaccacacccgcccccaagaagcctgggaatcccagcagagcccggagctggctcagccccagggtctcaccacctgcatcccctggcccttgattttctcccatgtggaccctgatttatggtggtacttgctaggacttaattggctttggcaaagcaaaaggttttgagtacaagattactatttttgataatatagtagagatcttccatgaagataacaagactatctctaatcaaggctagaaccaagggaaggctaagaattgcccagtactgtgcaactactgaaagccctacccaaggccaccagccttgtcttcctctttcctctgtcagttcaaaaagaacagaaacctccagctcttttacatagcaggtaccaggcatttatcagaagaggccaagcttctggttcccatgcagccctttgaatagtgtgtctaaacaaaaataggtgtccaagtagtcacactgagactttaactggtaacccagcctgtggcgtcagtcgcagtgctctggccaacactatagcagggcttattcttctccctcatgtgtagtgaaacaaaatgtaacaccttgggttcattcagttccattccctatgtctacctgtgtcaatataattccctgatttggaggcagctctcctcattttccccaaaacagggaaagcaaggagtaaattcctcttaaaatcaaaagctaataatatgcttcctaaaataaagactcatcaaggtctcagttcaagtttaatacaaactacaaaagattaatgggttgctctactaatacatcatacaaaccagtagcctgcccacaacgccaactcaggccattcctaccaaaggaagaaaggctggtctctccaccccctgtaggaaaggcctgccttgtaagacaccacaattcggctgaatctgaagtcttgtgttttactaatggaaaaaaaaaatacagaagaggttttgttctcatggctgcccaccgcagcctggcactaaaacagcccagcgctcacttctgcttggagaaatattctttgctcttttggacatcaggcttgatggtatcactgccaggtttccagccagctgggcacactgcaagagaaaggcaccactaattaataaccttctcaatggtatgcaccaccattctcctatggacaaaaccagttctgcacctgaacactcagataccaggaaacctacccctgcaatcagtcttagatcattcacccttttagtatgagctaaccattttacaaacatataatcatcaccacagccttaagatactatcatgcctaatttattcatgtagcacttgaaatttaaattttccacaaaaaaaggcaaagtttaaataatttgccaacactctctaatccttaaggggaaaaaaaagctaaataaacgacacacataggactatgtaaacccttaacactaaactgtttctgacagcccttcagagctctgaagacagcaaactcagtctgccttctcagcattcttctaactctaccaaactggatagcctgaaccttataaaggatcaagaacttaacagaagcccccgcttgtttcattaagtaactgccatctaccccttggtaagcaaaaggcagagtttgaaatttttcatagatttatacagaaagcacagccttcaaccttttcctgacaatgcctaagaatgtgcctcagg

SEQ ID NO: 291461 - DNA, 2349 bp, Homo sapiens
gcgtgtaacgtgcgctatggagccgaaagtcgcagagctgaagcagaagatcgaggacacgctatgtccttttggcttcgaggtttaccccttccaggtggcatggtacaatgaactcttgcctccagccttccacctaccgctgccaggacctaccctggccttcctggtactcagcacgcctgccatgtttgaccgggccctcaagcccttcttgcagagctgccacctccgaatgctgactgacccagtggaccagtgtgtggcctaccatctgggccgtgttagagagagcctcccagagctgcagatagaaatcattgctgactacgaggtgcaccccaaccgacgccccaagatcctggcccagacagcagcccatgtagctggggctgcttactactaccaacgacaagatgtggaggctgacccatgggggaaccagcgcatatcaggtgtgtgcatacacccccgatttgggggctggtttgccatccgaggggtagtgctgctgccagggatagaggtgccagatctgccacccagaaaacctcatgactgtgtacctacaagagctgaccgtatcgccctactcgaaggcttcaatttccactggcgtgattggacttaccgggatgctgtgacaccccaggagcgctactcagaagagcagaaggcctacttctccactccacctgcccaacgattggccctattgggcttggctcagccctcagagaagcctagttctccctccccggaccttccctttaccacacccgcccccaagaagcctgggaatcccagcagagcccggagctggctcagccccagggtctcaccacctgcatcccctggcccttgattttctcccatgtggaccctgatttatggtggtacttgctaggacttaattggctttggcaaagcaaaaggttttgagtacaagattactatttttgataatatagtagagatcttccatgaagataacaagactatctctaatcaaggctagaaccaagggaaggctaagaattgcccagtactgtgcaactactgaaagccctacccaaggccaccagccttgtcttcctctttcctctgtcagttcaaaaagaacagaaacctccagctcttttacatagcaggtaccaggcatttatcagaagaggccaagcttctggttcccatgcagccctttgaatagtgtgtctaaacaaaaataggtgtccaagtagtcacactgagactttaactggtaacccagcctgtggcgtcagtcgcagtgctctggccaacactatagcagggcttattcttctccctcatgtgtagtgaaacaaaatgtaacaccttgggttcattcagttccattccctatgtctacctgtgtcaatataattccctgatttggaggcagctctcctcattttccccaaaacagggaaagcaaggagtaaattcctcttaaaatcaaaagctaataatatgcttcctaaaataaagactcatcaaggtctcagttcaagtttaatacaaactacaaaagattaatgggttgctctactaatacatcatacaaaccagtagcctgcccacaacgccaactcaggccattcctaccaaaggaagaaaggctggtctctccaccccctgtaggaaaggcctgccttgtaagacaccacaattcggctgaatctgaagtcttgtgttttactaatggaaaaaaaaaatacagaagaggttttgttctcatggctgcccaccgcagcctggcactaaaacagcccagcgctcacttctgcttggagaaatattctttgctcttttggacatcaggcttgatggtatcactgccaggtttccagccagctgggcacacttccccatgtttgtcagtgaactggaaggcctgaactagtctcaaagtctcatccacagagcggccaacagggaggtcatttacagtgatctgccgaagaatacccttatcatcaatgataaaaaggcccctgaacgagatgccttcatcagcctttaagaccccataatcctgagcaatggtgcgcttcgggtctgataccaaaggaatgttcatgggtcccagtcctccttgtttcttaggtgtattgacccatgctagatgacagaagtgagaatccacagaagcaccaatcacttggcagttgagtttcttaaattcttctgccctatcactgaaagcaatgatctcccctttgtagtcagacaggctgatatctttaaactgaccatctggcataacagctgtggctttgaagttgggggcagggtgcccaattttagcatttcctgaagacatcttcc

SEQ ID NO: 291462 - DNA, 315 bp, Homo sapiens
gggacctccatgaccttgcttttcttcaccctctccccagcgcatatcaggtgtgtgcatacacccccgatttgggggctggtttgccatccgaggggtagtgctgctgccagggatagaggtgccagatctgccacccagaaaacctcatgactgtgtacctacaagagctgaccgtatcgccctactcgaaggcttcaatttccactggcgtgattggacttaccgggatgctgtgacaccccaggagcgctactcagaagagcagaaggcctacttctccactccacctgcccaacgattggccctattggg

SEQ ID NO: 291463 - DNA, 4008 bp, Homo sapiens
  misc_feature (181)..(181): n is a, c, g, or t
  misc_feature (254)..(254): n is a, c, g, or t
  misc_feature (266)..(266): n is a, c, g, or t
  misc_feature (2706)..(2706): n is a, c, g, or t
cgcgcgcccgggggagcgcagagtttggaaagtcttcgagaagcttcagaggagggaagggggtgggaagagtgggggtgcaagagagaaaaacccgcctcttgcgagttgagcgaggaagaggggggggaaggctccgagttccgcttcctgaacggcgggtggatagagaaggttggcncggggaagaccggcgggaggcgcgccccgggcccgcggcgcgattggcgtgaccggcgatggccggtgagcgnacccgcaggttnacccggagcctgttgagacctggcaggcgccgagctccggcacagcctgccgcgtccgccgccgcggtggcagtcagcagccggcagcagcagcggcaagaaaagcctaggcttctcgagcctttggattatgagactgtcattgaagaacttgaaaagacctaccggaatgatcctcttcaagatctcttgttcttccccagtgatgacttttcagcagccacagtttcctgggatatccgcacgttgtactcaacagtacctgaagatgcagagcacaaggcagaaaatttactggttaaggaggcttgtaaattttatagttcccagtggcatgtggtaaactacaaatatgaacaatattctggagacattcgacagctaccccgagcagaatacaaaccagagaagcttccttcacattcctttgagattgaccatgaagatgctgataaggatgaagataccacttcccactcgtcttccaaggggggtggaggagcgggaggaactggtgttttcaagtccggctggctctacaaggggaattttaacagcaccgtgaacaacaccgttactgttcggtcattcaaaaagcgctacttccagctgactcagttaccagataactcctacattatgaacttttacaaagatgagaaaatatccaaagaacccaaaggatgcatctttttggattcctgtacaggagtggtgcagaataacagactaagaaaatatgcctttgaattgaaaatgaatgatctgacctattttgtgctggcagctgaaacagagtcagatatggatgaatggatccacaccctcaaccgcattctgcaaatcagtcctgaggggcccctccaagggaggaggagcacagagctcactgatctgggtctggattcgctggataattctgtaacttgtgaatgcacgccagaggaaacagattcttcagagaacaacctacacgcagactttgcaaagtacctcacagaaacagaagatactgtaaaaacaactcgaaacatggagaggctaaatctgttctctctagatccagacatagataccttgaaacttcaaaaaaaagatctcttggaacctgagtctgtgatcaaaccatttgaagaaaaagctgccaagagaatcatgatcatctgtaaagccctcaactcaaatcttcagggatgtgttacggagaatgaaaatgatccgataacgaatattgagcctttttttgtgagtgtggcactttatgacctcagagacagcaggaagatttctgctgattttcatgtggatctaaaccatgctgctgtcagacagatgctcttgggggcttctgtggctttggaaaatggcaacatcgacaccatcactccaagacaatcagaagaacctcacatcaagggacttccagaggaatggctaaaatttccaaagcaggctgtattttctgtaagcaatccacattctgaaattgttttggtggccaaaatcgaaaaagtcttgatgggaaacattgcaagtggtgccgaaccttatattaagaacccagactccaacaagtatgcacaaaagatactaaaatccaacagacaattctgcagcaaattgggaaaataccgtatgccttttgcttgggcagtaaggtatgttgacagttgcagccaacagactagaaatacatttaatggtggcattggaagcttcagttttgaacgtttttgtgttgcctattatttttaatgtgtctacacctagaaaatcctaatatggtcatcttcataaacatcttgagcttctctgagacatacatttcacaagacagtttagcaatacagtttataatagagggccgtgacacatgtaccctgcatgcatgaccagatatgctatgggttcttggtagatatcaaatcaatgtcataaattgtttattatgtatatttgacttaacaaacctttgacattatgtcagtcctgagagtctggtgtgcctaaaattcagatagatgcactgtaatttcttatgcagctgtttgttttcatttatgcgtagagctcaggtctatatatggacgtccaaatgaaaccatcaaaccaatcatttaaactcattttgattttgatactgtttagcccagccaaatttatcagtaccagttgcctctgaaagaaagtctgagttctgtggacatagatggacacatcattcacttggatgcatgacctcttcatgaagaaccataattgcttttcagaactgtttaatcatcaattatgattgtcctcatcaatctctttacatctttattagtgtaagaatttcttaagtgaggaagagcctggcatagactcataaggctaaaaggtcatcaatgtacacactgaatgaactaagaaaggttagagctaccagccgggcatggtngctcacgcctgtaatcccagcactttgggaggccaagacaggcggatcccgaggtcaggagttcgagaccagcttggccaacatggtgaagctctgtctctactaaaaatacaaaaattagccaggtgtggtggcaaataagacagcccatcaagtattcatttgaactttgctgacattatctcaatgtatccaactttagcatccagaaggaagagagaacctgttaattatgccatttttaagtctcacagttcccagtgatgtatattcagagtaaactcaccaatatttgtcataattttgaggttgttatttaaagttggagatgagtaggtgtaggaaggagaaatgtggaagtttgggcagcagtaaatcaagatagattcatgcagtctccaggaattcgtttgccctaaggcagcgtcatagcaagggagggagagtccaggcctgggagtctaataaacgttgcagatcaggccactacttactgtgacttggaacaagtttcttctccatgtctctgggtccccagctataaattgaagctgacaatacctgtgttatgagcagtatgtgcaatctcaagtgcacaagcatttggcgtaaaatagatcatgaatagtactttatcctcccttttctatctctttctataggaacaactaatgccaggacattctgcatgaaaaagatggtatttagatttgcagaaccctttataatgaatttgtttttatttctcataagctttaagacaaaggttaactaattataattcactgattaaacatttttggtattgttaagcattctcagttccctccagaaaacctactggggcaagtagaggcaagatgtctgttgtgaaatattccagtataacaaaattacaatagtgcacacatttttcactttaaggatccaacattgctctgaggttttagaaacaggcattttagaaccagacagagctgagctcaaaatatcctaactctggccaggcatggtggggcatgcctataatcccaatactttaggaggccaaggtctcctggaggttcacttaaggtcaggaattctagaccagcctgggcaacatagtgagacccaatctctaaaaacaacttttaaaaaattaaccaagggtggtagcatacacctgtagtcctagctactcaggaggctgagatgggagtatcagaatcatcagagatgagcccagaagctggaagttgcaatgaactatgatagcaccactgcactccagcctgggcaacagagtgagaccctgtctct

SEQ ID NO: 291464 - DNA, 967 bp, Homo sapiens
  misc_feature (181)..(181): n is a, c, g, or t
  misc_feature (254)..(254): n is a, c, g, or t
  misc_feature (266)..(266): n is a, c, g, or t
cgcgcgcccgggggagcgcagagtttggaaagtcttcgagaagcttcagaggagggaagggggtgggaagagtgggggtgcaagagagaaaaacccgcctcttgcgagttgagcgaggaagaggggggggaaggctccgagttccgcttcctgaacggcgggtggatagagaaggttggcncggggaagaccggcgggaggcgcgccccgggcccgcggcgcgattggcgtgaccggcgatggccggtgagcgnacccgcaggttnacccggagcctgttgagacctggcaggcgccgagctccggcacagcctgccgcgtccgccgccgcggtggcagtcagcagccggcagcagcagcggcaagaaaagcctaggcttctcgagcctttggattatgagactgtcattgaagaacttgaaaagacctaccggaatgatcctcttcaagatctcttgttcttccccagtgatgacttttcagcagccacagtttcctgggatatccgcacgttgtactcaacagtacctgaagatgcagagcacaaggcagaaaatttactggttaaggaggcttgtaaattttatagttcccagtggcatgtggtaaactacaaatatgaacaatattctggagacattcgacagctaccccgcgagggtccataggaagatactgaagaaatagatgacttcaggctagaatggaaaatgtaagcctttacacactaggaatagaaatcagcactaacttggagatcccagaagaaaaaagcagcataaaaatatatgatgccactgatttcattaatccactgggtaaaatacagagatgtgtgacatattaaaattttttaccatggtcgatttgatagaaagaagatgtaaggaagaaaaattcataagagtataaattgtgactaaagatcaaataaagtgtgaccagcttagctgggctgaaataaaaa

SEQ ID NO: 291465 - DNA, 1877 bp, Homo sapiens
tgcgagaagacacgtgcgcggaaggagcttgcagtagcgggcggcagagctggagtgaagggagctagtggtaaagggagctggtggaggggtggcggcaggggtaaggggcaggggacaccctctagacggagagcgggctccgaggtcctggctggccctcggtgcgcccgcccctgtgttggtcccacaatccctggcaatgagaggccagggtttattggacagagtcagttgtggggttcagagggtcagcaatcaatcaatcctccgaatccagagatttagacccagtcgtccgtattaggactggaggggggtcaataggttcagtgtttgagatgccaagggaacctgtcttttgatttggggttcaacatacagagtttaggtagcagtcaccattatgctcaaagcggtgatcctgattggaggccctcaaaagggaactcgcttcagacctttgtcttttgaggtgcccaaaccattgtttcctgtggcaggggtccctatgatccaacaccatattgaagcctgtgcccaggtccctggaatgcaggagattctgctcattggcttctaccaacctgatgagcccctcacccagttcctagaagccgcccagcaggagtttaaccttccagtcaggtacctgcaggaatttgcccccctaggcacagggggtggtctttaccattttcgagaccagatcctggctgggagccccgaggcattcttcgtgctcaatgctgatgtctgctccgacttccccttgagtgctatgttggaagcccaccgacgccagcgtcaccctttcttactccttggcactacggctaacaggacgcaatccctcaactacggctgcatcgttgagaatccacagacacacgaggtattgcactatgtggagaaacccagcacatttatcagtgacatcatcaactgcggcatctacctcttttctcctgaagccttgaagcctcttcgggatgtcttccagcgtaatcagcaggatgggcaattggaggactcaccaggcttgtggccaggggcaggtaccatccgcctagagcaggatgtgttttcagccctggcagggcagggccagatatacgtgcatctcactgatggtatctggagtcagatcaagtccgcaggttcagccctctacgcctcccgcctctacctgagccgataccaggacactcacccagaacggctggccaagcacaccccagggggcccatggatccgagggaatgtgtacatccacccgaccgccaaggtggccccctcggctgtgctgggccccaacgtctccatcgggaagggggtgaccgtgggtgagggtgtgcggctccgggagagcatcgtcctccatggagccactttgcaggagcacacgtgtgttctgcatagcatcgtgggctgggggagcaccgtgggacgctgggcccgcgtggagggtacccccagtgaccctaaccccaacgatccccgagcccgcatggacagtgagagcctcttcaaggacgggaagctgctgcctgctatcaccatcctgggctgccgagtccggatccctgccgaggtgctcatcctgaactcgattgttctgccacacaaggagctgagccgaagcttcaccaaccagatcatcctctgagtagggctgccagaaggcccccagctcctacccactccccttgaggctgctgcctgcttggccagcctctgtccagaaaggaccagagaaagccaggctggatcgtcacatgccggggagcaatgtggatggcctggggactcctgggttttctccctcccgactccctaataaaccccgtgaaccttggaaacaagaaaaaaattat

SEQ ID NO: 291466 - DNA, 1561 bp, Homo sapiens
tgcgagaagacacgtgcgcggaaggagcttgcagtagcgggcggcagagctggagtgaagggagctagtgtttaggtagcagtcaccattatgctcaaagcggtgatcctgattggaggccctcaaaagggaactcgcttcagacctttgtcttttgaggtgcccaaaccattgtttcctgtggcaggggtccctatgatccaacaccatattgaagcctgtgcccaggtccctggaatgcaggagattctgctcattggcttctaccaacctgatgagcccctcacccagttcctagaagccgcccagcaggagtttaaccttccagtcaggtacctgcaggaatttgcccccctaggcacagggggtggtctttaccattttcgagaccagatcctggctgggagccccgaggcattcttcgtgctcaatgctgatgtctgctccgacttccccttgagtgctatgttggaagcccaccgacgccagcgtcaccctttcttactccttggcactacggctaacaggacgcaatccctcaactacggctgcatcgttgagaatccacagacacacgaggtattgcactatgtggagaaacccagcacatttatcagtgacatcatcaactgcggcatctacctcttttctcctgaagccttgaagcctcttcgggatgtcttccagcgtaatcagcaggatgggcaattggaggactcaccaggcttgtggccaggggcaggtaccatccgcctagagcaggatgtgttttcagccctggcagggcagggccagatatacgtgcatctcactgatggtatctggagtcagatcaagtccgcaggttcagccctctacgcctcccgcctctacctgagccgataccaggacactcacccagaacggctggccaagcacaccccagggggcccatggatccgagggaatgtgtacatccacccgaccgccaaggtggccccctcggctgtgctgggccccaacgtctccatcgggaagggggtgaccgtgggtgagggtgtgcggctccgggagagcatcgtcctccatggagccactttgcaggagcacacgtgtgttctgcatagcatcgtgggctgggggagcaccgtgggacgctgggcccgcgtggagggtacccccagtgaccctaaccccaacgatccccgagcccgcatggacagtgagagcctcttcaaggacgggaagctgctgcctgctatcaccatcctgggctgccgagtccggatccctgccgaggtgctcatcctgaactcgattgttctgccacacaaggagctgagccgaagcttcaccaaccagatcatcctctgagtagggctgccagaaggcccccagctcctacccactccccttgaggctgctgcctgcttggccagcctctgtccagaaaggaccagagaaagccaggctggatcgtcacatgccggggagcaatgtggatggcctggggactcctgggttttctccctcccgactccctaataaaccccgtgaaccttggaaacaagaaaaaaattat

SEQ ID NO: 291467 - DNA, 1543 bp, Homo sapiens
aggactcgagctcaagctttttttccagtgagcagagtgaagggagctagtgtttaggtagcagtcaccattatgctcaaagcggtgatcctgattggaggccctcaaaagggaactcgcttcagacctttgtcttttgaggtgcccaaaccattgtttcctgtggcaggggtccctatgatccaacaccatattgaagcctgtgcccaggtccctggaatgcaggagattctgctcattggcttctaccaacctgatgagcccctcacccagttcctagaagccgcccagcaggagtttaaccttccagtcaggtacctgcaggaatttgcccccctaggcacagggggtggtctttaccattttcgagaccagatcctggctgggagccccgaggcattcttcgtgctcaatgctgatgtctgctccgacttccccttgagtgctatgttggaagcccaccgacgccagcgtcaccctttcttactccttggcactacggctaacaggacgcaatccctcaactacggctgcatcgttgagaatccacagacacacgaggtattgcactatgtggagaaacccagcacatttatcagtgacatcatcaactgcggcatctacctcttttctcctgaagccttgaagcctcttcgggatgtcttccagcgtaatcagcaggatgggcaattggaggactcaccaggcttgtggccaggggcaggtaccatccgcctagagcaggatgtgttttcagccctggcagggcagggccagatatacgtgcatctcactgatggtatctggagtcagatcaagtccgcaggttcagccctctacgcctcccgcctctacctgagccgataccaggacactcacccagaacggctggccaagcacaccccagggggcccatggatccgagggaatgtgtacatccacccgaccgccaaggtggccccctcggctgtgctgggccccaacgtctccatcgggaagggggtgaccgtgggtgagggtgtgcggctccgggagagcatcgtcctccatggagccactttgcaggagcacacgtgtgttctgcatagcatcgtgggctgggggagcaccgtgggacgctgggcccgcgtggagggtacccccagtgaccctaaccccaacgatccccgagcccgcatggacagtgagagcctcttcaaggacgggaagctgctgcctgctatcaccatcctgggctgccgagtccggatccctgccgaggtgctcatcctgaactcgattgttctgccacacaaggagctgagccgaagcttcaccaaccagatcatcctctgagtagggctgccagaaggcccccagctcctacccactccccttgaggctgctgcctgcttggccagcctctgtccagaaaggaccagagaaagccaggctggatcgtcacatgccggggagcaatgtggatggcctggggactcctgggttttctccctcccgactccctaataaaccccgtgaaccttggaaacaagaaaaaaattat

SEQ ID NO: 291468 - DNA, 455 bp, Homo sapiens
tgcgagaagacacgtgcgcggaaggagcttgcagtagcgggcggcagagctggagtgaagggagctagtgtttaggtagcagtcaccattatgctcaaagcggtgatcctgattggaggccctcaaaagggaactcgcttcagacctttgtcttttgaggtgcccaaaccattgtttcctgtggaactcgattgttctgccacacaaggagctgagccgaagcttcaccaaccagatcatcctctgagtagggctgccagaaggcccccagctcctacccactccccttgaggctgctgcctgcttggccagcctctgtccagaaaggaccagagaaagccaggctggatcgtcacatgccggggagcaatgtggatggcctggggactcctgggttttctccctcccgactccctaataaaccccgtgaaccttggaaacaagaaaaaaattat

SEQ ID NO: 291469 - DNA, 619 bp, Homo sapiens
  misc_feature (12)..(12): n is a, c, g, or t
  misc_feature (19)..(19): n is a, c, g, or t
  misc_feature (596)..(596): n is a, c, g, or t
atcgagctcgtnccaatgnagggactcgggggatgggcaattggaggactcaccaggcttgtggccaggggcaggtaccatccgcctagagcaggatgtgttttcagccctggcagggcagggccagatatacgtgcatctcactgatggtatctggagtcagatcaagtccgcaggttcagccctctacgcctcccgcctctacctgagccgataccaggacactcacccagaacggctggccaagcacaccccagggggcccatggatccgagggaatgtgtacatccacccgaccgccaaggtggccccctcggctgtgctgggccccaacgtctccatcgggaagggggtgaccgtgggtgagggtgtgcggctccgggagagcatcgtcctccatggagccactttgcaggagcacacgtgtgttctgcatagcatcgtgggctgggggagcaccgtgggacgctgggcccgcgtggagggtacccccagtgaccctaaccccaacgatccccgagcccgcatggacagtgagagcctcttcaaggacgggaagctgctgcctgctatcaccatcctggctcccgagtccnctgcattggtaccgagcatcgat

SEQ ID NO: 291470 - DNA, 951 bp, Homo sapiens
  misc_feature (823)..(823): n is a, c, g, or t
  misc_feature (850)..(851): n is a, c, g, or t
  misc_feature (854)..(854): n is a, c, g, or t
tgcgagaagacacgtgcgcggaaggagcttgcagtagcgggcggcagagctggagtgaagggagctagtggtaaagggagctggtggaggggtggcggcaggggtaaggggcaggggacaccctctagacggagagcgggctccgaggtcctggctggccctcggtgcgcccgcccctgtgttggtcccacaatccctggcaatgagaggccagggtttattggacagagtcagttgtggggttcagagggtcagcaatcaatcaatcctccgaatccagagatttagacccagtcgtccgtattaggactggaggggggtcaataggttcagtgtttgagatgccaagggaacctgtcttttgatttggggttcaacatacagagtttaggtagcagtcaccattatgctcaaagcggtgatcctgattggaggccctcaaaagggaactcgcttcagacctttgtcttttgaggtgcccaaaccattgtttcctgtggcaggggtccctatgatccaacaccatattgaagcctgtgcccaggtattgcactatgtggagaaacccagcacatttatcagtgacatcatcaactgcggcatctacctcttttctcctgaagccttgaagcctcttcgggatgtcttccagcgtaatcagcaggatgggcaattggaggactcaccaggcttgtggccaggggcaggtaccatccgcctagagcaggatgtgttttcagccctggcagggcagggccagatatacgtgcatctcactgatggtatctggagtcagatcaagtccgcaggttcagcctctagnctcccgctctactgagcggtacagganntcnccagaaggtggcaagcacacccaaggggcatggtccagggtgtttcactcccggacgcagtgccttgtggtgggccagtccgaaggggacgggaggg

SEQ ID NO: 291471 - DNA, 579 bp, Homo sapiens
aatggggcagggtggaagcaggctctgcctggggctccttgtgatagcaccacccaagtgggggctgggtgggagaggtcctgggatgtgagcagccacatcccagagagggccgaaccagacctggagagaggggcttagagaggtggtgggaatcctcctactcctgtccctgggagactgtgttagccccacagtcggggctcagctgggggactaatgtcagcattcttcctctctgccagggaggactcaccaggcttgtggccaggggcaggtaccatccgcctagagcaggatgtgttttcagccctggcagggcagggccagatatacgtgcatctcactgatggtatctggagtcagatcaagtccgcaggttcagccctctacgcctcccgcctctacctgagccgataccaggacactcacccagcctctgtccagaaaggaccagagaaagccaggctggatcgtcacatgccggggagcaatgtggatggcctggggactcctgggttttctccctcccgactccctaataaaccccgtgaaccttggaaacaagaaaaaaattat

SEQ ID NO: 291472 - DNA, 590 bp, Homo sapiens
  misc_feature (229)..(229): n is a, c, g, or t
  misc_feature (233)..(233): n is a, c, g, or t
  misc_feature (249)..(249): n is a, c, g, or t
  misc_feature (251)..(252): n is a, c, g, or t
  misc_feature (290)..(290): n is a, c, g, or t
  misc_feature (315)..(315): n is a, c, g, or t
  misc_feature (328)..(328): n is a, c, g, or t
  misc_feature (347)..(347): n is a, c, g, or t
  misc_feature (359)..(359): n is a, c, g, or t
  misc_feature (363)..(363): n is a, c, g, or t
  misc_feature (366)..(366): n is a, c, g, or t
  misc_feature (384)..(384): n is a, c, g, or t
  misc_feature (386)..(386): n is a, c, g, or t
  misc_feature (388)..(388): n is a, c, g, or t
  misc_feature (390)..(390): n is a, c, g, or t
  misc_feature (401)..(401): n is a, c, g, or t
  misc_feature (415)..(415): n is a, c, g, or t
  misc_feature (426)..(426): n is a, c, g, or t
  misc_feature (446)..(446): n is a, c, g, or t
  misc_feature (465)..(465): n is a, c, g, or t
  misc_feature (499)..(499): n is a, c, g, or t
  misc_feature (508)..(508): n is a, c, g, or t
  misc_feature (523)..(523): n is a, c, g, or t
  misc_feature (526)..(526): n is a, c, g, or t
  misc_feature (528)..(528): n is a, c, g, or t
  misc_feature (558)..(558): n is a, c, g, or t
tgcgagaagacacgtgcgcggaaggagcttgcagtagcgggcggcagagctggagtgaagggagctagtgtttaggtagcagtcaccattatgctcaaagcggtgatcctgattggaggccctcaaaagggaactcgcttcagacctttgtcttttgaggtgcccaaaccattgtttcctgtggcaggggtccctatgatccaacaccatattgaagcctgtgcccagncccnggaaggcaggagatgntnntcagggtgcggcgaccaacctgagtgagctccgcatcnagggtcctagtaatgccgcccatcnggagtggaaccgnccaggcagtgaccggcagnaaggggcccccntatncanatgggggggtctgtgacnantntnctatatcattnctctgttcgggganccccgaggcangcggcggtcgcaagtcgganggcggcgccgatggccccnggagggcgaggggtggaatccttaccgatgccancggcacccnggcggacgccggggnacnanggcgaacatttatctcaagcccgcaatganggcgtcagtcggggataaagccacatacacac

SEQ ID NO: 291473 - DNA, 530 bp, Homo sapiens
catagccctgtgaccccaagtacccccagtcacggaccccaacacataccagtctctgcaggctccatctcaacttgctcaccttcctcctcccctctcccttctccacttgccatctccagcagagcctcctgagtccctccccttctaacctcattctgtccctcttccttatccatcccagttcctcctctgtcactgcctgcccactccccttctggtccatttctcctaagccctgagtgtcccagagacgtctttcagaacagacagcaacacacagttgggcgcacacatgctcgggtgcagacgtgtgcacgtgcacacacagacagacatgcatactctcaggctgaggctccccttggaacatagcaccagagccctgctcaccagtcccagggtcttccctcctggggctagaagctgttcccttctagggatccttgccttaaccccccaccgccccatctaaggcctcctctgctcatagccatttctcactcccacccgtgtctctgcttccctct

SEQ ID NO: 291474 - DNA, 323 bp, Homo sapiens
aagtccctccagggcttatggtgtgtgcttctctccacagctgggccccaacgtctccatcgggaagggggtgaccgtgggtgagggtgtgcggctccgggagagcatcgtcctccatggagccactttgcaggagcacacgtgtgttctgcatagcatcgtgggctgggggagcaccgtgggacgctgggcccgcgtggagggtacccccagtgaccctaaccccaacgatccccgagcccgcatggacagtgagagcctcttcaaggacgggaagctgctgcctgctatcaccatcctgggtatggcttcctgggggccag

SEQ ID NO: 291475 - DNA, 1532 bp, Homo sapiens
ggacgcgtgggtcgacccacgcgtccggaagggagctagtgtttaggtagcagtcaccattatgctcaaagcggtgatcctgattggaggccctcaaaagggaactcgcttcagacctttgtcttttgaggtgcccaaaccattgtttcctgtggcaggggtccctatgatccaacaccatattgaagcctgtgcccaggtccctggaatgcaggagattctgctcattggcttctaccaacctgatgagcccctcacccagttcctagaagccgcccagcaggagtttaaccttccagtcaggtacctgcaggaatttgcccccctaggcacagggggtggtctttaccattttcgagaccagatcctggctgggagccccgaggcattcttcgtgctcaatgctgatgtctgctccgacttccccttgagtgctatgttggaagcccaccgacgccagcgtcaccctttcttactccttggcactacggctaacaggacgcaatccctcaactacggctgcatcgttgagaatccacagacacacgaggtattgcactatgtggagaaacccagcacatttatcagtgacatcatcaactgcggcatctacctcttttctcctgaagccttgaagcctcttcgggatgtcttccagcgtaatcagcaggatgggcaattggaggactcaccaggcttgtggccaggggcaggtaccatccgcctagagcaggatgtgttttcagccctggcagggcagggccagatatacgtgcatctcactgatggtatctggagtcagatcaagtccgcaggttcagccctctacgcctcccgcctctacctgagccgataccaggacactcacccagaacggctggccaagcacaccccagggggcccatggatccgagggaatgtgtacatccacccgaccgccaaggtggccccctcggctgtgctgggccccaacgtctccatcgggaagggggtgaccgtgggtgagggtgtgcggctccgggagagcatcgtcctccatggagccactttgcaggagcacacgtgtgttctgcatagcatcgtgggctgggggagcaccgtgggacgctgggcccgcgtggagggtacccccagtgaccctaaccccaacgatccccgagcccgcatggacagtgagagcctcttcaaggacgggaagctgctgcctgctatcaccatcctgggctgccgagtccggatccctgccgaggtgctcatcctgaactcgattgttctgccacacaaggagctgagccgaagcttcaccaaccagatcatcctctgagtagggctgccagaaggcccccagctcctacccactccccttgaggctgctgcctgcttggccagcctctgtccagaaaggaccagagaaagccaggctggatcgtcacatgccggggagcaatgtggatggcctggggactcctgggttttctccctcccgactccctaataaaccccgtgaaccttggaaacaagaaaaaaattat

SEQ ID NO: 291476 - DNA, 1524 bp, Homo sapiens
tctgagcttgatttctctgttggaatttgaagttttaggtagcagtcaccattatgctcaaagcggtgatcctgattggaggccctcaaaagggaactcgcttcagacctttgtcttttgaggtgcccaaaccattgtttcctgtggcaggggtccctatgatccaacaccatattgaagcctgtgcccaggtccctggaatgcaggagattctgctcattggcttctaccaacctgatgagcccctcacccagttcctagaagccgcccagcaggagtttaaccttccagtcaggtacctgcaggaatttgcccccctaggcacagggggtggtctttaccattttcgagaccagatcctggctgggagccccgaggcattcttcgtgctcaatgctgatgtctgctccgacttccccttgagtgctatgttggaagcccaccgacgccagcgtcaccctttcttactccttggcactacggctaacaggacgcaatccctcaactacggctgcatcgttgagaatccacagacacacgaggtattgcactatgtggagaaacccagcacatttatcagtgacatcatcaactgcggcatctacctcttttctcctgaagccttgaagcctcttcgggatgtcttccagcgtaatcagcaggatgggcaattggaggactcaccaggcttgtggccaggggcaggtaccatccgcctagagcaggatgtgttttcagccctggcagggcagggccagatatacgtgcatctcactgatggtatctggagtcagatcaagtccgcaggttcagccctctacgcctcccgcctctacctgagccgataccaggacactcacccagaacggctggccaagcacaccccagggggcccatggatccgagggaatgtgtacatccacccgaccgccaaggtggccccctcggctgtgctgggccccaacgtctccatcgggaagggggtgaccgtgggtgagggtgtgcggctccgggagagcatcgtcctccatggagccactttgcaggagcacacgtgtgttctgcatagcatcgtgggctgggggagcaccgtgggacgctgggcccgcgtggagggtacccccagtgaccctaaccccaacgatccccgagcccgcatggacagtgagagcctcttcaaggacgggaagctgctgcctgctatcaccatcctgggctgccgagtccggatccctgccgaggtgctcatcctgaactcgattgttctgccacacaaggagctgagccgaagcttcaccaaccagatcatcctctgagtagggctgccagaaggcccccagctcctacccactccccttgaggctgctgcctgcttggccagcctctgtccagaaaggaccagagaaagccaggctggatcgtcacatgccggggagcaatgtggatggcctggggactcctgggttttctccctcccgactccctaataaaccccgtgaaccttggaaacaagaaaaaaattat

SEQ ID NO: 291477 - DNA, 1448 bp, Homo sapiens
tgcgagaagacacgtgcgcggaaggagcttgcagtagcgggcggcagagctggagtgaagggagctagtggcaggggtccctatgatccaacaccatattgaagcctgtgcccaggtccctggaatgcaggagattctgctcattggcttctaccaacctgatgagcccctcacccagttcctagaagccgcccagcaggagtttaaccttccagtcaggtacctgcaggaatttgcccccctaggcacagggggtggtctttaccattttcgagaccagatcctggctgggagccccgaggcattcttcgtgctcaatgctgatgtctgctccgacttccccttgagtgctatgttggaagcccaccgacgccagcgtcaccctttcttactccttggcactacggctaacaggacgcaatccctcaactacggctgcatcgttgagaatccacagacacacgaggtattgcactatgtggagaaacccagcacatttatcagtgacatcatcaactgcggcatctacctcttttctcctgaagccttgaagcctcttcgggatgtcttccagcgtaatcagcaggatgggcaattggaggactcaccaggcttgtggccaggggcaggtaccatccgcctagagcaggatgtgttttcagccctggcagggcagggccagatatacgtgcatctcactgatggtatctggagtcagatcaagtccgcaggttcagccctctacgcctcccgcctctacctgagccgataccaggacactcacccagaacggctggccaagcacaccccagggggcccatggatccgagggaatgtgtacatccacccgaccgccaaggtggccccctcggctgtgctgggccccaacgtctccatcgggaagggggtgaccgtgggtgagggtgtgcggctccgggagagcatcgtcctccatggagccactttgcaggagcacacgtgtgttctgcatagcatcgtgggctgggggagcaccgtgggacgctgggcccgcgtggagggtacccccagtgaccctaaccccaacgatccccgagcccgcatggacagtgagagcctcttcaaggacgggaagctgctgcctgctatcaccatcctgggctgccgagtccggatccctgccgaggtgctcatcctgaactcgattgttctgccacacaaggagctgagccgaagcttcaccaaccagatcatcctctgagtagggctgccagaaggcccccagctcctacccactccccttgaggctgctgcctgcttggccagcctctgtccagaaaggaccagagaaagccaggctggatcgtcacatgccggggagcaatgtggatggcctggggactcctgggttttctccctcccgactccctaataaaccccgtgaaccttggaaacaagaaaaaaattat

SEQ ID NO: 291478 - DNA, 2148 bp, Homo sapiens
tgcgagaagacacgtgcgcggaaggagcttgcagtagcgggcggcagagctggagtgaagggagctagtggtaaagggagctggtggaggggtggcggcaggggtaaggggcaggggacaccctctagacggagagcgggctccgaggtcctggctggccctcggtgcgcccgcccctgtgttggtcccacaatccctggcaatgagaggccagggtttattggacagagtcagttgtggggttcagagggtcagcaatcaatcaatcctccgaatccagagatttagacccagtcgtccgtattaggactggaggggggtcaataggttcagtgtttgagatgccaagggaacctgtcttttgatttggggttcaacatacagagtttaggtagcagtcaccattatgctcaaagcggtgatcctgattggaggccctcaaaagggaactcgcttcagacctttgtcttttgaggtgcccaaaccattgtttcctgtggcaggggtccctatgatccaacaccatattgaagcctgtgcccaggtccctggaatgcaggagattctgctcattggcttctaccaacctgatgagcccctcacccagttcctagaagccgcccagcaggagtttaaccttccagtcaggtgtttgtgcacacactcgtatatgggggggtggggatgccctaggcctctgagttcttggaagtgggttgagtcagcatttgctggagttcatcctcgcctactagaaggattcttgtttggacatcaatgaatctctgagtatatagagtttctctgtgggccttgggcaggagtagtcctgggagcaagcggtggcggtcaggtgccctggctcatggtatctgtttcctaagatccactgagctggctctcgggtccctggggacaggtacctgcaggaatttgcccccctaggcacagggggtggtctttaccattttcgagaccagatcctggctgggagccccgaggcattcttcgtgctcaatgctgatgtctgctccgacttccccttgagtgctatgttggaagcccaccgacgccagcgtcaccctttcttactccttggcactacggctaacaggacgcaatccctcaactacggctgcatcgttgagaatccacagacacacgaggtattgcactatgtggagaaacccagcacatttatcagtgacatcatcaactgcggcatctacctcttttctcctgaagccttgaagcctcttcgggatgtcttccagcgtaatcagcaggatgggcaattggaggactcaccaggcttgtggccaggggcaggtaccatccgcctagagcaggatgtgttttcagccctggcagggcagggccagatatacgtgcatctcactgatggtatctggagtcagatcaagtccgcaggttcagccctctacgcctcccgcctctacctgagccgataccaggacactcacccagaacggctggccaagcacaccccagggggcccatggatccgagggaatgtgtacatccacccgaccgccaaggtggccccctcggctgtgctgggccccaacgtctccatcgggaagggggtgaccgtgggtgagggtgtgcggctccgggagagcatcgtcctccatggagccactttgcaggagcacacgtgtgttctgcatagcatcgtgggctgggggagcaccgtgggacgctgggcccgcgtggagggtacccccagtgaccctaaccccaacgatccccgagcccgcatggacagtgagagcctcttcaaggacgggaagctgctgcctgctatcaccatcctgggctgccgagtccggatccctgccgaggtgctcatcctgaactcgattgttctgccacacaaggagctgagccgaagcttcaccaaccagatcatcctctgagtagggctgccagaaggcccccagctcctacccactccccttgaggctgctgcctgcttggccagcctctgtccagaaaggaccagagaaagccaggctggatcgtcacatgccggggagcaatgtggatggcctggggactcctgggttttctccctcccgactccctaataaaccccgtgaaccttggaaacaagaaaaaaattat

SEQ ID NO: 291479 - DNA, 1795 bp, Homo sapiens
  misc_feature (1)..(1): n is a, c, g, or t
  misc_feature (16)..(16): n is a, c, g, or t
  misc_feature (20)..(20): n is a, c, g, or t
naattcggcactaggnagtnaagggagctagtgtttaggtagcagtcaccattatgctcaaagcggtgatcctgattggaggccctcaaaagggaactcgcttcagacctttgtcttttgaggtgcccaaaccattgtttcctgtggcaggggtccctatgatccaacaccatattgaagcctgtgcccaggtccctggaatgcaggagattctgctcattggcttctaccaacctgatgagcccctcacccagttcctagaagccgcccagcaggagtttaaccttccagtcaggtgtttgtgcacacactcgtatatgggggggtggggatgccctaggcctctgagttcttggaagtgggttgagtcagcatttgctggagttcatcctcgcctactagaaggattcttgtttggacatcaatgaatctctgagtatatagagtttctctgtgggccttgggcaggagtagtcctgggagcaagcggtggcggtcaggtgccctggctcatggtatctgtttcctaagatccactgagctggctctcgggtccctggggacaggtacctgcaggaatttgcccccctaggcacagggggtggtctttaccattttcgagaccagatcctggctgggagccccgaggcattcttcgtgctcaatgctgatgtctgctccgacttccccttgagtgctatgttggaagcccaccgacgccagcgtcaccctttcttactccttggcactacggctaacaggacgcaatccctcaactacggctgcatcgttgagaatccacagacacacgaggtattgcactatgtggagaaacccagcacatttatcagtgacatcatcaactgcggcatctacctcttttctcctgaagccttgaagcctcttcgggatgtcttccagcgtaatcagcaggatgggcaattggaggactcaccaggcttgtggccaggggcaggtaccatccgcctagagcaggatgtgttttcagccctggcagggcagggccagatatacgtgcatctcactgatggtatctggagtcagatcaagtccgcaggttcagccctctacgcctcccgcctctacctgagccgataccaggacactcacccagaacggctggccaagcacaccccagggggcccatggatccgagggaatgtgtacatccacccgaccgccaaggtggccccctcggctgtgctgggccccaacgtctccatcgggaagggggtgaccgtgggtgagggtgtgcggctccgggagagcatcgtcctccatggagccactttgcaggagcacacgtgtgttctgcatagcatcgtgggctgggggagcaccgtgggacgctgggcccgcgtggagggtacccccagtgaccctaaccccaacgatccccgagcccgcatggacagtgagagcctcttcaaggacgggaagctgctgcctgctatcaccatcctgggctgccgagtccggatccctgccgaggtgctcatcctgaactcgattgttctgccacacaaggagctgagccgaagcttcaccaaccagatcatcctctgagtagggctgccagaaggcccccagctcctacccactccccttgaggctgctgcctgcttggccagcctctgtccagaaaggaccagagaaagccaggctggatcgtcacatgccggggagcaatgtggatggcctggggactcctgggttttctccctcccgactccctaataaaccccgtgaaccttggaaacaagaaaaaaattat

SEQ ID NO: 291480 - DNA, 1816 bp, Homo sapiens
tgcgagaagacacgtgcgcggaaggagcttgcagtagcgggcggcagagctggagtgaagggagctagtggtaaagggagctggtggaggggtggcggcaggggtaaggggcaggggacaccctctagacggagagcgggctccgaggtcctggctggccctcggtgcgcccgcccctgtgttggtcccacaatccctggcaatgagaggccagggtttattggacagagtcagttgtggggttcagagggtcagcaatcaatcaatcctccgaatccagagatttagacccagtcgtccgtattaggactggaggggggtcaataggttcagtgtttgagatgccaagggaacctgtcttttgatttggggttcaacatacagagtttaggtagcagtcaccattatgctcaaagcggtgatcctgattggaggccctcaaaagggaactcgcttcagacctttgtcttttgaggtgcccaaaccattgtttcctgtggcaggggtccctatgatccaacaccatattgaagcctgtgcccaggtccctggaatgcaggagattctgctcattggcttctaccaacctgatgagcccctcacccagttcctagaagccgcccagcaggagtttaaccttccagtcagatcctggctgggagccccgaggcattcttcgtgctcaatgctgatgtctgctccgacttccccttgagtgctatgttggaagcccaccgacgccagcgtcaccctttcttactccttggcactacggctaacaggacgcaatccctcaactacggctgcatcgttgagaatccacagacacacgaggtattgcactatgtggagaaacccagcacatttatcagtgacatcatcaactgcggcatctacctcttttctcctgaagccttgaagcctcttcgggatgtcttccagcgtaatcagcaggatgggcaattggaggactcaccaggcttgtggccaggggcaggtaccatccgcctagagcaggatgtgttttcagccctggcagggcagggccagatatacgtgcatctcactgatggtatctggagtcagatcaagtccgcaggttcagccctctacgcctcccgcctctacctgagccgataccaggacactcacccagaacggctggccaagcacaccccagggggcccatggatccgagggaatgtgtacatccacccgaccgccaaggtggccccctcggctgtgctgggccccaacgtctccatcgggaagggggtgaccgtgggtgagggtgtgcggctccgggagagcatcgtcctccatggagccactttgcaggagcacacgtgtgttctgcatagcatcgtgggctgggggagcaccgtgggacgctgggcccgcgtggagggtacccccagtgaccctaaccccaacgatccccgagcccgcatggacagtgagagcctcttcaaggacgggaagctgctgcctgctatcaccatcctgggctgccgagtccggatccctgccgaggtgctcatcctgaactcgattgttctgccacacaaggagctgagccgaagcttcaccaaccagatcatcctctgagtagggctgccagaaggcccccagctcctacccactccccttgaggctgctgcctgcttggccagcctctgtccagaaaggaccagagaaagccaggctggatcgtcacatgccggggagcaatgtggatggcctggggactcctgggttttctccctcccgactccctaataaaccccgtgaaccttggaaacaagaaaaaaattat

SEQ ID NO: 291481 - DNA, 2036 bp, Homo sapiens
tgcgagaagacacgtgcgcggaaggagcttgcagtagcgggcggcagagctggagtgaagggagctagtggtaaagggagctggtggaggggtggcggcaggggtaaggggcaggggacaccctctagacggagagcgggctccgaggtcctggctggccctcggtgcgcccgcccctgtgttggtcccacaatccctggcaatgagaggccagggtttattggacagagtcagttgtggggttcagagggtcagcaatcaatcaatcctccgaatccagagatttagacccagtcgtccgtattaggactggaggggggtcaataggttcagtgtttgagatgccaagggaacctgtcttttgatttggggttcaacatacagagtttaggtagcagtcaccattatgctcaaagcggtgatcctgattggaggccctcaaaagggaactcgcttcagacctttgtcttttgaggtgcccaaaccattgtttcctgtggcaggggtccctatgatccaacaccatattgaagcctgtgcccaggtccctggaatgcaggagattctgctcattggcttctaccaacctgatgagcccctcacccagttcctagaagccgcccagcaggagtttaaccttccagtcaggtacctgcaggaatttgcccccctaggcacagggggtggtctttaccattttcgagaccagatcctggctgggagccccgaggcattcttcgtgctcaatgctgatgtctgctccgacttccccttgagtgctatgttggaagcccaccgacgccagcgtcaccctttcttactccttggcactacggctaacaggacgcaatccctcaactacggctgcatcgttgagaatccacagacacacgaggtattgcactatgtggagaaacccagcacatttatcagtgacatcatcaactgcggcatctacctcttttctcctgaagccttgaagcctcttcgggatgtcttccagcgtaatcagcaggatgggcaattggaggactcaccaggcttgtggccaggggcaggtaccatccgcctagagcaggatgtgttttcagccctggcagggcagggccagatatacgtgcatctcactgatggtatctggagtcagatcaagtccgcaggttcagccctctacgcctcccgcctctacctgagccgataccaggacactcacccagaacggctggccaagcacaccccagggggcccatggatccgaggtacccagcctgccccaattcctaacctttggcttccaccccagccctctgaaccaggattcttgacctcgagtccagagttaaagcctcaatccctgccccttcctgatcaaattcggtttgggatatttgcccccagggcctctcttctgcttctagggaatgtgtacatccacccgaccgccaaggtggccccctcggctgtgctgggccccaacgtctccatcgggaagggggtgaccgtgggtgagggtgtgcggctccgggagagcatcgtcctccatggagccactttgcaggagcacacgtgtgttctgcatagcatcgtgggctgggggagcaccgtgggacgctgggcccgcgtggagggtacccccagtgaccctaaccccaacgatccccgagcccgcatggacagtgagagcctcttcaaggacgggaagctgctgcctgctatcaccatcctgggctgccgagtccggatccctgccgaggtgctcatcctgaactcgattgttctgccacacaaggagctgagccgaagcttcaccaaccagatcatcctctgagtagggctgccagaaggcccccagctcctacccactccccttgaggctgctgcctgcttggccagcctctgtccagaaaggaccagagaaagccaggctggatcgtcacatgccggggagcaatgtggatggcctggggactcctgggttttctccctcccgactccctaataaaccccgtgaaccttggaaacaagaaaaaaattat

SEQ ID NO: 291482 - DNA, 1897 bp, Homo sapiens
tgcgagaagacacgtgcgcggaaggagcttgcagtagcgggcggcagagctggagtgaagggagctagtggtaaagggagctggtggaggggtggcggcaggggtaaggggcaggggacaccctctagacggagagcgggctccgaggtcctggctggccctcggtgcgcccgcccctgtgttggtcccacaatccctggcaatgagaggccagggtttattggacagagtcagttgtggggttcagagggtcagcaatcaatcaatcctccgaatccagagatttagacccagtcgtccgtattaggactggaggggggtcaataggttcagtgtttgagatgccaagggaacctgtcttttgatttggggttcaacatacagagtttaggtagcagtcaccattatgctcaaagcggtgatcctgattggaggccctcaaaagggaactcgcttcagacctttgtcttttgaggtgcccaaaccattgtttcctgtggcaggggtccctatgatccaacaccatattgaagcctgtgcccaggtccctggaatgcaggagattctgctcattggcttctaccaacctgatgagcccctcacccagttcctagaagccgcccagcaggagtttaaccttccagtcaggtacctgcaggaatttgcccccctaggcacagggggtggtctttaccattttcgagaccagatcctggctgggagccccgaggcattcttcgtgctcaatgctgatgtctgctccgacttccccttgagtgctatgttggaagcccaccgacgccagcgtcaccctttcttactccttggcactacggctaacaggacgcaatccctcaactacggctgcatcgttgagaatccacagacacacgaggtattgcactatgtggagaaacccagcacatttatcagtgacatcatcaactgcggcatctacctcttttctcctgaagccttgaagcctcttcgggatgtcttccagcgtaatcagcaggatgggcaattggaggactcaccaggcttgtggccaggggcaggtaccatccgcctagagcaggatgtgttttcagccctggcagggcagggccagatatacgtgcatctcactgatggtatctggagtcagatcaagtccgcaggttcagccctctacgcctcccgcctctacctgagccgataccaggacactcacccagaacggctggccaagcacaccccagggggcccatggatccgagggcctctcttctgcttctagggaatgtgtacatccacccgaccgccaaggtggccccctcggctgtgctgggccccaacgtctccatcgggaagggggtgaccgtgggtgagggtgtgcggctccgggagagcatcgtcctccatggagccactttgcaggagcacacgtgtgttctgcatagcatcgtgggctgggggagcaccgtgggacgctgggcccgcgtggagggtacccccagtgaccctaaccccaacgatccccgagcccgcatggacagtgagagcctcttcaaggacgggaagctgctgcctgctatcaccatcctgggctgccgagtccggatccctgccgaggtgctcatcctgaactcgattgttctgccacacaaggagctgagccgaagcttcaccaaccagatcatcctctgagtagggctgccagaaggcccccagctcctacccactccccttgaggctgctgcctgcttggccagcctctgtccagaaaggaccagagaaagccaggctggatcgtcacatgccggggagcaatgtggatggcctggggactcctgggttttctccctcccgactccctaataaaccccgtgaaccttggaaacaagaaaaaaattat

SEQ ID NO: 291483 - DNA, 893 bp, Homo sapiens
  misc_feature (12)..(12): n is a, c, g, or t
  misc_feature (19)..(19): n is a, c, g, or t
atcgagctcgtnccaatgnagggactcgggggatgggcaattggaggactcaccaggcttgtggccaggggcaggtaccatccgcctagagcaggatgtgttttcagccctggcagggcagggccagatatacgtgcatctcactgatggtatctggagtcagatcaagtccgcaggttcagccctctacgcctcccgcctctacctgagccgataccaggacactcacccagaacggctggccaagcacaccccagggggcccatggatccgagggaatgtgtacatccacccgaccgccaaggtggccccctcggctgtgctgggccccaacgtctccatcgggaagggggtgaccgtgggtgagggtgtgcggctccgggagagcatcgtcctccatggagccactttgcaggagcacacgtgtgttctgcatagcatcgtgggctgggggagcaccgtgggacgctgggcccgcgtggagggtacccccagtgaccctaaccccaacgatccccgagcccgcatggacagtgagagcctcttcaaggacgggaagctgctgcctgctatcaccatcctgggctgccgagtccggatccctgccgaggtgctcatcctgaactcgattgttctgccacacaaggagctgagccgaagcttcaccaaccagatcatcctctgagtagggctgccagaaggcccccagctcctacccactccccttgaggctgctgcctgcttggccagcctctgtccagaaaggaccagagaaagccaggctggatcgtcacatgccggggagcaatgtggatggcctggggactcctgggttttctccctcccgactccctaataaaccccgtgaaccttggaaacaagaaaaaaattat

SEQ ID NO: 291484 - DNA, 1096 bp, Homo sapiens
aatggggcagggtggaagcaggctctgcctggggctccttgtgatagcaccacccaagtgggggctgggtgggagaggtcctgggatgtgagcagccacatcccagagagggccgaaccagacctggagagaggggcttagagaggtggtgggaatcctcctactcctgtccctgggagactgtgttagccccacagtcggggctcagctgggggactaatgtcagcattcttcctctctgccagggaggactcaccaggcttgtggccaggggcaggtaccatccgcctagagcaggatgtgttttcagccctggcagggcagggccagatatacgtgcatctcactgatggtatctggagtcagatcaagtccgcaggttcagccctctacgcctcccgcctctacctgagccgataccaggacactcacccagaacggctggccaagcacaccccagggggcccatggatccgagggaatgtgtacatccacccgaccgccaaggtggccccctcggctgtgctgggccccaacgtctccatcgggaagggggtgaccgtgggtgagggtgtgcggctccgggagagcatcgtcctccatggagccactttgcaggagcacacgtgtgttctgcatagcatcgtgggctgggggagcaccgtgggacgctgggcccgcgtggagggtacccccagtgaccctaaccccaacgatccccgagcccgcatggacagtgagagcctcttcaaggacgggaagctgctgcctgctatcaccatcctgggctgccgagtccggatccctgccgaggtgctcatcctgaactcgattgttctgccacacaaggagctgagccgaagcttcaccaaccagatcatcctctgagtagggctgccagaaggcccccagctcctacccactccccttgaggctgctgcctgcttggccagcctctgtccagaaaggaccagagaaagccaggctggatcgtcacatgccggggagcaatgtggatggcctggggactcctgggttttctccctcccgactccctaataaaccccgtgaaccttggaaacaagaaaaaaattat

SEQ ID NO: 291485 - DNA, 1603 bp, Homo sapiens
  misc_feature (1580)..(1580): n is a, c, g, or t
tgcgagaagacacgtgcgcggaaggagcttgcagtagcgggcggcagagctggagtgaagggagctagtggtaaagggagctggtggaggggtggcggcaggggtaaggggcaggggacaccctctagacggagagcgggctccgaggtcctggctggccctcggtgcgcccgcccctgtgttggtcccacaatccctggcaatgagaggccagggtttattggacagagtcagttgtggggttcagagggtcagcaatcaatcaatcctccgaatccagagatttagacccagtcgtccgtattaggactggaggggggtcaataggttcagtgtttgagatgccaagggaacctgtcttttgatttggggttcaacatacagagtttaggtagcagtcaccattatgctcaaagcggtgatcctgattggaggccctcaaaagggaactcgcttcagacctttgtcttttgaggtgcccaaaccattgtttcctgtggcaggggtccctatgatccaacaccatattgaagcctgtgcccaggtccctggaatgcaggagattctgctcattggcttctaccaacctgatgagcccctcacccagttcctagaagccgcccagcaggagtttaaccttccagtcaggtacctgcaggaatttgcccccctaggcacagggggtggtctttaccattttcgagaccagatcctggctgggagccccgaggcattcttcgtgctcaatgctgatgtctgctccgacttccccttgagtgctatgttggaagcccaccgacgccagcgtcaccctttcttactccttggcactacggctaacaggacgcaatccctcaactacggctgcatcgttgagaatccacagacacacgaggtattgcactatgtggagaaacccagcacatttatcagtgacatcatcaactgcggcatctacctcttttctcctgaagccttgaagcctcttcgggatgtcttccagcgtaatcagcaggatgggcaattggaggactcaccaggcttgtggccaggggcaggtaccatccgcctagagcaggatgtgttttcagccctggcagggcagggccagatatacgtgcatctcactgatggtatctggagtcagatcaagtccgcaggttcagccctctacgcctcccgcctctacctgagccgataccaggacactcacccagaacggctggccaagcacaccccagggggcccatggatccgagggaatgtgtacatccacccgaccgccaaggtggccccctcggctgtgctgggccccaacgtctccatcgggaagggggtgaccgtgggtgagggtgtgcggctccgggagagcatcgtcctccatggagccactttgcaggagcacacgtgtgttctgcatagcatcgtgggctgggggagcaccgtgggacgctgggcccgcgtggagggtacccccagtgaccctaaccccaacgatccccgagcccgcatggacagtgagagcctcttcaaggacgggaagctgctgcctgctatcaccatcctggctcccgagtccnctgcattggtaccgagcatcgat

SEQ ID NO: 291486 - DNA, 1262 bp, Homo sapiens
tgcgagaagacacgtgcgcggaaggagcttgcagtagcgggcggcagagctggagtgaagggagctagtggtaaagggagctggtggaggggtggcggcaggggtaaggggcaggggacaccctctagacggagagcgggctccgaggtcctggctggccctcggtgcgcccgcccctgtgttggtcccacaatccctggcaatgagaggccagggtttattggacagagtcagttgtggggttcagagggtcagcaatcaatcaatcctccgaatccagagatttagacccagtcgtccgtattaggactggaggggggtcaataggttcagtgtttgagatgccaagggaacctgtcttttgatttggggttcaacatacagagtttaggtagcagtcaccattatgctcaaagcggtgatcctgattggaggccctcaaaagggaactcgcttcagacctttgtcttttgaggtgcccaaaccattgtttcctgtggcaggggtccctatgatccaacaccatattgaagcctgtgcccaggtccctggaatgcaggagattctgctcattggcttctaccaacctgatgagcccctcacccagttcctagaagccgcccagcaggagtttaaccttccagtcaggtacctgcaggaatttgcccccctaggcacagggggtggtctttaccattttcgagaccagatcctggctgggagccccgaggcattcttcgtgctcaatgctgatgtctgctccgacttccccttgagtgctatgttggaagcccaccgacgccagcgtcaccctttcttactccttggcactacggctaacaggacgcaatccctcaactacggctgcatcgttgagaatccacagacacacgaggtattgcactatgtggagaaacccagcacatttatcagtgacatcatcaactgcggcatctacctcttttctcctgaagccttgaagcctcttcgggatgtcttccagcgtaatcagcaggatgggcaattggaggactcaccaggcttgtggccaggggcaggtaccatccgcctagagcaggatgtgttttcagccctggcagggcagggccagatatacgtgcatctcactgatggtatctggagtcagatcaagtccgcaggttcagccctctactcctgcgccgttgtcagtgcccactttagatgtatctaattctcctgactgttcttcccaggggagtgtggaggtcttgttcctgttc

SEQ ID NO: 291487 - DNA, 993 bp, Homo sapiens
tgcgagaagacacgtgcgcggaaggagcttgcagtagcgggcggcagagctggagtgaagggagctagtggtaaagggagctggtggaggggtggcggcaggggtaaggggcaggggacaccctctagacggagagcgggctccgaggtcctggctggccctcggtgcgcccgcccctgtgttggtcccacaatccctggcaatgagaggccagggtttattggacagagtcagttgtggggttcagagggtcagcaatcaatcaatcctccgaatccagagatttagacccagtcgtccgtattaggactggaggggggtcaataggttcagtgtttgagatgccaagggaacctgtcttttgatttggggttcaacatacagaggttagttttaggattcatgtttagcatatagaggatttttgctgggattaggggttcttcaaattcagatcagtgttagttcagtacttggggattacgttcaggatttaagttaaatatctgaggctcactcagggtttgctgtccaatattcagggttcactattggggttcagggcttaatatctagaatgaagacgcaacactttgggaatttgaggcttcagtattttgaggtttgggtctgagaagggagtctctgccaggtttctgaatttgcagaatttgttcatggccagagggaagtcttttagagatcaaattgtggggtgtgaatttcagaatttgggaggaatcactgtgaggtttgaaggccgactggaatctgggttgggatttgagatgtgtgggatttgtgaggttctgtccaggcagggactatattgagctttgggtttacatcttgggggagggctaagtgctgctatttggggtttggggtttggttggggtgtgagatctgagcttgatttctctgctgggatttgagatgtgtgggatttgtgaggtgttgggtccaggcagagactatattgagctttgggtt

SEQ ID NO: 291488 - DNA, 865 bp, Homo sapiens
tttatttgttcgtgctttaatataaaacatacatataaacacgcacacacacatgcatgtacacacctacacacatatagttttgtgctcagcaccaggtagctgtgagagaaacagagccaaatgggtgcagtccctgcctcttggttactgtgagtctaataggagtgacagaatcaaaaggcaacctttgcaaatgatacaatgccatgggtgaggcgtggccagagttcaggagtgcccaggcatgaacagctaactcgggccagcaagagaggacgcacagagagagtgacagtgtcaactgggtttggaaaggtgggctttccagatgaagagatgagaaaggccattccaggcacaggcatgcagtcgggtggaaatgcgtctgagaggtaggtggtggggaggatcaggcagggaaagccatggactttggatttatctgaagctgaatcaggtgaagggcagtcatctcagggtttaaagccaggcagcagtaggatgcggatgcgcactgcattttagccaggccaccctggcagcagggaggagaggcaagaagggcctagaaatcagagggtcttaggggactgtggcggtagtcccttcttctactgaacccagcctgctctgtcctcaggtattgcactatgtggagaaacccagcacatttatcagtgacatcatcaactgcggcatctacctcttttctcctgaagccttgaagcctcttcgggatgtcttccagcgtaatcagcaggatgggcaattgtgaggcaggccccatagccctgtgaccccaagtacccccagtcacggaccccaacacataccagtctctgcaggctccatctcaacttgc

SEQ ID NO: 291489 - DNA, 208 bp, Homo sapiens
cagatatttatcttaagagaggctggtgtcatgaaaaaagctatggactaagaatgggaagacaaagatcttttgtattggcactaccagctgtgtccctctgagggggtaatttttgccttttgaagatgttgggagggttaaagttcaggaaattatttttaaaactgtttcagtgaatatttagaaaaatattagtggagataga

SEQ ID NO: 291490 - DNA, 911 bp, Homo sapiens
gtcccgagtgtctgtcccaggcccccgccccacaggatcccggcccgggagcccccgatgcagggacccgcccgggactctgggtccccgcccatacctcaacttcgcacgactgcgtgcctcaagccgacgcagcggcctactctcgcactgcagacggggaaactgaggcctgaggcggccggggtggggcagacctcccggcgagcccgagcccccgcccccggctagccccgccctggcccgtaagaagcacccggggcgcgaggcgaaggcgcacagcgcggggccaggctgggtccagcagcgcgatggcagctcagcggctgggcaagcgcgtgctgagcaagctgcagtctccatcgcgggcccgcgggccagggggcagtcccggggggctgcagaagcggcacgcgcgcgtcaccgtcaagtatgaccggcgggagctgcagcggcggctggacgtggagaagtggatcgacgggcgcctggaggagctgtaccgcggcatggaggcagacatgcccgatgagatcaacattgatgaattgttggagttagagagtgaagaggagagaagccggaaaatccagggactcctgaagtcatgtgggaaacctgtcgaggacttcatccaggagctgctggcaaagcttcaaggcctccacaggcagcccggcctccgccagccaagcccctcccacgacggcagcctcagccccctccaggaccgggcccggactgctcacccctgaccctcttgcactctccctgccccccggacgccgcccagcttgcttgtgtataagttgtatttaatggttctgtaacaataaaaacacaaaaaagagttttgaccacgagaccaaaagacaaaccaacaaaaacaacagccaacagacaacacacaa

SEQ ID NO: 291491 - DNA, 771 bp, Homo sapiens
tccttgaaagggcagaagccagctcctctcccgaatcccagaatctgacattccaggactccactaggcctgttttcctctgtgggaactagagccaaggcgagagacccgtgccagccccgaggctcccggggcccatgggcccgggcattcgggctggtacagggccccggggctctctcagcccatctgtcacccctcccccccaacacccagatgtcccgtcttggcagtgctgtcccggactgccacattaatgctccagaacccgccagctgggccctggggccggtggggctcctgcagagccctggacaaaggcgagggagggagggaaggggatcctaagcacccctccctccctggccctaggaggcagacatgcccgatgagatcaacattgatgaattgttggagttagagagtgaagaggagagaagccggaaaatccagggactcctgaagtcatgtgggaaacctgtcgaggacttcatccaggagctgctggcaaagcttcaaggcctccacaggcagcccggcctccgccagccaagcccctcccacgacggcagcctcagccccctccaggaccgggcccggactgctcacccctgaccctcttgcactctccctgccccccggacgccgcccagcttgcttgtgtataagttgtatttaatggttctgtaacaataaaaacacaaaaaagagttttgaccacgagaccaaaagacaaaccaacaaaaacaacagccaacagacaacacacaa

SEQ ID NO: 291492 - DNA, 830 bp, Homo sapiens
gtcccgagtgtctgtcccaggcccccgccccacaggatcccggcccgggagcccccgatgcagggacccgcccgggactctgggtccccgcccatacctcaacttcgcacgactgcgtgcctcaagccgacgcagcggcctactctcgcactgcagacggggaaactgaggcctgaggcggccggggtggggcagacctcccggcgagcccgagcccccgcccccggctagccccgccctggcccgtaagaagcacccggggcgcgaggcgaaggcgcacagcgcggggccaggctgggtccagcagcgcgatggcagctcagcggctgggcaagcgcgtgctgagcaagctgcagtctccatcgcgggcccgcgggccagggggcagtcccggggggctgcagaagcggcacgcgcgcgtcaccgtcaagtatgaccggcgggagctgcagcggcggctggacgtggagaagtggatcgacgggcgcctggaggagctgtaccgcggcatgggactcctgaagtcatgtgggaaacctgtcgaggacttcatccaggagctgctggcaaagcttcaaggcctccacaggcagcccggcctccgccagccaagcccctcccacgacggcagcctcagccccctccaggaccgggcccggactgctcacccctgaccctcttgcactctccctgccccccggacgccgcccagcttgcttgtgtataagttgtatttaatggttctgtaacaataaaaacacaaaaaagagttttgaccacgagaccaaaagacaaaccaacaaaaacaacagccaacagacaacacacaa

SEQ ID NO: 291493 - DNA, 876 bp, Homo sapiens
gtcccgagtgtctgtcccaggcccccgccccacaggatcccggcccgggagcccccgatgcagggacccgcccgggactctgggtccccgcccatacctcaacttcgcacgactgcgtgcctcaagccgacgcagcggcctactctcgcactgcagacggggaaactgaggcctgaggcggccggggtggggcagacctcccggcgagcccgagcccccgcccccggctagccccgccctggcccgtaagaagcacccggggcgcgaggcgaaggcgcacagcgcggggccaggctgggtccagcagcgcgatggcagctcagcggctgggcaagcgcgtgctgagcaagctgcagtctccatcgcgggcccgcgggccagggggcagtcccggggggctgcagaagcggcacgcgcgcgtcaccgtcaagtatgaccggcgggagctgcagcggcggctggacgtggagaagtggatcgacgggcgcctggaggagctgtaccgcggcatggaggcagacatgcccgatgagatcaacattgatgaattgttggagttagagagtgaagaggagagaagccggaaaatccagggactcctgaagtcatgtgggaaacctgtcgaggacttcatccaggagctgctggcaaagcttcaaggcctccacaggcagcccggcctccgccagccaagcccctcccacgactgctcacccctgaccctcttgcactctccctgccccccggacgccgcccagcttgcttgtgtataagttgtatttaatggttctgtaacaataaaaacacaaaaaagagttttgaccacgagaccaaaagacaaaccaacaaaaacaacagccaacagacaacacacaa

SEQ ID NO: 291494 - DNA, 907 bp, Homo sapiens
gtcccgagtgtctgtcccaggcccccgccccacaggatcccggcccgggagcccccgatgcagggacccgcccgggactctgggtccccgcccatacctcaacttcgcacgactgcgtgcctcaagccgacgcagcggcctactctcgcactgcagacggggaaactgaggcctgaggcggccggggtggggcagacctcccggcgagcccgagcccccgcccccggctagccccgccctggcccgtaagaagcacccggggcgcgaggcgaaggcgcacagcgcggggccaggctgggtccagcagcgcgatggcagctcagcggctgggcaagcgcgtgctgagcaagctgcagtctccatcgcgggcccgcgggccagggggcagtcccggggggctgcagaagcggcacgcgcgcgtcaccgtcaagtatgaccggcgggagctgcagcggcggctggacgtggagaagtggatcgacgggcgcctggaggagctgtaccgcggcatggaggcagacatgcccgatgagatcaacattgatgaattgttggagttagagagtgaagaggagagaagccggaaaatccagggactcctgaagtcatgtgggaaacctgtcgaggtgagttttctctccctcattctctccctgttctggccccaagtactctgatgggggagggggaagaagctggcagaagggtctctggggaacaccacccggccccaccacccccggccccaacctgccctccgcagctctttctggtctccaggggtgtcttttgtcctcctacttgtctctctccctctctcccccatctgctgagggggctccattctgtcctcccccatctgccctgtttttgcctctcctgtgcctgtcctttggccaccagcctt

SEQ ID NO: 291495 - DNA, 251 bp, Homo sapiens
attctaaatgtctgcggtcttgagactcatttcttcagcatcggctagactccagctcctcctcgcctctgttgctatcctgccttgtggccagctatcctgaacgtagcaataagagcacacgtgtgaaggggcccacctagtggaaggcctggccttgagctagaacttttccttttctttaattatggtttaaaaaaaatgcatgaggccgggcgcagtggctcacgcctgtaatcccagcactttgg

SEQ ID NO: 291496 - DNA, 3159 bp, Homo sapiens
  misc_feature (1445)..(1446): n is a, c, g, or t
  misc_feature (1481)..(1482): n is a, c, g, or t
  misc_feature (1614)..(1615): n is a, c, g, or t
  misc_feature (2878)..(2878): n is a, c, g, or t
  misc_feature (2927)..(2927): n is a, c, g, or t
  misc_feature (3111)..(3111): n is a, c, g, or t
tgctgccatgtgccgctgccacgggtacccagcctgtcgctaaactttccgggcgccagcccggctctgagtcgcgcttctcagcggagtgacccagggacggaggacccaggctggctggggactgtctgctcttctcggcgggatccgtggagagtcctttccctggaatccgagccctaaccgtctctccccagccctatccggcgaggagcggagcgctgccagcggaggcagcgccttcccgaagcagtttatctttggacggttttctttaaaggaaaaagcaaccaacaggttgccagccccggcgccacacacgagacgccggagggagaagccccggcccggattcctctgcctgtgtgcgtccctcgcgggctgctggaggcgaggggagggagggggcgatggctcggcctgacccatccgcgccgccctcgctgttgctgctgctcctggcgcagctggtgggccgggcggccgccgcgtccaaggccccggtgtgccaggaaatcacggtgcccatgtgccgcggcatcggctacaacctgacgcacatgcccaaccagttcaaccacgacacgcaggacgaggcgggcctggaggtgcaccagttctggccgctggtggagatccaatgctcgccggacctgcgcttcttcctatgctctatgtacacgcccatctgtctgcccgactaccacaagccgctgccgccctgccgctcggtgtgcgagcgcgccaaggccggctgctcgccgctgatgcgccagtacggcttcgcctggcccgagcgcatgagctgcgaccgcctcccggtgctgggccgcgacgccgaggtcctctgcatggattacaaccgcagcgaggccaccacggcgccccccaggcctttcccagccaagcccacccttccaggcccgccaggggcgccggcctcggggggcgaatgccccgctgggggcccgttcgtgtgcaagtgtcgcgagcccttcgtgcccattctgaaggagtcacacccgctctacaacaaggtgcggacgggccaggtgcccaactgcgcggtaccctgctaccagccgtccttcagtgccgacgagcgcacgttcgccaccttctggataggcctgtggtcggtgctgtgcttcatctccacgtccaccacagtggccaccttcctcatcgacatggacacgcttccgctatcctgagcgccccatcatcttcctgtcagcctgctacctgtgcgtgtcgctgggcttcctggtgcgtctggtcgtgggccatgccagcgtggcctgcagccgcgagcacaaccacatccactacgagaccacgggccctgcactgtgcaccatcgtcttcctcctggtctacttcttcggcatggccagctccatctggtgggtcatcctgtcgctcacctggttcctggccgccgnnatgaagtggggcaacgaggccatcgcgggctacgnncagtacttccacctggctgcgtggctcatccccagcgtcaagtccatcacggcactggcgctgagctccgtggacggggacccagtggccggcatctgctacgtgggcaaccagaacctgaactcgctgcgnngcttcgtgctgggcccgctggtgctctacctgctggtgggcacgctcttcctgctggcgggcttcgtgtcgctcttccgcatccgcagcgtcatcaagcagggcggcaccaagacggacaagctggagaagctcatgatccgcatcggcatcttcacgctgctctacacggtccccgccagcattgtggtggcctgctacctgtacgagcagcactaccgcgagagctgggaggcggcgctcacctgcgcctgcccgggccacgacaccggccagccgcgcgccaagcccgagtactgggtgctcatgctcaagtacttcatgtgcctggtggtgggcatcacgtcgggcgtctggatctggtcgggcaagacggtggagtcgtggcggcgtttcaccagccgctgctgctgccgcccgcggcgcggccacaagagcgggggcgccatggccgcaggggactaccccgaggcgagcgccgcgctcacaggcaggaccgggccgccgggccccgccgccacctaccacaagcaggtgtccctgtcgcacgtgtaggaggctgccgccgagggactcggccggagagctgaggggaggggggcgttttgtttggtagttttgccaaggtcacttccgtttaccttcatggtgctgttgccccctcccgcggcgacttggagagagggaagaggggcgttttcgaggaagaacctgtcccaggtcttctccaaggggcccagctcacgtgtattctattttgcgtttcttactgccttctttatgggaaccctctttttaatttatatgtatttttcttaatttgtaactttgttgcattttggcaacaatttacctttgctttgggggctttacaatcctaaggttggcgttgtaatgaagttccacttggttcaggtttctttgaactgtgtggtctcaattgggaaaatatatttcctatacgtgtgtctttaaaaaaaaatgtgaacagtgaacgtttcggttgctgtgactgggaagttgttgggtgtgctttttcagccagcttctccttccactgcttaaagtgtccatgattctttaaggtgagctgcagtttatagccccaggtcatacctaggaggggagcataatgagctcagggcctccccaaagtgacaaggttagggagtgcttagcggttttgtgttcagccttagctttgtttatagagggaggttcagtttcttttctgtagtgcttgtaataattctcactcctaacngcaccatcgttgtgtcttgaataagttagaggtagcattatagaggatntggcataaatatttgcagtagtgagagcctaagcgatggtgattggtggagcttgaattttaggctggtgagatggcagcttttgtgcctgagaggtagtgggtggttcttaagcttcagtgatcccttttttttttttttttttttttttttaaggaacttgtgttataatttggtaaaagtntaaacccactccctctggacaatacttagcgacagttgctaaaggggc

SEQ ID NO: 291497 - DNA, 811 bp, Homo sapiens
atgccagtagcacccccattctacctccaagtgtgacaaccagaaatttttccagccaatgccaaatgttttctggggcacaaaaatcaccaccggttgagaaccactggttatatgattagacggaaagaaaaagagaaaaagaaagatgcctggctaggccaattagagatcttagataattactatatgcatgcaacattagatagttttattttcattaaacttttaaatcttttaaaatctcttacagaccctactttgaagctagcttgatataatgctaatgtgaccttgaacgatttctttcttcctgagtttgcctactagtatagcttaaagatccaagttacactattactcacttatatcatagccagcattgcttgatcagattatcagatagatacagtatcacggagacaaaatcctttcattatgatgtaagataaaaaatatctttcattaacaacacacgtaaaggaagtacccactggaccaactcaggttagaagggtaccagaccagaagatcagatcgtagaagttactggagaaaaagatcagcggacagcactcttgaactacatgccaggcctcttcttcctggaactctaatggatttaaatggcttaagagacgggatgaattgttgaaaatggttctttcaaaagacctcacggaaggccaaagacaagactcactgaggccaagctgatcaacaatatctataagttgacgcattctaatcatgtggcgatcttgaccttgggagcttgatttgtggaccagtgtccccaagaagatgacca

SEQ ID NO: 291498 - DNA, 436 bp, Homo sapiens
gcggcatattaaaagaatatacaccaccagcaagtgggatctcttcctggaatgcaaggatagttcaacatatgaaatcaatcaatgtaacacagcacattaacagaatgaaggggaaaaaaacacataaaacacgtatcatctcaactgacacagaaaaagcatctgacaaaattcagcaccccatgacaaaaacactcaagaagctaggcgtggtggctcatgcctgtaaccctagcactttgggaggccgaggtgggtggatcacgagatcaggagatcgagaccatcctgactaacacagtgaaaccccatctctactaaaaatataaaataattagccgggcgtggtggcaggcacctgtagtcccagctgctcgggaggctgaggcaggagaatggtgtgaacctcgaggcggagcttgcagggagccgc

SEQ ID NO: 291499 - DNA, 337 bp, Homo sapiens
agaatgaaggggaaaaaaacacataaaacacgtatcatctcaactgacacagaaaaagcatctgacaaaattcagcaccccatgacaaaaacactcaagaagctaggcgtggtggctcatgcctgtaaccctagcactttgggaggccgaggtgggcgaattgcttgggctcagaagtttgagaccagtctgggcagtatggtaaaaccctgtctctacacaacggccatgtgtggtggctctcatctgcaatcccagctacttgggaggatcacttgaggccagaagtttgagtccagcctggacgacacagcaagaccttgtttctaaatatata

SEQ ID NO: 291500 - DNA, 177 bp, Homo sapiens
atgtgtctccataacgttattttacaggtgcgtatctgaaatctgaaatttgggagaacattctactagtgttctctagtgagaaaatacagctggaaggaagaagggagggaagatgaaggagagagaaacagaatgcatttgagagaaaatgctatgtagactaaaatagaatac

SEQ ID NO: 291501 - DNA, 758 bp, Homo sapiens
gagtagttctcctgggtccgctctgcgggcttctgggagatgtagtttctggtctgtaggcaggacggaaggagcgggggaggccccttacgcaaactacaattcccggcggggagcgcggtgaagcgggggtgggatctgaacatggcggcggtggtagctgctacggcgctgaagggccggggggcgagaaatgcccgcgtcctccgggggattctcgcaggagccacagctaacaaggcttctcataacaggacccgggccctgcaaagccacagctccccagagggcaaggaggaacctgaacccctatccccggagctggaatacattcccagaaagaggggcaagaaccccatgaaagctgtgggactggcctgggccatcggcttcccttgtggtatcctcctcttcatcctcaccaagcgggaagtggacaaggaccgtgtgaagcagatgaaggctcggcagaacatgcggttgtccaacacgggcgagtatgagagccagaggttcagggcttcctcccagagtgccccgtcccctgatgttgggtctggggtgcagacctgaggagcgctgcgaccctcctaggctattgactgttaagtcctcaggtttggcccagattccagttcgtgcctctgaggtccaccagagggcgcatgaagcccaggctgttgccaaaccctaccctgccccacaccaaggagccagccaaaggcaaataaagttattgagtgtttagtagaaaggaa

SEQ ID NO: 291502 - DNA, 148 bp, Homo sapiens
gcggccgcctactactactactgctcgaattcaagcttctaacgatgtacggcgcatgaagcccaggctgttgccaaaccctaccctgccccacaccaaggagccagccaaaggcaaataaagttattgagtgtttagtagaaaggaa

SEQ ID NO: 291503 - DNA, 715 bp, Homo sapiens
gagtagttctcctgggtccgctctgcgggcttctgggagatgtagtttctggtctgtaggcaggacggaaggagcgggggaggccccttacgcaaactacaattcccggcggggagcgcggtgaagcgggggtgggatctgaacatggcggcggtggtagctgctacggcgctgaagggccggggggcgagaaatgcccgcgtcctccggggacccgggccctgcaaagccacagctccccagagggcaaggaggaacctgaacccctatccccggagctggaatacattcccagaaagaggggcaagaaccccatgaaagctgtgggactggcctgggccatcggcttcccttgtggtatcctcctcttcatcctcaccaagcgggaagtggacaaggaccgtgtgaagcagatgaaggctcggcagaacatgcggttgtccaacacgggcgagtatgagagccagaggttcagggcttcctcccagagtgccccgtcccctgatgttgggtctggggtgcagacctgaggagcgctgcgaccctcctaggctattgactgttaagtcctcaggtttggcccagattccagttcgtgcctctgaggtccaccagagggcgcatgaagcccaggctgttgccaaaccctaccctgccccacaccaaggagccagccaaaggcaaataaagttattgagtgtttagtagaaaggaa

SEQ ID NO: 291504 - DNA, 883 bp, Homo sapiens
gagtagttctcctgggtccgctctgcgggcttctgggagatgtagtttctggtctgtaggcaggacggaaggagcgggggaggccccttacgcaaactacaattcccggcggggagcgcggtgaagcgggggtgggatctgaacatggcggcggtggtagctgctacggcgctgaagggccggggggcgagaaatgcccgcgtcctccgggggattctcgcaggagccacagctaacaaggcttctcataacaggacccgggccctgcaaagccacagctccccagagggcaaggaggaacctgaacccctatccccggagctggaatacattcccagaaagaggggcaagaaccccatgaaagctgtgggactggcctgggccatcggcttcccttgtggtatcctcctcttcatcctcaccaagcgggaagtggacaaggaccgtgtgaagcagatgaaggctcggcagaacatgcggttgtccaacacgggcgagtatgagagccagaggttcagggcttcctcccagagtgccccgtcccctgatgttgggtctggggtgcagacctgaggagcgctgcgaccctcctaggctattgactgttaagtcctcaggtttggcccagattccagttcgtgcctctgaggtccaccagagggcgcatgaagcccaggctgttgccaaaccctaccctgccccacaccaaggagccagccaaaggcaaataaagttattgagtgtttagtagaaaggaaaacaaaaaacaaaaaaaaaaagggggggccgccgggggccccaaggagcccggagccgggggccaaaagccgggggggcagcggggccccccgggcgggaattggcacttgttttcccaccaagg

SEQ ID NO: 291505 - DNA, 485 bp, Homo sapiens
tcatctggactgccctagggccggggtcgcagctccacgaccggcctgtgggtcaggtggcgcatgcgcgagcacggccccgcggcaccatgacaacctcgtcgtcgctgggtgtctcgctatccccacagcctccccctcgtgccgaattcggcacgagtggacaaggaccgtgtgaagcagatgaaggctcggcagaacatgcggttgtccaacacgggcgagtatgagagccagaggttcagggcttcctcccagagtgccccgtcccctgatgttgggtctggggtgcagacctgaggagcgctgcgaccctcctaggctattgactgttaagtcctcaggtttggcccagattccagttcgtgcctctgaggtccaccagagggcgcatgaagcccaggctgttgccaaaccctaccctgccccacaccaaggagccagccaaaggcaaataaagttattgagtgtttagtagaaaggaa

SEQ ID NO: 291506 - DNA, 355 bp, Homo sapiens
aggtgatctacagcgatcttattccggttctgggtagccacagctccccagagggcaaggaggaacctgaacccctatccccggagctggaatacattcccagaaagaggggcaagaaccccatgaaagctgtgggactggcctgggccatcggcttcccttgtggtatcctcctcttcatcctcaccaagcgggaagtggacaaggaccgtgtgaagcagatgaaggctcggcagaacatgcggttgtccaacacgggcgagtatgagagccagctaacaaggcttctcataacaggacccgggccctgcaaagccacagctccccagagggcaaggaggaacctgaaccccta

SEQ ID NO: 291507 - DNA, 1536 bp, Homo sapiens
gagtagttctcctgggtccgctctgcgggcttctgggagatgtagtttctggtctgtaggcaggacggaaggagcgggggaggccccttacgcaaactacaattcccggcggggagcgcggtgaagcgggggtgggatctgaacatggcggcggtggtagctgctacggcgctgaagggccggggggcgagaaatgcccgcgtcctccggggtaaggagagggaccccggggagggcaggactgcagaagatcccttttctttcacgtccagcccgacgatagcaggaggtcagggctcttggttcctccccacacttttctgcaagatcttagagtctgggggtgcagagatgctctttagaggtcacccagtgcatccccccgccttcgggttgctcgacacctccggggtcttgctgcaagagggagctcctaggaagcctgttggactcccgcgctccaggtgtttcacactcaccgcagtgcagaggaaagagccccgggcttctggaggtttgagttccagccccggataattagcagtttgaccttgggcaaagcagtttttctctcagggcttcagtttcctcttccgtacagtgcaagggatggagtagactatctttaaggtcccttccagtgctaacatttgcagtttcaaaaccttttcccggatttccttcatacgtcttatgtgagtcccactgcagtccttcccatgctgtcgtctgaggaagaacagcgaagcttttcgtcctggcaccagggtgatgagcccgcagtgacgtggaagtggcttccaaaggtgccacctcggtggcgattttcccatttccctttggattctccttggcacttcttacttcagactgcagtcactccccttccccagatctcagccgctcctcccaagcccttactgccccccacctccccgcttgctttcttctcatctcttcttactgaccttccttacctccatccacagggattctcgcaggagccacagctaacaaggcttctcataacaggacccgggccctgcaaagccacagctccccagagggcaaggaggaacctgaacccctatccccggagctggaatacattcccagaaagaggggcaagaaccccatgaaagctgtgggactggcctgggccatcggcttcccttgtggtatcctcctcttcatcctcaccaagcgggaagtggacaaggaccgtgtgaagcagatgaaggctcggcagaacatgcggttgtccaacacgggcgagtatgagagccagaggttcagggcttcctcccagagtgccccgtcccctgatgttgggtctggggtgcagacctgaggagcgctgcgaccctcctaggctattgactgttaagtcctcaggtttggcccagattccagttcgtgcctctgaggtccaccagagggcgcatgaagcccaggctgttgccaaaccctaccctgccccacaccaaggagccagccaaaggcaaataaagttattgagtgtttagtagaaaggaa

SEQ ID NO: 291508 - DNA, 403 bp, Homo sapiens
actgatgaagctagaatgactccccccagctcctctggctcaggcttggcccctccccaaaccccgtgcacatctccccacccgtagggccatcggcttcccttgtggtatcctcctcttcatcctcaccaagcgggaagtggacaaggaccgtgtgaagcagatgaaggctcggcagaacatgcggttgtccaacacgggcgagtatgagagccagaggttcagggcttcctcccagagtgccccgtcccctgatgttgggtctggggtgcagacctgaggagcgctgcgaccctcctaggctattgactgttaagtcctcaggtttggcccagattccagttcgtgcctctgaggtccaccagagggcgcatgaagcccaggctgttgccaaaccctaccc

SEQ ID NO: 291509 - DNA, 595 bp, Homo sapiens
ccgcggacgcgtgggttttttttttcagagggggtctgtgtttattcacacactcctggtacagtgaggatggaggaacatttacgaagggcacccctgggttgagaacatctccggggccacagatgtcatccaaaggttcagagcagtccccatttgggttcccaggggcaagacgcaggggtccaaggtaaaatcggatctgggcccttggaaggtgatgataccttggggagaaggggtctgccagaaagcctcctggggtcaggcctgggcagactggccatgtggttggtaaccgtgtcgggggcttgtctcatcccagcctcaacacccatcctatctgccaggcgcagaagagcgtggccgagactgaggggagggcaggaaccatgagcagagccagtaaacaaagagtcggatataaaaatacaaatgtgctgaggaagtcccttagaaagaggctgaggctggggtcacgccagacaggggtgggggcgaggaacggcccggaggactgggctcaagtgggtggaaagctcatgcaagtacgcagccaaacatccctggccgcgcgcggtccgacaccggcggc

SEQ ID NO: 291510 - DNA, 1572 bp, Homo sapiens
caccaggctaagcgcccgatccgagtagccagtcttcatttactccactaaaatgtaatttttctgcatttgtctcctctgatgcactccacgctccataggagcagggacaatgtcttactcctcagtttatacccagccctgggtacacaggcgctaatttagaacgaatgtccagaaaagcaacattcctgcctacctcccccacaaccgctgaagccagcattctccttcgcctgcgctgggaacatctgtgttcatgctgtctctccaggagggcaaagcccctgttcgcgcccctcctgcctgcccttcgagccttccggatgctgagaaaaatgaacctttcactaattttcagatttcctgataaaagtcattcatattgaaaatatgagaggacgcagtgatgagcccacgtgagtctgacaccttgagtgcggccctaggaaatgacttggcagtacagccggaggattcagggtctggacgatagttttcccagccggaggattcttcgaagagcgcttagtaaaggacggaagttccacgtgtttgtgttgagcaactgcaggtggtgggcggagacaccagcgccccgccttctgcatcctgccttccgtattggctgaagggccggcggctctggctgcccggcggttgagagcatggcctctccaggggcaggtagggcgcctccggagttaccggagcggaactgcgggtaccgcgaagtcgagtactgggatcagcgctaccaaggcgcagccgattctgccccctacgattggttcggggacttctcctccttccgtgccctcctagagccggagctgcggcccgaggaccgtatccttgtgctaggtgggtaatcccggcgcggccccgccaggtagagctggcaggaccggcgccgcatgggcttggcctggtccgctttcctcccgcctgtctatccctcttggaggacgcctgcgttgggacgcgagatccagctccttcagagtcccggctgtatttagtcaaggctaacaggagtaagagattgttggtcccggggccctctggagaaagacagtccctcagagtttgagcgttgggggtacccaagaccctgtccggaccctcgggaggcaggcagccttggggaccggattgctcagaggaccgagatcaagtcctagcgctaattgacttgtaaaacttaggacaagtcatgaacccgttctgagctttagattcagttctagaaatggtactgcgagttcacatcggaggcggcacgcgcaggcacctcgagaataatgcccagcgcttttctttttgcccctgggcactgggagccagagtcacctagagagagtcctgtctgaaacttggtcctatgccttagagagtgagaacagcaccctctaggggtggaggggagattgccgcccagggtgatacgattccccaaagggagacgtgctggaggaaaggtagggctctggggtgttcggctgacctcttgaggttctctcctagtgtcagccttggaggcgctagtaaagtttgaatgagcaacagatt

SEQ ID NO: 291511 - DNA, 369 bp, Homo sapiens
ctagtatttaaacaacttgtcccagcccacacagctaggagtgatagagccagggtttgcacccaggcctgtgcgattccaaggcttgtgctttttctgcactctgccacctcctctcagtactagagggtttggattgagagaaaacggggccaagagtggatggatattcagggggaggtgagaaccaaaactaacgtagctcttttgctacccattccctcccaccctcctcaggtagttggaattcctgacttaggacttggggttgggtccaaggtgcttacatcccaggggcctcatgcctaagatagagggtgggagcgaacccacatgaaccaatacagcccagctccaactagatccaga

SEQ ID NO: 291512 - DNA, 2645 bp, Homo sapiens
caccaggctaagcgcccgatccgagtagccagtcttcatttactccactaaaatgtaatttttctgcatttgtctcctctgatgcactccacgctccataggagcagggacaatgtcttactcctcagtttatacccagccctgggtacacaggcgctaatttagaacgaatgtccagaaaagcaacattcctgcctacctcccccacaaccgctgaagccagcattctccttcgcctgcgctgggaacatctgtgttcatgctgtctctccaggagggcaaagcccctgttcgcgcccctcctgcctgcccttcgagccttccggatgctgagaaaaatgaacctttcactaattttcagatttcctgataaaagtcattcatattgaaaatatgagaggacgcagtgatgagcccacgtgagtctgacaccttgagtgcggccctaggaaatgacttggcagtacagccggaggattcagggtctggacgatagttttcccagccggaggattcttcgaagagcgcttagtaaaggacggaagttccacgtgtttgtgttgagcaactgcaggtggtgggcggagacaccagcgccccgccttctgcatcctgccttccgtattggctgaagggccggcggctctggctgcccggcggttgagagcatggcctctccaggggcaggtagggcgcctccggagttaccggagcggaactgcgggtaccgcgaagtcgagtactgggatcagcgctaccaaggcgcagccgattctgccccctacgattggttcggggacttctcctccttccgtgccctcctagagccggagctgcggcccgaggaccgtatccttgtgctaggttgcgggaacagtgccctgagctacgagctgttcctcggaggcttccctaatgtgaccagtgtggactactcatcagtcgtggtggctgccatgcaggctcgctatgcccatgtgccgcagctgcgctgggagaccatggatgtgcggaagctggacttccccagtgcttcttttgatgtggtgctcgagaagggcacgctggatgccctgctggctggggaacgagatccctggaccgtgtcctctgaaggtgtccacactgtggaccaggtgttgagtgaggtgagccgcgtgcttgtccctggaggccggtttatctcaatgacttctgctgccccccactttcggaccagacactatgcccaagcctattatggctggtccctgaggcatgctacctatggcagcggtttccacttccatctctacctcatgcacaagggcgggaagctcagtgtggcccagctggctctgggggcccaaatcctctcaccccccagacctcccacctcaccttgcttccttcaggactcagatcatgaggacttccttagtgccattcagctctgaggccagagcatggtcctccacccttcctgccattctgccctgggctcctcaggtagttggaattcctgacttaggacttggggttgggtccaaggtgcttacatcccaggggcctcatgcctaagatagagggtgggagcgaacccacatgaaccaatacagcccagctccaactagatccagattccaggtttcttgcttctttcttgggttcctcagttctctcctgggttccccaacctcctctgccaccacaccaaaccaccagtgatgcatcccctggggcaaagctcatcataacccctctgcacaccagccagcctggagaccgttgttcctggggcctgttactgatcctcatctagccttgatttatccacaggagactgcaggctttgaacctagattgctttatgtttctcaccctagctccatccccaacactggtgaccagtcacgcctgggttgtatctctacccaaggaggccacatcataatgaggttcccaggccagcctggcctgtctgtcttacttggcaaccgtccctcaccagcaacatgcacctgagattcccaagtacctgccccccctcccattttggcctggctcctgagacctaagcagcggccacacacacacagagggggtctgtgtttattcacacactcctggtacagtgaggatggaggaacatttacgaagggcacccctgggttgagaacatctccggggccacagatgtcatccaaaggttcagagcagtccccatttgggttcccaggggcaagacgcaggggtccaaggtaaaatcggatctgggcccttggaaggtgatgataccttggggagaaggggtctgccagaaagcctcctggggtcaggcctgggcagactggccatgtggttggtaaccgtgtcgggggcttgtctcatcccagcctcaacacccatcctatctgccaggcgcagaagagcgtggccgagactgaggggagggcaggaaccatgagcagagccagtaaacaaagagtcggatataaaaatacaaatgtgctgaggaagtcccttagaaagaggctgaggctggggtcacgccagacaggggtgggggcgaggaacggcccggaggactgggctcaagtgggtggaaagctcatgcaagtacgcagccaaacatccctggccgcgcgcggtccgacaccggcggc

SEQ ID NO: 291513 - DNA, 2716 bp, Homo sapiens
  misc_feature (710)..(710): n is a, c, g, or t
  misc_feature (780)..(780): n is a, c, g, or t
caccaggctaagcgcccgatccgagtagccagtcttcatttactccactaaaatgtaatttttctgcatttgtctcctctgatgcactccacgctccataggagcagggacaatgtcttactcctcagtttatacccagccctgggtacacaggcgctaatttagaacgaatgtccagaaaagcaacattcctgcctacctcccccacaaccgctgaagccagcattctccttcgcctgcgctgggaacatctgtgttcatgctgtctctccaggagggcaaagcccctgttcgcgcccctcctgcctgcccttcgagccttccggatgctgagaaaaatgaacctttcactaattttcagatttcctgataaaagtcattcatattgaaaatatgagaggacgcagtgatgagcccacgtgagtctgacaccttgagtgcggccctaggaaatgacttggcagtacagccggaggattcagggtctggacgatagttttcccagccggaggattcttcgaagagcgcttagtaaaggacggaagttccacgtgtttgtgttgagcaactgcaggtggtgggcggagacaccagcgccccgccttctgcatcctgccttccgtattggctgaagggccggcggctctggctgcccggcggttgagagcatggcctctccaggggcaggtagggcggcctttcccggtggnaaagggctttttttaaacccccggggggggcaaaaggccccgggggggaacatcctgggccggggggggntttaaccccgggccgtaaagtcgaggtaccttggggaatcaagcgctaccaaggcgcagccgattctgccccctacgattggttcggggacttctcctccttccgtgccctcctagagccggagctgcggcccgaggaccgtatccttgtgctaggttgcgggaacagtgccctgagctacgagctgttcctcggaggcttccctaatgtgaccagtgtggactactcatcagtcgtggtggctgccatgcaggctcgctatgcccatgtgccgcagctgcgctgggagaccatggatgtgcggaagctggacttccccagtgcttcttttgatgtggtgctcgagaagggcacgctggatgccctgctggctggggaacgagatccctggaccgtgtcctctgaaggtgtccacactgtggaccaggtgttgagtgaggtgagccgcgtgcttgtccctggaggccggtttatctcaatgacttctgctgccccccactttcggaccagacactatgcccaagcctattatggctggtccctgaggcatgctacctatggcagcggtttccacttccatctctacctcatgcacaagggcgggaagctcagtgtggcccagctggctctgggggcccaaatcctctcaccccccagacctcccacctcaccttgcttccttcaggactcagatcatgaggacttccttagtgccattcagctctgaggccagagcatggtcctccacccttcctgccattctgccctgggctcctcaggtagttggaattcctgacttaggacttggggttgggtccaaggtgcttacatcccaggggcctcatgcctaagatagagggtgggagcgaacccacatgaaccaatacagcccagctccaactagatccagattccaggtttcttgcttctttcttgggttcctcagttctctcctgggttccccaacctcctctgccaccacaccaaaccaccagtgatgcatcccctggggcaaagctcatcataacccctctgcacaccagccagcctggagaccgttgttcctggggcctgttactgatcctcatctagccttgatttatccacaggagactgcaggctttgaacctagattgctttatgtttctcaccctagctccatccccaacactggtgaccagtcacgcctgggttgtatctctacccaaggaggccacatcataatgaggttcccaggccagcctggcctgtctgtcttacttggcaaccgtccctcaccagcaacatgcacctgagattcccaagtacctgccccccctcccattttggcctggctcctgagacctaagcagcggccacacacacacagagggggtctgtgtttattcacacactcctggtacagtgaggatggaggaacatttacgaagggcacccctgggttgagaacatctccggggccacagatgtcatccaaaggttcagagcagtccccatttgggttcccaggggcaagacgcaggggtccaaggtaaaatcggatctgggcccttggaaggtgatgataccttggggagaaggggtctgccagaaagcctcctggggtcaggcctgggcagactggccatgtggttggtaaccgtgtcgggggcttgtctcatcccagcctcaacacccatcctatctgccaggcgcagaagagcgtggccgagactgaggggagggcaggaaccatgagcagagccagtaaacaaagagtcggatataaaaatacaaatgtgctgaggaagtcccttagaaagaggctgaggctggggtcacgccagacaggggtgggggcgaggaacggcccggaggactgggctcaagtgggtggaaagctcatgcaagtacgcagccaaacatccctggccgcgcgcggtccgacaccggcggc

SEQ ID NO: 291514 - DNA, 1620 bp, Homo sapiens
caccaggctaagcgcccgatccgagtagccagtcttcatttactccactaaaatgtaatttttctgcatttgtctcctctgatgcactccacgctccataggagcagggacaatgtcttactcctcagtttatacccagccctgggtacacaggcgctaatttagaacgaatgtccagaaaagcaacattcctgcctacctcccccacaaccgctgaagccagcattctccttcgcctgcgctgggaacatctgtgttcatgctgtctctccaggagggcaaagcccctgttcgcgcccctcctgcctgcccttcgagccttccggatgctgagaaaaatgaacctttcactaattttcagatttcctgataaaagtcattcatattgaaaatatgagaggacgcagtgatgagcccacgtgagtctgacaccttgagtgcggccctaggaaatgacttggcagtacagccggaggattcagggtctggacgatagttttcccagccggaggattcttcgaagagcgcttagtaaaggacggaagttccacgtgtttgtgttgagcaactgcaggtggtgggcggagacaccagcgccccgccttctgcatcctgccttccgtattggctgaagggccggcggctctggctgcccggcggttgagagcatggcctctccaggggcaggtagggcgcctccggagttaccggagcggaactgcgggtaccgcgaagtcgagtactgggatcagcgctaccaaggcgcagccgattctgccccctacgattggttcggggacttctcctccttccgtgccctcctagagccggagctgcggcccgaggaccgtatccttgtgctaggttgcgggaacagtgccctgagctacgagctgttcctcggaggcttccctaatgtgaccagtgtggactactcatcagtcgtggtggctgccatgcaggctcgctatgcccatgtgccgcagctgcgctgggagaccatggatgtgcggaagctggacttccccagtgcttcttttgatgtggtgctcgagaagggcacgctggatgccctgctggctggggaacgagatccctggaccgtgtcctctgaaggtgtccacactgtggaccaggtgttgagtgaggtgagccgcgtgcttgtccctggaggccggtttatctcaatgacttctgctgccccccactttcggaccagacactatgcccaagcctattatggctggtccctgaggcatgctacctatggcagcggtttccacttccatctctacctcatgcacaagggcgggaagctcagtgtggcccagctggctctgggggcccaaatcctctcaccccccagacctcccacctcaccttgcttccttcaggactcagatcatgaggacttccttagtgccattcagctctgaggccagagcatggtcctccacccttcctgccattctgccctgggctcctcaggtagttggaattcctgacttaggacttggggttgggtccaaggtgcttacatcccaggggcctcatgcctaagatagagggtgggagcgaacccacatgaaccaatacagcccagctccaactagatccaga

SEQ ID NO: 291515 - DNA, 2655 bp, Homo sapiens
caccaggctaagcgcccgatccgagtagccagtcttcatttactccactaaaatgtaatttttctgcatttgtctcctctgatgcactccacgctccataggagcagggacaatgtcttactcctcagtttatacccagccctgggtacacaggcgctaatttagaacgaatgtccagaaaagcaacattcctgcctacctcccccacaaccgctgaagccagcattctccttcgcctgcgctgggaacatctgtgttcatgctgtctctccaggagggcaaagcccctgttcgcgcccctcctgcctgcccttcgagccttccggatgctgagaaaaatgaacctttcactaattttcagatttcctgataaaagtcattcatattgaaaatatgagaggacgcagtgatgagcccacgtgagtctgacaccttgagtgcggccctaggaaatgacttggcagtacagccggaggattcagggtctggacgatagttttcccagccggaggattcttcgaagagcgcttagtaaaggacggaagttccacgtgtttgtgttgagcaactgcaggtggtgggcggagacaccagcgccccgccttctgcatcctgccttccgtattggctgaagggccggcggctctggctgcccggcggttgagagcatggcctctccaggggcaggtagggcgcctccggagttaccggagcggaactgcgggtaccgcgaagtcgagtactgggatcagcgctaccaaggcgcagccgattctgccccctacgattggttcggggacttctcctccttccgtgccctcctagagccggagctgcggcccgaggaccgtatccttgtgctaggttgcgggaacagtgccctgagctacgagctgttcctcggaggcttccctaatgtgaccagtgtggactactcatcagtcgtggtggctgccatgcaggctcgctatgcccatgtgccgcagctgcgctgggagaccatggatgtgcggaagctggacttccccagtgcttcttttgatgtggtgctcgagaagggcacgctggatgccctgctggctggggaacgagatccctggaccgtgtcctctgaaggtgtccacactgtggaccaggtgttgagtgaggtgagccgcgtgcttgtccctggaggccggtttatctcaatgacttctgctgccccccactttcggaccagacactatgcccaagcctattatggctggtccctgaggcatgctacctatggcagcggtttccacttccatctctacctcatgcacaagggcgggaagctcagtgtggcccagctggctctgggggcccaaatcctctcaccccccagacctcccacctcaccttgcttccttcaggactcagatcatgaggacttccttagtgccattcagctctgaggccagagcatggtcctccacccttcctgccattctgccctgggctcctcaggtagttggaattcctgacttaggacttggggttgggtccaaggtgcttacatcccaggggcctcatgcctaagatagagggtgggagcgaacccacatgaaccaatacagcccagctccaactagatccagattccaggtttcttgcttctttcttgggttcctcagttctctcctgggttccccaacctcctctgccaccacaccaaaccaccagtgatgcatcccctggggcaaagctcatcataacccctctgcacaccagccagcctggagaccgttgttcctggggcctgttactgatcctcatctagccttgatttatccacaggagactgcaggctttgaacctagattgctttatgtttctcaccctagctccatccccaacactggtgaccagtcacgcctgggttgtatctctacccaaggaggccacatcataatgaggttcccaggccagcctggcctgtctgtcttacttggcaaccgtccctcaccagcaacatgcacctgagattcccaagtacctgccccccctcccattttggcctggctcctgagacctaagcagcggccacacacacacagagggggtctgtgtttattcacacactcctggtacagtgaggatggaggaacatttacgaagggcacccctgggttgagaacatctccggggccacagatgtcatccaaaggttcagagcagtccccatttgggttcccaggggcaagacgcaggggtccaaggtaaaatcggatctgggcccttggaaggtgatgataccttggggagaaggggtctgccagaaagcctcctggggtcaggcctgggcagactggccatgtggttggtaaccgtgtcgggggcttgtctcatcccagcctcaacacccatcctatctgccaggcgcacccctcccctccccaatcctaccagatggctagttttccacaatgcagaggcagatgtgctatcagagtccgaacctctccataaagaagagataagaaattcggataaatagtctgatgttaatgtcacgccgtacatgaatgttggttacaacctgcccggaagtttcggctccagttggtgaatagctcaatctatgttcacaaccaaacaacacagaccgcgaacggtcaaacgccggcggccgca

SEQ ID NO: 291516 - DNA, 1357 bp, Homo sapiens
caccaggctaagcgcccgatccgagtagccagtcttcatttactccactaaaatgtaatttttctgcatttgtctcctctgatgcactccacgctccataggagcagggacaatgtcttactcctcagtttatacccagccctgggtacacaggcgctaatttagaacgaatgtccagaaaagcaacattcctgcctacctcccccacaaccgctgaagccagcattctccttcgcctgcgctgggaacatctgtgttcatgctgtctctccaggagggcaaagcccctgttcgcgcccctcctgcctgcccttcgagccttccggatgctgagaaaaatgaacctttcactaattttcagatttcctgataaaagtcattcatattgaaaatatgagaggacgcagtgatgagcccacgtgagtctgacaccttgagtgcggccctaggaaatgacttggcagtacagccggaggattcagggtctggacgatagttttcccagccggaggattcttcgaagagcgcttagtaaaggacggaagttccacgtgtttgtgttgagcaactgcaggtggtgggcggagacaccagcgccccgccttctgcatcctgccttccgtattggctgaagggccggcggctctggctgcccggcggttgagagcatggcctctccaggggcaggtagggcgcctccggagttaccggagcggaactgcgggtaccgcgaagtcgagtactgggatcagcgctaccaaggcgcagccgattctgccccctacgattggttcggggacttctcctccttccgtgccctcctagagccggagctgcggcccgaggaccgtatccttgtgctaggtgggtaatcccggcgcggccccgccaggtagagctggcaggaccggcgccgcatgggcttggcctggtccgctttcctcccgcctgtctatccctcttggaggacgcctgcgttgggacgcgagatccagctccttcagagtcccggctgtatttagtcaaggctaacaggagtaagagattgttggtcccggggccctctggagaaagacagtccctcagagtttgagcgttgggggtacccaagaccctgggcactgggagccagagtcacctagagagagtcctgtctgaaacttggtcctatgccttagagagtgagaacagcaccctctaggggtggaggggagattgccgcccagggtgatacgattccccaaagggagacgtgctggaggaaaggtagggctctggggtgttcggctgacctcttgaggttctctcctagtgtcagccttggaggcgctagtaaagtttgaatgagcaacagatt

SEQ ID NO: 291517 - DNA, 497 bp, Homo sapiens
gatccctggaccgtgtcctctgaaggtgtccacactgtggaccaggtgttgagtgaggtgagggagcaacaagagaggaaagcagatcaataggtggggctgcggggttgaggtttcaggggactggaagaaatcagaagccagaagcatgttttggagcaagtagtgggtcgccctcaggagtgtggctctctgaagggagggaagggttaagcggggtcgagatttatagaggcggctggagtagtcaggctcacaaaggctgacatgtggttactgggttgccatagggatgaggtagcagccaggttcctgacaggtgacagagactgccaaggtgagcagttataggaaagtggtgcccctatacctgatatcactcctatacccttccctgaatagaatatagccctaatcccaaggaatggccaggggcagagaaagtggctcactctttgccatggaaagcctgagctacagatgtggggtggttcctg

SEQ ID NO: 291518 - DNA, 289 bp, Homo sapiens
aaaacaagaaagaactcttgaacccagctatgcatacaagaaaaataaattgtttgaagtgagacatgaggtaatcgagactcctcaatggggaaagtcagtgctcatctggcccctagtgtgcctgttgagctgaaatattttattgatgtgagtgcttaacaaatcaccaaatgctcagtgaatacctattatgtgtcatgagctctatgaggtagctttttttcatacagtcgtattttggcaaataaataaataatacgaggcataattgacagtgaaaatacca

SEQ ID NO: 291519 - DNA, 357 bp, Homo sapiens
ggttctatttgatgtctttactgtattataggacttacaaaaagaaaagaaaaagaatatatccaattaaaacaagaaagaactcttgaacccagctatgcatacaagaaaaataaattgtttgaagtgagacatgaggtaatcgagactcctcaatggggaaagtcagtgctcatctggcccctagtgtgcctgttgagctgaaatattttattgatgtgagtgcttaacaaatcaccaaatgctcagtgaatacctattatgtgtcatgagctctatgaggtagctttttttcatacagtcgtattttggcaaataaataaataatacgaggcataattgacagtgaaaatacca

SEQ ID NO: 291520 - DNA, 931 bp, Homo sapiens
aggttggcaaagaagagaaaagctccttgggaacttagttaccaggtcttatagcaccagctctgtgtcctcagagtcgctgtcatcaaggagacctctcactggtcaccgccgcagcccccacatggaccagtatgtgtccacagctcctccccgattccctatagcacagctgggaacatttaaacaagactctgcaggaatgggacggatattcaaggggaatttgctgcagaagaaagcacttaccacatttgaaaatgaacaccatattcgtttcttcacattgttggttcttttccatgtgatggtgttgctgaggaatcatagcaggatacaaggggtttctgaagactggaaaagggccaacagcatatttcgaaagtaaaaaactccttctttctcccactgtaggctttttgtgttttcaacatacccagcctcactcggaaaaataaaaataaaaataaagcacccactcacatgagcagccaagtttcagataccagtgggcacaagctcttccaaatgtctcctgttctggagatgttcacagtcctcacatcaaaactgaaacaagcaaacaaaaaaataaaaagcttactaccaaataccctaggaataagacttaaactctatttggaaattgaatttcttccatagtcaatcaatatttaataaagagagaaaaggagctcattacaaagaccatcttgtttctccacaagtcatctatgtgagattccagaatttcagggcgataagttcttaattgggaacattatatattctctttgcagccagtaagtacgcatcacttcacgagaaagcactgcggccaacatttctcctggtctgctctgggtttcagtgaagggcaggcctggaagcaccttgggaaatgaggtagagccaagctaaccctggagag

SEQ ID NO: 291521 - DNA, 5252 bp, Homo sapiens
gggccgagagaccgcatcgtcggctcggaggctgaggggctgccgcggccgggagcgcccctcgcctcgctcctcgctccgcttggtgtcatgtgattctctgagggagcagctgcgtgagtggagatgctttcagtggtggagaatggactggacccccaggctgccatcccggtcatcaagaagaagctggtgggatccgtgaaggccttgcagaagcagtacgtgtccctggacacggtggtcactagtgaagacggagatgccaacaccatgtgcagcgccctggaggccgtatttatccatggcctgcacgccaagcacatccgagctgaggccggaggaaaaaggaagaaaagtgcccaccagaagcctctgccccagcctgtcttctggcccctcctgaaagctgtcacccacaaacacatcatctcagagttggagcacctgacgtttgtcaacacggatgtgggccgctgccgggcatggctgcggctggccctgaacgatggcctgatggagtgctacctgaagctgctgctgcaggagcaggcccgcttgcatgagtactaccagcccaccgccctgctccgggatgctgaggagggcgagttcctccttagcttcctgcagggcctcacgtccttgtccttcgaactctcctacaagtctgccatcttaaatgagtggacgctcaccccattggccctgtctgggctttgcccgctttctgagctggaccctctctctacctctggtgcagaactacagcggaaggaatctctggattccatttcccattcttcaggctctgaagacatcgaagtccatcactcgggccataagatacggaggaaccagaagctgactgcctcctccctcagcctggacacggccagttcatcccagctgtcctgcagcctaaactctgatagctgcttactccaagagaatggctccaagagtccagaccattgcgaggagcccatgtcctgtgactcagacctgggcacagcaaatgctgaggactcagaccggtctctgcaagaggtattgttggaattcagcaaagcccaggtaaactctgtgccaaccaacggactgagccaagaaacagagatccccacaccacaggcctcgctctccctccatggcctcaacaccagcacatacctgcactgtgaggcacctgcagagccccttcctgcccaggcagcctctggaactcaagatggtgtccacgtgcaggagccgcgtccccaggcgcccagccccctggacttacagcagcctgtagagagcacctcaggccagcagccttctagtactgtcagcgagacagccagagaagtgggccaagggaatggcctgcagaaggcccaggctcatgacggagctggtctgaagctggtagtttcctcacccaccagtccgaaaaacaagagctggatctcagaggatgacttctaccggccttcccgggagcaacccctggagagtgcttcagaccacccaatagcttcttacagggggactccagggtcaaggcctggtctccacaggcatttttctcaagaaccaagaaaaaactgctccctgggggcgttagaccaagcgtgtgtaccttccccaggaagaaggcaagcccaggcagccccatcccaggggcataagagcttccgggtggtacaccggagacagatgggactgtccaacccattccggggtctcatgaagctgggcaccgtggagcggcggggggcaatgggcatctggaaggagctcttctgcgagctctccccgctggagttccgcctctacctgagcaacgaggagcacacctgtgtggagaactgctcgctgcttcgctgtgagtctgtggggccagcccatagtgatgggcgctttgagctggtcttctctggcaagaagctggccctgcgcgcctcctcccaggacgaagctgaggactggctggaccgggtgcgggaggccctgcagaaggtccggcctcagcaggaggatgagtgggtgaacgtgcagtacccagaccagcctgaggaaccccccgaggcgccccagggctgcctctctccctcagacctgctctcggagcccgcggccctccagggcacacagtttgactggtcgtccgcccaggttccagagccagatgccatcaaggagtccctgctgtacttgtacatggacaggacctggatgccctatatattttctctgtccttggaggctctgaaatgtttccgcatcaggaacaatgagaagatgctgagtgacagccacggcgtggagaccatccgggacatcctgccagacaccagccttgggggcccatccttcttcaaaatcatcacggccaaggctgtcctgaagctgcaggccggaaacgccgaggaagccgccctgtggagggatctggtccgcaaagtcctggcatcctacttggagacagccgaggaggcggtgaccctgggcgggagcctggatgaaaactgtcaggaggtgctgaaatttgccacccgggagaatggcttcctgctgcagtacctggtggctatccccatggagaaaggccttgactcccaaggctgcttctgcgcaggctgctcccggcagatcggcttctcctttgtacgacccaagctctgtgccttctctggcctctattactgtgacatctgccaccaagacgatgcctcagtgattccggccaggatcatccacaactgggacctcaccaagcgcccgatctgcaggcaggccctgaagtttctgacacagatccgggcccagcccctcatcaacctgcagatggtgaacgcgtctctgtacgagcatgtggagcggatgcacctcattgggaggagacgggagcagctgaagctcctgggggattacctgggcctgtgccggagtggcgccctgaaggagctcagcaagaggctcaaccacaggaattatctcttggaatctccgcataggttcagtgttgctgacctccaacagatcgcagacggggtgtatgaaggattcctcaaggccctgattgaatttgcctcccagcatgtctaccactgcgacctgtgcacccagcgcggcttcatctgccagatctgccagcaccacgacatcatcttcccctttgagtttgacaccacagtcaggtgtgccgagtgcaagaccgtcttccaccagagctgccaggctgtggtgaagaagggctgcccccgctgtgcccgccggcgcaagtaccaggaacagaacattttcgcctgatgcccatctgctgaccccgctctgaaagccgggggtgagtgtggctcagccatcccggctgggtttgccatcagcccaggatactcaccgtgtcacagctgtgtccccttgtcaggaagaccctcagatgtggccagagcaccggcctcccagagaaagcccaggaagtccccgtggtgtcccctggccctccccccacccctctgctgcaggaggcgtggccaccaccagatgctccctgtctggggcaggcagggccgtttactcaccaggccctggctcaccagcgtcccggcgcctccgttagggctgcccaaacactgtggaaaggggacttggggagcattttcaattccacattcctgattaaaaggtctagttttttaaggtgggtttttcccattcatatttcaacagaaagtatttttttattcttgaccctacgtgagtcacccatgaaatccagacattctcacccccagcggatgcacaggagccactcaggcctggcttagaggtagcgggtggctggtgggcaggccactgctgggacagggtctatgggcccacccagtgcctttccttggccctcactgccagtgccaaaccgcccctcagcagggcagggccagtcctggcgaccccggttcctctgtgtcctctttactccccaccccagtgcgtctcgcctgctgagcccaccgctttctcagcgtcagagcccctagctcttctctagcctggggccttggccccattaggagaaggagaaatgactggaaaccagcactgtcagcactttgagccctcctcggtttatggagggtcgccgtcttgcccacccccgatccccgtgcgctcctcacccctctacagacaggggcgctgctgcagatgctccaggcccaccttggtgggtgcccggggtcacactctctgcctgactgacccctgccagggcacagataggcaggaccccagagagggcaggcagccacgccctgcactgtggagaagtgacctggtcctaagctgtgcagggcgtgcgggggaactgccctgtggatgcagccaccacctcacaaagccatgaattcccaaagcatcactgaacttgcccagccgggacactggagactgaagaagttccccggagcaggactgcctttgaaggggccttggggctggggtgggagtctggaattgttttcaaagtgatggtcagaccctccaggcttcggggaaatgtgggtttgctggtctctctgtcgccttcccccacctctcctggacctagcaggccctcagtcctagctgtcttacctgcgctcagcttggagtcaggcctcaggtggagagccgcatgtcactgtcagagatgagcccacccccacccttccctgggggcgattagctgctgagtcacccacccagccttggagctggatgcctgtgcagcagaacagaggcaacggtggcaggcaggtggaggctgcgcacagcttctcccggtcatggcacacacctgtgcccagacgccaatgcctcctaagccaggagctgggttatgcaccgccatggcccacattaacgctccaccacaagcccagcctagtcagagccctcattgccccatccctgagtgggcaggagcctggcctggggagggcttgggcctgtgaggattctccccgaaggtgccctcggaggcagcaggtttgaggccctggggggcccgttccccagaagctgccagtgctttcagatgcattgactcttcccgcctcccctccctcagaaaggtagtgcccacactatttttaaaatgttattttatgcaatacactgttcctagtgagcagggctctggccctgaggagtctttgcaatgtattgaaggaattgctgccgtgtgagttttgaatgattttgcagtaaagacctgatctttctca

SEQ ID NO: 291522 - DNA, 2385 bp, Homo sapiens
caaaaattagccgggcatggtggcaagcatctgtaaccccagctactcgggaggccgaggcagcagaattgcttgaacctgggaggcgggggttgcagtgagctgagattgcaccattgcactccagcctgggtgacagagtgaggttctgtctcaaaaacaaaacaaaactggtatttattctctgatcgttctggaggctccttctggagaatctaaggaagaatctgttcccgcctttctcctgggtggcgttgcaggtgctcgtttgcattccttggcttgtagacatgtcactcctgtctcccctctgctgtcacacatgttctactgtcatacaagttcttcctctgtatctctgtcttcacttggtgttctcctctctttgtgtatcttttctcctcctcttataaggacatcagtcatactggatgaacagcccattctactccaacatgacctcatcttaactaattacttctgcaaagactctatttccaaaaaaggtcacattctgaggtactggggggtagggtttcaacatgtccttttgtgggggggtcacaattcaacccacaacacaactcagcaacaaaaagacagccccattttaagacagacaatggatttcagtagattccaatggatttggatagatttcccaaggagagaaattggaaccctcgtacattgctggtgggaatataaaatggtgcggccactttggaaaacagcttggtagttcctcaagaagggaaacatagagttacacatgacccagcaagtctactcctaagtatatacccaagacaatgaaacatgtctacacaaaaacttgtgtataagtgatcatagcagcactattcataattgacaaaaagtagaaacaacccaaatgtccatcagccgaggagtggataagccaaatgtggtggatcgagacaatggaatattatttggcaataaaaaggaatgaacacttaaacatgcttatataacatggatgcacctggaaaacctcccactaagagaaagaagcaggcacaaaaggactgtccaacccattccggggtctcatgaagctgggcaccgtggagcggcggggggcaatgggcatctggaaggagctcttctgcgagctctccccgctggagttccgcctctacctgagcaacgaggagcacacctgtgtggagaactgctcgctgcttcgctgtgagtctgtggggccagcccatagtgatgggcgctttgagctggtcttctctggcaagaagctggccctgcgcgcctcctcccaggacgaagctgaggactggctggaccgggtgcgggaggccctgcagaaggtccggcctcagcaggaggatgagtgggtgaacgtgcagtacccagaccagcctgaggaaccccccgaggcgccccagggctgcctctctccctcagacctgctctcggagcccgcggccctccagggcacacagtttgactggtcgtccgcccaggttccagagccagatgccatcaaggagtccctgctgtacttgtacatggacaggacctggatgccctatatattttctctgtccttggaggctctgaaatgtttccgcatcaggaacaatgagaagatgctgagtgacagccacggcgtggagaccatccgggacatcctgccagacaccagccttgggggcccatccttcttcaaaatcatcacggccaaggctgtcctgaagctgcaggccggaaacgccgaggaagccgccctgtggagggatctggtccgcaaagtcctggcatcctacttggagacagccgaggaggcggtgaccctgggcgggagcctggatgaaaactgtcaggaggtgctgaaatttgccacccgggagaatggcttcctgctgcagtacctggtggctatccccatggagaaaggccttgactcccaaggctgcttctgcgcaggtgccgatttgctctgctgccacccccagcctgccagcctcactccacctcctgctggttcctgatttaggctccccacccttctgcctccccgcaaatgcccccatccttcccctagggatgaggccacagatcaggcttgccctacagcttctgctcctccccagccccggctggggccagtgccctgctcataggcagtgggccctgctcacccgtccctctcctgccacctcccactgatgggcggcaggctggctactcactgcgctgctcagggagtcccagcctgcttcattttcttcttgctctaccgtcctgttctttcagagcaggggcatggtttccttccaaatatttctgctgcttttataagtgtacacccttttttttaattataaaaatgggctcgtgcta

SEQ ID NO: 291523 - DNA, 1834 bp, Homo sapiens
agtgcatggagacgagaggtgtttctaaagatgggagaaatgacagcgtgcatgtgtgccgatgggagtcaccccatagagaaggaagaaagcagtgacagaggagaggactgctccttgtccttgagtagttggccaagggagagacctcctgcacaaatggagggtttggcctcacgcagaaagaagcacacttggttcatccctggcagcaggagggaaggcgtgggtgtagggaacagggcgtgtggaggggatcttttgggtgctcttattttctcagtgaaatacaggacgcaagagcagcagtggacggtgagaatggggatgttcccatccagctttcagggtcccatgtgatagtgccccgtggctggcctgtgttctggggacagtcactggccacatgcactgcagggcatcaggcagcagaggctgccttgggcaggacagagacaggcccgccaactaatgtgcccctttttgcctctgcctccaggactgtccaacccattccggggtctcatgaagctgggcaccgtggagcggcggggggcaatgggcatctggaaggagctcttctgcgagctctccccgctggagttccgcctctacctgagcaacgaggagcacacctgtgtggagaactgctcgctgcttcgctgtgagtctgtggggccagcccatagtgatgggcgctttgagctggtcttctctggcaagaagctggccctgcgcgcctcctcccaggacgaagctgaggactggctggaccgggtgcgggaggccctgcagaaggtccggcctcagcaggaggatgagtgggtgaacgtgcagtacccagaccagcctgaggaaccccccgaggcgccccagggctgcctctctccctcagacctgctctcggagcccgcggccctccagggcacacagtttgactggtcgtccgcccaggttccagagccagatgccatcaaggagtccctgctgtacttgtacatggacaggacctggatgccctatatattttctctgtccttggaggctctgaaatgtttccgcatcaggaacaatgagaagatgctgagtgacagccacggcgtggagaccatccgggacatcctgccagacaccagccttgggggcccatccttcttcaaaatcatcacggccaaggctgtcctgaagctgcaggccggaaacgccgaggaagccgccctgtggagggatctggtccgcaaagtcctggcatcctacttggagacagccgaggaggcggtgaccctgggcgggagcctggatgaaaactgtcaggaggtgctgaaatttgccacccgggagaatggcttcctgctgcagtacctggtggctatccccatggagaaaggccttgactcccaaggctgcttctgcgcaggtgccgatttgctctgctgccacccccagcctgccagcctcactccacctcctgctggttcctgatttaggctccccacccttctgcctccccgcaaatgcccccatccttcccctagggatgaggccacagatcaggcttgccctacagcttctgctcctccccagccccggctggggccagtgccctgctcataggcagtgggccctgctcacccgtccctctcctgccacctcccactgatgggcggcaggctggctactcactgcgctgctcagggagtcccagcctgcttcattttcttcttgctctaccgtcctgttctttcagagcaggggcatggtttccttccaaatatttctgctgcttttataagtgtacacccttttttttaattataaaaatgggctcgtgcta

SEQ ID NO: 291524 - DNA, 541 bp, Homo sapiens
  misc_feature (13)..(13): n is a, c, g, or t
  misc_feature (16)..(16): n is a, c, g, or t
  misc_feature (18)..(18): n is a, c, g, or t
  misc_feature (24)..(24): n is a, c, g, or t
caatcactcgttnatngnaacccnccagactactaaatgccaccttcagcccaaaagaagccttgtcagtctctaatcttcctttccatgcagattgccactgccttgtctcacgttcttctttcctgggtgacactggctttctatttgtcccccttatctcactctgtctttccttgagtccatcatctggtcaacatttactgagctgaagctccctggagcttactcactgagcctagtagagtgcggtctacattcccatggaggagataaacctgcgctagggactgtggtagctcagaggggcatgtacatcagacggaggcattctgggactgagtttggtacacctggggtctgatctccttatgcagaacatctaccctgcagtctgcatgactgtggtcaagtcacttttctaaacaaaaatctgtagcctacaggctcccagatgctagcctggagactgattcactaggttggggtcccagaacttgtatcctgctcaagttccccagggggttctggtgcacagctg

SEQ ID NO: 291525 - DNA, 5075 bp, Homo sapiens
cagtttacagcgtcagggcagtttacagcgtcagggtagtttacagcgtcagggctggacacggtggtcactagtgaagacggagatgccaacaccatgtgcagcgccctggaggccgtatttatccatggcctgcacgccaagcacatccgagctgaggccggaggaaaaaggaagaaaagtgcccaccagaagcctctgccccagcctgtcttctggcccctcctgaaagctgtcacccacaaacacatcatctcagagttggagcacctgacgtttgtcaacacggatgtgggccgctgccgggcatggctgcggctggccctgaacgatggcctgatggagtgctacctgaagctgctgctgcaggagcaggcccgcttgcatgagtactaccagcccaccgccctgctccgggatgctgaggagggcgagttcctccttagcttcctgcagggcctcacgtccttgtccttcgaactctcctacaagtctgccatcttaaatgagtggacgctcaccccattggccctgtctgggctttgcccgctttctgagctggaccctctctctacctctggtgcagaactacagcggaaggaatctctggattccatttcccattcttcaggctctgaagacatcgaagtccatcactcgggccataagatacggaggaaccagaagctgactgcctcctccctcagcctggacacggccagttcatcccagctgtcctgcagcctaaactctgatagctgcttactccaagagaatggctccaagagtccagaccattgcgaggagcccatgtcctgtgactcagacctgggcacagcaaatgctgaggactcagaccggtctctgcaagaggtattgttggaattcagcaaagcccaggtaaactctgtgccaaccaacggactgagccaagaaacagagatccccacaccacaggcctcgctctccctccatggcctcaacaccagcacatacctgcactgtgaggcacctgcagagccccttcctgcccaggcagcctctggaactcaagatggtgtccacgtgcaggagccgcgtccccaggcgcccagccccctggacttacagcagcctgtagagagcacctcaggccagcagccttctagtactgtcagcgagacagccagagaagtgggccaagggaatggcctgcagaaggcccaggctcatgacggagctggtctgaagctggtagtttcctcacccaccagtccgaaaaacaagagctggatctcagaggatgacttctaccggccttcccgggagcaacccctggagagtgcttcagaccacccaatagcttcttacagggggactccagggtcaaggcctggtctccacaggcatttttctcaagaaccaagaaaaaactgctccctgggggcgttagaccaagcgtgtgtaccttccccaggaagaaggcaagcccaggcagccccatcccaggggcataagagcttccgggtggtacaccggagacagatgggactgtccaacccattccggggtctcatgaagctgggcaccgtggagcggcggggggcaatgggcatctggaaggagctcttctgcgagctctccccgctggagttccgcctctacctgagcaacgaggagcacacctgtgtggagaactgctcgctgcttcgctgtgagtctgtggggccagcccatagtgatgggcgctttgagctggtcttctctggcaagaagctggccctgcgcgcctcctcccaggacgaagctgaggactggctggaccgggtgcgggaggccctgcagaaggtccggcctcagcaggaggatgagtgggtgaacgtgcagtacccagaccagcctgaggaaccccccgaggcgccccagggctgcctctctccctcagacctgctctcggagcccgcggccctccagggcacacagtttgactggtcgtccgcccaggttccagagccagatgccatcaaggagtccctgctgtacttgtacatggacaggacctggatgccctatatattttctctgtccttggaggctctgaaatgtttccgcatcaggaacaatgagaagatgctgagtgacagccacggcgtggagaccatccgggacatcctgccagacaccagccttgggggcccatccttcttcaaaatcatcacggccaaggctgtcctgaagctgcaggccggaaacgccgaggaagccgccctgtggagggatctggtccgcaaagtcctggcatcctacttggagacagccgaggaggcggtgaccctgggcgggagcctggatgaaaactgtcaggaggtgctgaaatttgccacccgggagaatggcttcctgctgcagtacctggtggctatccccatggagaaaggccttgactcccaaggctgcttctgcgcaggctgctcccggcagatcggcttctcctttgtacgacccaagctctgtgccttctctggcctctattactgtgacatctgccaccaagacgatgcctcagtgattccggccaggatcatccacaactgggacctcaccaagcgcccgatctgcaggcaggccctgaagtttctgacacagatccgggcccagcccctcatcaacctgcagatggtgaacgcgtctctgtacgagcatgtggagcggatgcacctcattgggaggagacgggagcagctgaagctcctgggggattacctgggcctgtgccggagtggcgccctgaaggagctcagcaagaggctcaaccacaggaattatctcttggaatctccgcataggttcagtgttgctgacctccaacagatcgcagacggggtgtatgaaggattcctcaaggccctgattgaatttgcctcccagcatgtctaccactgcgacctgtgcacccagcgcggcttcatctgccagatctgccagcaccacgacatcatcttcccctttgagtttgacaccacagtcaggtgtgccgagtgcaagaccgtcttccaccagagctgccaggctgtggtgaagaagggctgcccccgctgtgcccgccggcgcaagtaccaggaacagaacattttcgcctgatgcccatctgctgaccccgctctgaaagccgggggtgagtgtggctcagccatcccggctgggtttgccatcagcccaggatactcaccgtgtcacagctgtgtccccttgtcaggaagaccctcagatgtggccagagcaccggcctcccagagaaagcccaggaagtccccgtggtgtcccctggccctccccccacccctctgctgcaggaggcgtggccaccaccagatgctccctgtctggggcaggcagggccgtttactcaccaggccctggctcaccagcgtcccggcgcctccgttagggctgcccaaacactgtggaaaggggacttggggagcattttcaattccacattcctgattaaaaggtctagttttttaaggtgggtttttcccattcatatttcaacagaaagtatttttttattcttgaccctacgtgagtcacccatgaaatccagacattctcacccccagcggatgcacaggagccactcaggcctggcttagaggtagcgggtggctggtgggcaggccactgctgggacagggtctatgggcccacccagtgcctttccttggccctcactgccagtgccaaaccgcccctcagcagggcagggccagtcctggcgaccccggttcctctgtgtcctctttactccccaccccagtgcgtctcgcctgctgagcccaccgctttctcagcgtcagagcccctagctcttctctagcctggggccttggccccattaggagaaggagaaatgactggaaaccagcactgtcagcactttgagccctcctcggtttatggagggtcgccgtcttgcccacccccgatccccgtgcgctcctcacccctctacagacaggggcgctgctgcagatgctccaggcccaccttggtgggtgcccggggtcacactctctgcctgactgacccctgccagggcacagataggcaggaccccagagagggcaggcagccacgccctgcactgtggagaagtgacctggtcctaagctgtgcagggcgtgcgggggaactgccctgtggatgcagccaccacctcacaaagccatgaattcccaaagcatcactgaacttgcccagccgggacactggagactgaagaagttccccggagcaggactgcctttgaaggggccttggggctggggtgggagtctggaattgttttcaaagtgatggtcagaccctccaggcttcggggaaatgtgggtttgctggtctctctgtcgccttcccccacctctcctggacctagcaggccctcagtcctagctgtcttacctgcgctcagcttggagtcaggcctcaggtggagagccgcatgtcactgtcagagatgagcccacccccacccttccctgggggcgattagctgctgagtcacccacccagccttggagctggatgcctgtgcagcagaacagaggcaacggtggcaggcaggtggaggctgcgcacagcttctcccggtcatggcacacacctgtgcccagacgccaatgcctcctaagccaggagctgggttatgcaccgccatggcccacattaacgctccaccacaagcccagcctagtcagagccctcattgccccatccctgagtgggcaggagcctggcctggggagggcttgggcctgtgaggattctccccgaaggtgccctcggaggcagcaggtttgaggccctggggggcccgttccccagaagctgccagtgctttcagatgcattgactcttcccgcctcccctccctcagaaaggtagtgcccacactatttttaaaatgttattttatgcaatacactgttcctagtgagcagggctctggccctgaggagtctttgcaatgtattgaaggaattgctgccgtgtgagttttgaatgattttgcagtaaagacctgatctttctca

SEQ ID NO: 291526 - DNA, 5320 bp, Homo sapiens
gggccgagagaccgcatcgtcggctcggaggctgaggggctgccgcggccgggagcgcccctcgcctcgctcctcgctccgcttggtgtcatgtgattctctgagggagcagctgcgtgagtggagatgctttcagtggtggagaatggactggacccccaggctgccatcccggtcatcaagaagaagctggtgggatccgtgaaggccttgcagaagcagtacgtgtccctggacacggtggtcactagtgaagacggagatgccaacaccatgtgcagcgccctggaggccgtatttatccatggcctgcacgccaagcacatccgagctgaggccggaggaaaaaggaagaaaagtgcccaccagaagcctctgccccagcctgtcttctggcccctcctgaaagctgtcacccacaaacacatcatctcagagttggagcacctgacgtttgtcaacacggatgtgggccgctgccgggcatggctgcggctggccctgaacgatggcctgatggagtgctacctgaagctgctgctgcaggagcaggcccgcttgcatgagtactaccagcccaccgccctgctccgggatgctgaggagggcgagttcctccttagcttcctgcagggcctcacgtccttgtccttcgaactctcctacaagtctgccatcttaaatgagtggacgctcaccccattggccctgtctgggctttgcccgctttctgagctggaccctctctctacctctggtgcagaactacagcggaaggaatctctggattccatttcccattcttcaggctctgaagacatcgaagtccatcactcgggccataagatacggaggaaccagaagctgactgcctcctccctcagcctggacacggccagttcatcccagctgtcctgcagcctaaactctgatagctgcttactccaagagaatggctccaagagtccagaccattgcgaggagcccatgtcctgtgactcagacctgggcacagcaaatgctgaggactcagaccggtctctgcaagaggtattgttggaattcagcaaagcccaggtaaactctgtgccaaccaacggactgagccaagaaacagagatccccacaccacaggcctcgctctccctccatggcctcaacaccagcacatacctgcactgtgaggcacctgcagagccccttcctgcccaggcagcctctggaactcaagatggtgtccacgtgcaggagccgcgtccccaggcgcccagccccctggacttacagcagcctgtagagagcacctcaggccagcagccttctagtactgtcagcgagacagccagagaagtgggccaagggaatggcctgcagaaggcccaggctcatgacggagctggtctgaagctggtagtttcctcacccaccagtccgaaaaacaagagctggatctcagaggatgacttctaccggccttcccgggagcaacccctggagagtgcttcagaccacccaatagcttcttacagggggactccagggtcaaggcctggtctccacaggcatttttctcaagaaccaagaaaaaactgctccctgggggcgttagaccaagcgtgtgtaccttccccaggaagaaggcaagcccaggcagccccatcccaggggcataagagcttccgggtggtacaccggagacagatgggactgtccaacccattccggggtctcatgaagctgggcaccgtggagcggcggggggcaatgggcatctggaaggagctcttctgcgagctctccccgctggagttccgcctctacctgagcaacgaggagcacacctgtgtggagaactgctcgctgcttcgctgtgagtctgtggggccagcccatagtgatgggcgctttgagctggtcttctctggcaagaagctggccctgcgcgcctcctcccaggacgaagctgaggactggctggaccgggtgcgggaggccctgcagaaggtccggcctcagcaggaggatgagtgggtgaacgtgcagtacccagaccagcctgaggaaccccccgaggcgccccagggctgcctctctccctcagacctgctctcggagcccgcggccctccagggcacacagtttgactggtcgtccgcccaggttccagagccagatgccatcaaggagtccctgctgtacttgtacatggacaggacctggatgccctatatattttctctgtccttggaggctctgaaatgtttccgcatcaggaacaatgagaagatgctgagtgacagccacggcgtggagaccatccgggacatcctgccagacaccagccttgggggcccatccttcttcaaaatcatcacggccaaggctgtcctgaagctgcaggccggaaacgccgaggaagccgccctgtggagggatctggtccgcaaagtcctggcatcctacttggagacagccgaggaggcggtgaccctgggcgggagcctggatgaaaactgtcaggaggtgctgaaatttgccacccgggagaatggcttcctgctgcagtacctggtggctatccccatggagaaaggccttgactcccaaggctgcttctgcgcaggctgctcccggcagatcggcttctcctttgtacgacccaagctctgtgccttctctggcctctattactgtgacatctgccaccaagacgatgcctcagtgattccggccaggatcatccacaactgggacctcaccaagcgcccgatctgcaggcaggccctgaagtttctgacacagatccgggcccagcccctcatcaacctgcagatggtgaacgcgtctctgtacgagcatgtggagcggatgcacctcattgggaggagacgggagcagctgaagctcctgggggattacctgggcctgtgccggagtggcgccctgaaggagctcagcaagaggctcaaccacaggaattatctcttggaatctccgcataggttcagtgttgctgacctccaacagatcgcagacggggtgtatgaaggattcctcaaggccctgattgaatttgcctcccagcatgtctaccactgcgacctgtgcacccagcgcggcttcatctgccagatctgccagcaccacgacatcatcttcccctttgagtttgacaccacagtcaggtgtgccgagtgcaagaccgtcttccaccagagctgccaggctgtggtgaagaagggctgcccccgctgtgcccgccggcgcaagtaccaggaacagaacattttcgcctgatgcccatctgctgaccccgctctgaaagccgggggtgagtgtggctcagccatcccggctgggtttgccatcagcccaggatactcaccgtgtcacagctgtgtccccttgtcaggaagaccctcagatgtggccagagcaccggcctcccagagaaagcccaggaagtccccgtggtgtcccctggccctccccccacccctctgctgcaggaggcgtggccaccaccagatgctccctgtctggggcaggcagggccgtttactcaccaggccctggctcaccagcgtcccggcgcctccgttagggctgcccaaacactgtggaaaggggacttggggagcattttcaattccacattcctgattaaaaggtctagttttttaaggtgggtttttcccattcatatttcaacagaaagtatttttttattcttgaccctacgtgagtcacccatgaaatccagacattctcacccccagcggatgcacaggagccactcaggcctggcttagaggtagcgggtggctggtgggcaggccactgctgggacagggtctatgggcccacccagtgcctttccttggccctcactgccagtgccaaaccgcccctcagcagggcagggccagtcctggcgaccccggttcctctgtgtcctctttactccccaccccagtgcgtctcgcctgctgagcccaccgctttctcagcgtcagagcccctagctcttctctagcctggggccttggccccattaggagaaggagaaatgactggaaaccagcactgtcagcactttgagccctcctcggtttatggagggtcgccgtcttgcccacccccgatccccgtgcgctcctcacccctctacagacaggggcgctgctgcagatgctccaggcccaccttggtgggtgcccggggtcacactctctgcctgactgacccctgccagggcacagataggcaggaccccagagagggcaggcagccacgccctgcactgtggagaagtgacctggtcctaagctgtgcagggcgtgcgggggaactgccctgtggatgcagccaccacctcacaaagccatgaattcccaaagcatcactgaacttgcccagccgggacactggagactgaagaagttccccggagcaggactgcctttgaaggggccttggggctggggtgggagtctggaattgttttcaaagtgatggtcagaccctccaggcttcggggaaatgtgggtttgctggtctctctgtcgccttcccccacctctcctggacctagcaggccctcagtcctagctgtcttacctgcgctcagcttggagtcaggcctcaggtggagagccgcatgtcactgtcagagatgagcccacccccacccttccctgggggcgattagctgctgagtcacccacccagccttggagctggatgcctgtgcagcagaacagaggcaacggtggcaggcaggtggaggctgcgcacagcttctcccggtcatggcacacacctgtgcccagacgccaatgcctcctaagccaggagctgggttatgcaccgccatggcccacattaacgctccaccacaagcccagcctagtcagagccctcattgccccatccctgagtgggcaggagcctggcctggggagggcttgggcctgtgaggattctccccgaaggtgccctcggaggcagcaggtttgaggccctggggggcccgttccccagaagctgccagtgctttcagatgcattgactcttcccgcctcccctccctcagaaaggtagtgcccacactatttttaaaatgttattttatgcaatacactgttcctagtgagcagggctctggccctgaggagtctttgcaatgtattgaaggaattgctgccgtgtgagttttgaatgattttgcagtaaagacctgatctttctcaaaaaaacaacaaaatcaacaaaaaacacagaaaacaacaagtgaaaaacaataagaacaccagggggg

SEQ ID NO: 291527 - DNA, 5598 bp, Homo sapiens
gggccgagagaccgcatcgtcggctcggaggctgaggggctgccgcggccgggagcgcccctcgcctcgctcctcgctccgcttggtgtcatgtgattctctgagggagcagctgcgtgagtggagatgctttcagtggtggagaatggactggacccccaggctgccatcccggtcatcaagaagaagctggtgggatccgtgaaggccttgcagaagcagtacgtgtccctggacacggtggtcactagtgaagacggagatgccaacaccatgtgcagcgccctggaggccgtatttatccatggcctgcacgccaagcacatccgagctgaggccggaggaaaaaggaagaaaagtgcccaccagaagcctctgccccagcctgtcttctggcccctcctgaaagctgtcacccacaaacacatcatctcagagttggagcacctgacgtttgtcaacacggatgtgggccgctgccgggcatggctgcggctggccctgaacgatggcctgatggagtgctacctgaagctgctgctgcaggagcaggcccgcttgcatgagtactaccagcccaccgccctgctccgggatgctgaggagggcgagttcctccttagcttcctgcagggcctcacgtccttgtccttcgaactctcctacaagtctgccatcttaaatgagtggacgctcaccccattggccctgtctgggctttgcccgctttctgagctggaccctctctctacctctggtgcagaactacagcggaaggaatctctggattccatttcccattcttcaggctctgaagacatcgaagtccatcactcgggccataagatacggaggaaccagaagctgactgcctcctccctcagcctggacacggccagttcatcccagctgtcctgcagcctaaactctgatagctgcttactccaagagaatggctccaagagtccagaccattgcgaggagcccatgtcctgtgactcagacctgggcacagcaaatgctgaggactcagaccggtctctgcaagaggtattgttggaattcagcaaagcccaggtaaactctgtgccaaccaacggactgagccaagaaacagagatccccacaccacaggcctcgctctccctccatggcctcaacaccagcacatacctgcactgtgaggcacctgcagagccccttcctgcccaggcagcctctggaactcaagatggtgtccacgtgcaggagccgcgtccccaggcgcccagccccctggacttacagcagcctgtagagagcacctcaggccagcagccttctagtactgtcagcgagacagccagagaagtgggccaagggaatggcctgcagaaggcccaggctcatgacggagctggtctgaagctggtagtttcctcacccaccagtccgaaaaacaagagctggatctcagaggatgacttctaccggccttcccgggagcaacccctggagagtgcttcagaccacccaatagcttcttacagggggactccagggtcaaggcctggtctccacaggcatttttctcaagaaccaagaaaaaactgctccctgggggcgttagaccaagcgtgtgtaccttccccaggaagaaggcaagcccaggcagccccatcccaggggcataagagcttccgggtggtacaccggagacagatgggactgtccaacccattccggggtctcatgaagctgggcaccgtggagcggcggggggcaatgggcatctggaaggagctcttctgcgagctctccccgctggagttccgcctctacctgagcaacgaggagcacacctgtgtggagaactgctcgctgcttcgctgtgagtctgtggggccagcccatagtgatgggcgctttgagctggtcttctctggcaagaagctggccctgcgcgcctcctcccaggacgaagctgaggactggctggaccgggtgcgggaggccctgcagaaggtccggcctcagcaggaggatgagtgggtgaacgtgcagtacccagaccagcctgaggaaccccccgaggcgccccagggctgcctctctccctcagacctgctctcggagcccgcggccctccagggcacacagtttgactggtcgtccgcccaggttccagagccagatgccatcaaggagtccctgctgtacttgtacatggacaggacctggatgccctatatattttctctgtccttggaggctctgaaatgtttccgcatcaggaacaatgagaagatgctgagtgacagccacggcgtggagaccatccgggacatcctgccagacaccagccttgggggcccatccttcttcaaaatcatcacggccaaggctgtcctgaagctgcaggccggaaacgccgaggaagccgccctgtggagggatctggtccgcaaagtcctggcatcctacttggagacagccgaggaggcggtgaccctgggcgggagcctggatgaaaactgtcaggaggtgctgaaatttgccacccgggagaatggcttcctgctgcagtacctggtggctatccccatggagaaaggccttgactcccaaggctgcttctgcgcaggctgctcccggcagatcggcttctcctttgtacgacccaagctctgtgccttctctggcctctattactgtgacatctgccaccaagacgatgcctcagtgattccggccaggatcatccacaactgggacctcaccaagcgcccgatctgcaggcaggccctgaagtttctgacacagatccgggcccagcccctcatcaacctgcagatggtgaacgcgtctctgtacgagcatgtggagcggatgcacctcattgggaggagacgggagcagctgaagctcctgggggattacctgggcctgtgccggagtggcgccctgaaggagctcagcaagaggctcaaccacaggaattatctcttggaatctccgcataggttcagtgttgctgacctccaacagatcgcagacggggtgtatgaaggattcctcaaggccctgattgaatttgcctcccagcatgtctaccactgcgacctgtgcacccagcgcggcttcatctgccagatctgccagcaccacgacatcatcttcccctttgagtttgacaccacagtcaggtgtgccgagtgcaagaccgtcttccaccagagctgccaggctgtggtgaagaagggctgcccccgctgtgcccgccggcgcaagtaccaggaacagaacattttcgcctgatgcccatctgctgaccccgctctgaaagccgggggtgagtgtggctcagccatcccggctgggtttgccatcagcccaggatactcaccgtgtcacagctgtgtccccttgtcaggaagaccctcagatgtggccagagcaccggcctcccagagaaagcccaggaagtccccgtggtgtcccctggccctccccccacccctctgctgcaggaggcgtggccaccaccagatgctccctgtctggggcaggcagggccgtttactcaccaggccctggctcaccagcgtcccggcgcctccgttagggctgcccaaacactgtggaaaggggacttggggagcattttcaattccacattcctgattaaaaggtctagttttttaaggtgggtttttcccattcatatttcaacagaaagtatttttttattcttgaccctacgtgagtcacccatgaaatccagacattctcacccccagcggatgcacaggagccactcaggcctggcttagaggtagcgggtggctggtgggcaggccactgctgggacagggtctatgggcccacccagtgcctttccttggccctcactgccagtgccaaaccgcccctcagcagggcagggccagtcctggcgaccccggttcctctgtgtcctctttactccccaccccagtgcgtctcgcctgctgagcccaccgctttctcagcgtcagagcccctagctcttctctagcctggggccttggccccattaggagaaggagaaatgactggaaaccagcactgtcagcactttgagccctcctcggtttatggagggtcgccgtcttgcccacccccgatccccgtgcgctcctcacccctctacagacaggggcgctgctgcagatgctccaggcccaccttggtgggtgcccggggtcacactctctgcctgactgacccctgccagggcacagataggcaggaccccagagagggcaggcagccacgccctgcactgtggagaagtgacctggtcctaagctgtgcagggcgtgcgggggaactgccctgtggatgcagccaccacctcacaaagccatgaattcccaaagcatcactgaacttgcccagccgggacactggagactgaagaagttccccggagcaggactgcctttgaaggggccttggggctggggtgggagtctggaattgttttcaaagtgatggtcagaccctccaggcttcggggaaatgtgggtttgctggtctctctgtcgccttcccccacctctcctggacctagcaggccctcagtcctagctgtcttacctgcgctcagcttggagtcaggcctcaggtggagagccgcatgtcactgtcagagatgagcccacccccacccttccctgggggcgattagctgctgagtcacccacccagccttggagctggatgcctgtgcagcagaacagaggcaacggtggcaggcaggtggaggctgcgcacagcttctcccggtcatggcacacacctgtgcccagacgccaatgcctcctaagccaggagctgggttatgcaccgccatggcccacattaacgctccaccacaagcccagcctagtcagagccctcattgccccatccctgagtgggcaggagcctggcctggggagggcttgggcctgtgaggattctccccgaaggtgccctcggaggcagcaggtttgaggccctggggggcccgttccccagaagctgccagtgctttcagatgcattgactcttcccgcctcccctccctcagaaaggtagtgcccacactatttttaaaatgttattttatgcaatacactgttcctagtgagcagggctctggccctgaggagtctttgcaatgtattgaaggaattgctgccgtgtgagttttgaatgattttgcagtaaagacctgatctttctcaaaaaaaatacacatagaaaaagtaataaaaaacataaaagaggggggggccgtaaaaattttgcccgcccgagggccacatgtacaggtgaccccggttctggcaaaagggggccccagaaagcggcaaaataagcacgatccacgagcacgcataaaaaaggcggaagcgcagaaacagggtcaggggggaacattgtgggaagaagcagccatgttgcggggggggacaaattgtggagatccctacaagagattaggagccctaggggaaaatacaatgttaaggggataaggggaaaacaggggattatgggcgtgaaattgtgcagaggatgtagagattg

SEQ ID NO: 291528 - DNA, 4673 bp, Homo sapiens
gggccgagagaccgcatcgtcggctcggaggctgaggggctgccgcggccgggagcgcccctcgcctcgctcctcgctccgcttggtgtcatgtgattctctgagggagcagctgcgtgagtggagatgctttcagtggtggagaatggactggacccccaggctgccatcccggtcatcaagaagaagctggtgggatccgtgaaggccttgcagaagcagtacgtgtccctggacacggtggtcactagtgaagacggagatgccaacaccatgtgcagcgccctggaggccgtatttatccatggcctgcacgccaagcacatccgagctgaggccggaggaaaaaggaagaaaagtgcccaccagaagcctctgccccagcctgtcttctggcccctcctgaaagctgtcacccacaaacacatcatctcagagttggagcacctgacgtttgtcaacacggatgtgggccgctgccgggcatggctgcggctggccctgaacgatggcctgatggagtgctacctgaagctgctgctgcaggagcaggcccgcttgcatgagtactaccagcccaccgccctgctccgggatgctgaggagggcgagttcctccttagcttcctgcagggcctcacgtccttgtccttcgaactctcctacaagtctgccatcttaaatgagtggacgctcaccccattggccctgtctgggctttgcccgctttctgagctggaccctctctctacctctggtgcagaactacagcggaaggaatctctggattccatttcccattcttcaggctctgaagacatcgaagtccatcactcgggccataagatacggaggaaccagaagctgactgcctcctccctcagcctggacacggccagttcatcccagctgtcctgcagcctaaactctgatagctgcttactccaagagaatggctccaagagtccagaccattgcgaggagcccatgtcctgtgactcagacctgggcacagcaaatgctgaggactcagaccggtctctgcaagaggtattgttggaattcagcaaagcccaggtaaactctgtgccaaccaacggactgagccaagaaacagagatccccacaccacaggcctcgctctccctccatggcctcaacaccagcacatacctgcactgtgaggcacctgcagagccccttcctgcccaggcagcctctggaactcaagatggtgtccacgtgcaggagccgcgtccccaggcgcccagccccctggacttacagcagcctgtagagagcacctcaggccagcagccttctagtactgtcagcgagacagccagagaagtgggccaagggaatggcctgcagaaggcccaggctcatgacggagctggtctgaagctggtagtttcctcacccaccagtccgaaaaacaagagctggatctcagaggatgacttctaccggccttcccgggagcaacccctggagagtgcttcagaccacccaatagcttcttacagggggactccagggtcaaggcctggtctccacaggcatttttctcaagaaccaagaaaaaactgctccctgggggcgttagaccaagcgtgtgtaccttccccaggaagaaggcaagcccaggcagccccatcccaggggcataagagcttccgggtggtacaccggagacagatgggactgtccaacccattccggggtctcatgaagctgggcaccgtggagcggcggggggcaatgggcatctggaaggagctcttctgcgagctctccccgctggagttccgcctctacctgagcaacgaggagcacacctgtgtggagaactgctcgctgcttcgctgtgagtctgtggggccagcccatagtgatgggcgctttgagctggtcttctctggcaagaagctggccctgcgcgcctcctcccaggacgaagctgaggactggctggaccgggtgcgggaggccctgcagaaggtccggcctcagcaggaggatgagtgggtgaacgtgcagtacccagaccagcctgaggaaccccccgaggcgccccagggctgcctctctccctcagacctgctctcggagcccgcggccctccagggcacacagtttgactggtcgtccgcccaggttccagagccagatgccatcaaggagtccctgctgtacttgtacatggacaggacctggatgccctatatattttctctgtccttggaggctctgaaatgtttccgcatcaggaacaatgagaagatgctgagtgacagccacggcgtggagaccatccgggacatcctgccagacaccagccttgggggcccatccttcttcaaaatcatcacggccaaggctgtcctgaagctgcaggccggaaacgccgaggaagccgccctgtggagggatctggtccgcaaagtcctggcatcctacttggagacagccgaggaggcggtgaccctgggcgggagcctggatgaaaactgtcaggaggtgctgaaatttgccacccgggagaatggcttcctgctgcagtacctggtggctatccccatggagaaaggccttgactcccaaggctgcttctgcgcaggctgctcccggcagatcggcttctcctttgtacgacccaagctctgtgccttctctggcctctattactgtgacatctgccaccaagacgatgcctcagtgattccggccaggatcatccacaactgggacctcaccaagcgcccgatctgcaggcaggccctgaagtttctgacacagatccgggcccagcccctcatcaacctgcagatggtgaacgcgtctctgtacgagcatgtggagcggatgcacctcattgggaggagacgggagcagctgaagctcctgggggattacctgggcctgtgccggagtggcgccctgaaggagctcagcaagaggctcaaccacaggaattatctcttggaatctccgcataggttcagtgttgctgacctccaacagatcgcagacggggtgtatgaaggattcctcaaggccctgattgaatttgcctcccagcatgtctaccactgcgacctgtgcacccagcgcggcttcatctgccagatctgccagcaccacgacatcatcttcccctttgagtttgacaccacagtcaggtgtgccgagtgcaagaccgtcttccaccagagctgccaggctgtggtgaagaagggctgcccccgctgtgcccgccggcgcaagtaccaggaacagaacattttcgcctgatgcccatctgctgaccccgctctgaaagccgggggtgagtgtggctcagccatcccggctgggtttgccatcagcccaggatactcaccgtgtcacagctgtgtccccttgtcaggaagaccctcagatgtggccagagcaccggcctcccagagaaagcccaggaagtccccgtggtgtcccctggccctccccccacccctctgctgcaggaggcgtggccaccaccagatgctccctgtctggggcaggcagggccgtttactcaccaggccctggctcaccagcgtcccggcgcctccgttagggctgcccaaacactgtggaaaggggacttggggagcattttcaattccacattcctgattaaaaggtctagttttttaaggtgggtttttcccattcatatttcaacagaaagtatttttttattcttgaccctacgtgagtcacccatgaaatccagacattctcacccccagcggatgcaagccaccacctcacaaagccatgaattcccaaagcatcactgaacttgcccagccgggacactggagactgaagaagttccccggagcaggactgcctttgaaggggccttggggctggggtgggagtctggaattgttttcaaagtgatggtcagaccctccaggcttcggggaaatgtgggtttgctggtctctctgtcgccttcccccacctctcctggacctagcaggccctcagtcctagctgtcttacctgcgctcagcttggagtcaggcctcaggtggagagccgcatgtcactgtcagagatgagcccacccccacccttccctgggggcgattagctgctgagtcacccacccagccttggagctggatgcctgtgcagcagaacagaggcaacggtggcaggcaggtggaggctgcgcacagcttctcccggtcatggcacacacctgtgcccagacgccaatgcctcctaagccaggagctgggttatgcaccgccatggcccacattaacgctccaccacaagcccagcctagtcagagccctcattgccccatccctgagtgggcaggagcctggcctggggagggcttgggcctgtgaggattctccccgaaggtgccctcggaggcagcaggtttgaggccctggggggcccgttccccagaagctgccagtgctttcagatgcattgactcttcccgcctcccctccctcagaaaggtagtgcccacactatttttaaaatgttattttatgcaatacactgttcctagtgagcagggctctggccctgaggagtctttgcaatgtattgaaggaattgctgccgtgtgagttttgaatgattttgcagtaaagacctgatctttctca

SEQ ID NO: 291529 - DNA, 5004 bp, Homo sapiens
gggccgagagaccgcatcgtcggctcggaggctgaggggctgccgcggccgggagcgcccctcgcctcgctcctcgctccgcttggtgtcatgtgattctctgagggagcagctgcgtgagtggagatgctttcagtggtggagaatggactggacccccaggctgccatcccgacacatcatctcagagttggagcacctgacgtttgtcaacacggatgtgggccgctgccgggcatggctgcggctggccctgaacgatggcctgatggagtgctacctgaagctgctgctgcaggagcaggcccgcttgcatgagtactaccagcccaccgccctgctccgggatgctgaggagggcgagttcctccttagcttcctgcagggcctcacgtccttgtccttcgaactctcctacaagtctgccatcttaaatgagtggacgctcaccccattggccctgtctgggctttgcccgctttctgagctggaccctctctctacctctggtgcagaactacagcggaaggaatctctggattccatttcccattcttcaggctctgaagacatcgaagtccatcactcgggccataagatacggaggaaccagaagctgactgcctcctccctcagcctggacacggccagttcatcccagctgtcctgcagcctaaactctgatagctgcttactccaagagaatggctccaagagtccagaccattgcgaggagcccatgtcctgtgactcagacctgggcacagcaaatgctgaggactcagaccggtctctgcaagaggtattgttggaattcagcaaagcccaggtaaactctgtgccaaccaacggactgagccaagaaacagagatccccacaccacaggcctcgctctccctccatggcctcaacaccagcacatacctgcactgtgaggcacctgcagagccccttcctgcccaggcagcctctggaactcaagatggtgtccacgtgcaggagccgcgtccccaggcgcccagccccctggacttacagcagcctgtagagagcacctcaggccagcagccttctagtactgtcagcgagacagccagagaagtgggccaagggaatggcctgcagaaggcccaggctcatgacggagctggtctgaagctggtagtttcctcacccaccagtccgaaaaacaagagctggatctcagaggatgacttctaccggccttcccgggagcaacccctggagagtgcttcagaccacccaatagcttcttacagggggactccagggtcaaggcctggtctccacaggcatttttctcaagaaccaagaaaaaactgctccctgggggcgttagaccaagcgtgtgtaccttccccaggaagaaggcaagcccaggcagccccatcccaggggcataagagcttccgggtggtacaccggagacagatgggactgtccaacccattccggggtctcatgaagctgggcaccgtggagcggcggggggcaatgggcatctggaaggagctcttctgcgagctctccccgctggagttccgcctctacctgagcaacgaggagcacacctgtgtggagaactgctcgctgcttcgctgtgagtctgtggggccagcccatagtgatgggcgctttgagctggtcttctctggcaagaagctggccctgcgcgcctcctcccaggacgaagctgaggactggctggaccgggtgcgggaggccctgcagaaggtccggcctcagcaggaggatgagtgggtgaacgtgcagtacccagaccagcctgaggaaccccccgaggcgccccagggctgcctctctccctcagacctgctctcggagcccgcggccctccagggcacacagtttgactggtcgtccgcccaggttccagagccagatgccatcaaggagtccctgctgtacttgtacatggacaggacctggatgccctatatattttctctgtccttggaggctctgaaatgtttccgcatcaggaacaatgagaagatgctgagtgacagccacggcgtggagaccatccgggacatcctgccagacaccagccttgggggcccatccttcttcaaaatcatcacggccaaggctgtcctgaagctgcaggccggaaacgccgaggaagccgccctgtggagggatctggtccgcaaagtcctggcatcctacttggagacagccgaggaggcggtgaccctgggcgggagcctggatgaaaactgtcaggaggtgctgaaatttgccacccgggagaatggcttcctgctgcagtacctggtggctatccccatggagaaaggccttgactcccaaggctgcttctgcgcaggctgctcccggcagatcggcttctcctttgtacgacccaagctctgtgccttctctggcctctattactgtgacatctgccaccaagacgatgcctcagtgattccggccaggatcatccacaactgggacctcaccaagcgcccgatctgcaggcaggccctgaagtttctgacacagatccgggcccagcccctcatcaacctgcagatggtgaacgcgtctctgtacgagcatgtggagcggatgcacctcattgggaggagacgggagcagctgaagctcctgggggattacctgggcctgtgccggagtggcgccctgaaggagctcagcaagaggctcaaccacaggaattatctcttggaatctccgcataggttcagtgttgctgacctccaacagatcgcagacggggtgtatgaaggattcctcaaggccctgattgaatttgcctcccagcatgtctaccactgcgacctgtgcacccagcgcggcttcatctgccagatctgccagcaccacgacatcatcttcccctttgagtttgacaccacagtcaggtgtgccgagtgcaagaccgtcttccaccagagctgccaggctgtggtgaagaagggctgcccccgctgtgcccgccggcgcaagtaccaggaacagaacattttcgcctgatgcccatctgctgaccccgctctgaaagccgggggtgagtgtggctcagccatcccggctgggtttgccatcagcccaggatactcaccgtgtcacagctgtgtccccttgtcaggaagaccctcagatgtggccagagcaccggcctcccagagaaagcccaggaagtccccgtggtgtcccctggccctccccccacccctctgctgcaggaggcgtggccaccaccagatgctccctgtctggggcaggcagggccgtttactcaccaggccctggctcaccagcgtcccggcgcctccgttagggctgcccaaacactgtggaaaggggacttggggagcattttcaattccacattcctgattaaaaggtctagttttttaaggtgggtttttcccattcatatttcaacagaaagtatttttttattcttgaccctacgtgagtcacccatgaaatccagacattctcacccccagcggatgcacaggagccactcaggcctggcttagaggtagcgggtggctggtgggcaggccactgctgggacagggtctatgggcccacccagtgcctttccttggccctcactgccagtgccaaaccgcccctcagcagggcagggccagtcctggcgaccccggttcctctgtgtcctctttactccccaccccagtgcgtctcgcctgctgagcccaccgctttctcagcgtcagagcccctagctcttctctagcctggggccttggccccattaggagaaggagaaatgactggaaaccagcactgtcagcactttgagccctcctcggtttatggagggtcgccgtcttgcccacccccgatccccgtgcgctcctcacccctctacagacaggggcgctgctgcagatgctccaggcccaccttggtgggtgcccggggtcacactctctgcctgactgacccctgccagggcacagataggcaggaccccagagagggcaggcagccacgccctgcactgtggagaagtgacctggtcctaagctgtgcagggcgtgcgggggaactgccctgtggatgcagccaccacctcacaaagccatgaattcccaaagcatcactgaacttgcccagccgggacactggagactgaagaagttccccggagcaggactgcctttgaaggggccttggggctggggtgggagtctggaattgttttcaaagtgatggtcagaccctccaggcttcggggaaatgtgggtttgctggtctctctgtcgccttcccccacctctcctggacctagcaggccctcagtcctagctgtcttacctgcgctcagcttggagtcaggcctcaggtggagagccgcatgtcactgtcagagatgagcccacccccacccttccctgggggcgattagctgctgagtcacccacccagccttggagctggatgcctgtgcagcagaacagaggcaacggtggcaggcaggtggaggctgcgcacagcttctcccggtcatggcacacacctgtgcccagacgccaatgcctcctaagccaggagctgggttatgcaccgccatggcccacattaacgctccaccacaagcccagcctagtcagagccctcattgccccatccctgagtgggcaggagcctggcctggggagggcttgggcctgtgaggattctccccgaaggtgccctcggaggcagcaggtttgaggccctggggggcccgttccccagaagctgccagtgctttcagatgcattgactcttcccgcctcccctccctcagaaaggtagtgcccacactatttttaaaatgttattttatgcaatacactgttcctagtgagcagggctctggccctgaggagtctttgcaatgtattgaaggaattgctgccgtgtgagttttgaatgattttgcagtaaagacctgatctttctca

SEQ ID NO: 291530 - DNA, 4867 bp, Homo sapiens
gggccgagagaccgcatcgtcggctcggaggctgaggggctgccgcggccgggagcgcccctcgcctcgctcctcgctccgcttggtgtcatgtgattctctgagggagcagctgcgtgagtggagatgctttcagtggtggagaatggactggacccccaggctgccatcccggtcatcaagaagaagctggtgggatccgtgaaggccttgcagaagcagtacgtgtccctggacacggtggtcactagtgaagacggagatgccaacaccatgtgcagcgccctggaggccgtatttatccatggcctgcacgccaagcacatccgagctgaggccggaggaaaaaggaagaaaagtgcccaccagaagcctctgccccagcctgtcttctggcccctcctgaaagctgtcacccacaaacacatcatctcagagttggagcacctgacgtttgtcaacacggatgtgggccgctgccgggcatggctgcggctggccctgaacgatggcctgatggagtgctacctgaagctgctgctgcaggagcaggcccgcttgcatgagtactaccagcccaccgccctgctccgggatgctgaggagggcgagttcctccttagcttcctgcagggcctcacgtccttgtccttcgaactctcctacaagtctgccatcttaaatgagtggacgctcaccccattggccctgtctgggctttgcccgctttctgagctggaccctctctctacctctggtgcagaactacagcggaaggaatctctggattccatttcccattcttcaggctctgaagacatcgaagtccatcactcgggccataagatacggaggaaccagaagctgactgcctcctccctcagcctggacacggccagttcatcccagctgtcctgcagcctaaactctgatagctgcttactccaagagaatggctccaagagtccagaccattgcgaggagcccatgtcctgtgactcagacctgggcacagcaaatgctgaggactcagaccggtctctgcaagaaaaaacaagagctggatctcagaggatgacttctaccggccttcccgggagcaacccctggagagtgcttcagaccacccaatagcttcttacagggggactccagggtcaaggcctggtctccacaggcatttttctcaagaaccaagaaaaaactgctccctgggggcgttagaccaagcgtgtgtaccttccccaggaagaaggcaagcccaggcagccccatcccaggggcataagagcttccgggtggtacaccggagacagatgggactgtccaacccattccggggtctcatgaagctgggcaccgtggagcggcggggggcaatgggcatctggaaggagctcttctgcgagctctccccgctggagttccgcctctacctgagcaacgaggagcacacctgtgtggagaactgctcgctgcttcgctgtgagtctgtggggccagcccatagtgatgggcgctttgagctggtcttctctggcaagaagctggccctgcgcgcctcctcccaggacgaagctgaggactggctggaccgggtgcgggaggccctgcagaaggtccggcctcagcaggaggatgagtgggtgaacgtgcagtacccagaccagcctgaggaaccccccgaggcgccccagggctgcctctctccctcagacctgctctcggagcccgcggccctccagggcacacagtttgactggtcgtccgcccaggttccagagccagatgccatcaaggagtccctgctgtacttgtacatggacaggacctggatgccctatatattttctctgtccttggaggctctgaaatgtttccgcatcaggaacaatgagaagatgctgagtgacagccacggcgtggagaccatccgggacatcctgccagacaccagccttgggggcccatccttcttcaaaatcatcacggccaaggctgtcctgaagctgcaggccggaaacgccgaggaagccgccctgtggagggatctggtccgcaaagtcctggcatcctacttggagacagccgaggaggcggtgaccctgggcgggagcctggatgaaaactgtcaggaggtgctgaaatttgccacccgggagaatggcttcctgctgcagtacctggtggctatccccatggagaaaggccttgactcccaaggctgcttctgcgcaggctgctcccggcagatcggcttctcctttgtacgacccaagctctgtgccttctctggcctctattactgtgacatctgccaccaagacgatgcctcagtgattccggccaggatcatccacaactgggacctcaccaagcgcccgatctgcaggcaggccctgaagtttctgacacagatccgggcccagcccctcatcaacctgcagatggtgaacgcgtctctgtacgagcatgtggagcggatgcacctcattgggaggagacgggagcagctgaagctcctgggggattacctgggcctgtgccggagtggcgccctgaaggagctcagcaagaggctcaaccacaggaattatctcttggaatctccgcataggttcagtgttgctgacctccaacagatcgcagacggggtgtatgaaggattcctcaaggccctgattgaatttgcctcccagcatgtctaccactgcgacctgtgcacccagcgcggcttcatctgccagatctgccagcaccacgacatcatcttcccctttgagtttgacaccacagtcaggtgtgccgagtgcaagaccgtcttccaccagagctgccaggctgtggtgaagaagggctgcccccgctgtgcccgccggcgcaagtaccaggaacagaacattttcgcctgatgcccatctgctgaccccgctctgaaagccgggggtgagtgtggctcagccatcccggctgggtttgccatcagcccaggatactcaccgtgtcacagctgtgtccccttgtcaggaagaccctcagatgtggccagagcaccggcctcccagagaaagcccaggaagtccccgtggtgtcccctggccctccccccacccctctgctgcaggaggcgtggccaccaccagatgctccctgtctggggcaggcagggccgtttactcaccaggccctggctcaccagcgtcccggcgcctccgttagggctgcccaaacactgtggaaaggggacttggggagcattttcaattccacattcctgattaaaaggtctagttttttaaggtgggtttttcccattcatatttcaacagaaagtatttttttattcttgaccctacgtgagtcacccatgaaatccagacattctcacccccagcggatgcacaggagccactcaggcctggcttagaggtagcgggtggctggtgggcaggccactgctgggacagggtctatgggcccacccagtgcctttccttggccctcactgccagtgccaaaccgcccctcagcagggcagggccagtcctggcgaccccggttcctctgtgtcctctttactccccaccccagtgcgtctcgcctgctgagcccaccgctttctcagcgtcagagcccctagctcttctctagcctggggccttggccccattaggagaaggagaaatgactggaaaccagcactgtcagcactttgagccctcctcggtttatggagggtcgccgtcttgcccacccccgatccccgtgcgctcctcacccctctacagacaggggcgctgctgcagatgctccaggcccaccttggtgggtgcccggggtcacactctctgcctgactgacccctgccagggcacagataggcaggaccccagagagggcaggcagccacgccctgcactgtggagaagtgacctggtcctaagctgtgcagggcgtgcgggggaactgccctgtggatgcagccaccacctcacaaagccatgaattcccaaagcatcactgaacttgcccagccgggacactggagactgaagaagttccccggagcaggactgcctttgaaggggccttggggctggggtgggagtctggaattgttttcaaagtgatggtcagaccctccaggcttcggggaaatgtgggtttgctggtctctctgtcgccttcccccacctctcctggacctagcaggccctcagtcctagctgtcttacctgcgctcagcttggagtcaggcctcaggtggagagccgcatgtcactgtcagagatgagcccacccccacccttccctgggggcgattagctgctgagtcacccacccagccttggagctggatgcctgtgcagcagaacagaggcaacggtggcaggcaggtggaggctgcgcacagcttctcccggtcatggcacacacctgtgcccagacgccaatgcctcctaagccaggagctgggttatgcaccgccatggcccacattaacgctccaccacaagcccagcctagtcagagccctcattgccccatccctgagtgggcaggagcctggcctggggagggcttgggcctgtgaggattctccccgaaggtgccctcggaggcagcaggtttgaggccctggggggcccgttccccagaagctgccagtgctttcagatgcattgactcttcccgcctcccctccctcagaaaggtagtgcccacactatttttaaaatgttattttatgcaatacactgttcctagtgagcagggctctggccctgaggagtctttgcaatgtattgaaggaattgctgccgtgtgagttttgaatgattttgcagtaaagacctgatctttctca

SEQ ID NO: 291531 - DNA, 4207 bp, Homo sapiens
gggccgagagaccgcatcgtcggctcggaggctgaggggctgccgcggccgggagcgcccctcgcctcgctcctcgctccgcttggtgtcatgtgattctctgagggagcagctgcgtgagtggagatgctttcagtggtggagaatggactggacccccaggctgccatcccggtcatcaagaagaagctggtgggatccgtgaaggccttgcagaagcagtacgtgtccctggacacggtggtcactagtgaagacggagatgccaacaccatgtgcagcgccctggaggccgtatttatccatggcctgcacgccaagcacatccgagctgaggccggaggaaaaaggaagaaaagtgcccaccagaagcctctgccccagcctgtcttctggcccctcctgaaagctgtcacccacaaacacatcatctcagagttggagcacctgacgtttgtcaacacggatgtgggccgctgccgggcatggctgcggctggccctgaacgatggcctgatggagtgctacctgaagctgctgctgcaggagcaggcccgcttgcatgagtactaccagcccaccgccctgctccgggatgctgaggagggcgagttcctccttagcttcctgcagggcctcacgtccttgtccttcgaactctcctacaagtctgccatcttaaatgagtggacgctcaccccattggccctgtctgggctttgcccgctttctgagctggaccctctctctacctctggtgcagaactacagcggaaggaatctctggattccatttcccattcttcaggctctgaagacatcgaagtccatcactcgggccataagatacggaggaaccagaagctgactgcctcctccctcagcctggacacggccagttcatcccagctgtcctgcagcctaaactctgatagctgcttactccaagagaatggctccaagagtccagaccattgcgaggagcccatgtcctgtgactcagacctgggcacagcaaatgctgaggactcagaccggtctctgcaagaggtattgttggaattcagcaaagcccaggtaaactctgtgccaaccaacggactgagccaagaaacagagatccccacaccacaggcctcgctctccctccatggcctcaacaccagcacatacctgcactgtgaggcacctgcagagccccttcctgcccaggcagcctctggaactcaagatggtgtccacgtgcaggagccgcgtccccaggcgcccagccccctggacttacagcagcctgtagagagcacctcaggccagcagccttctagtactgtcagcgagacagccagagaagtgggccaagggaatggcctgcagaaggcccaggctcatgacggagctggtctgaagctggtagtttcctcacccaccagtccgaaaaacaagagctggatctcagaggatgacttctaccggccttcccgggagcaacccctggagagtgcttcagaccacccaatagcttcttacagggggactccagggtcaaggcctggtctccacaggcatttttctcaagaaccaagaaaaaactgctccctgggggcgttagaccaagcgtgtgtaccttccccaggaagaaggcaagcccaggcagccccatcccaggggcataagagcttccgggtggtacaccggagacagatgggactgtccaacccattccggggtctcatgaagctgggcaccgtggagcggcggggggcaatgggcatctggaaggagctcttctgcgagctctccccgctggagttccgcctctacctgagcaacgaggagcacacctgtgtggagaactgctcgctgcttcgctgtgagtctgtggggccagcccatagtgatgggcgctttgagctggtcttctctggcaagaagctggccctgcgcgcctcctcccaggacgaagctgaggactggctggaccgggtgcgggaggccctgcagaaggtccggcctcagcaggaggatgagtgggtgaacgtgcagtacccagaccagcctgaggaaccccccgaggcgccccagggctgcctctctccctcagacctgctctcggagcccgcggccctccagggcacacagtttgactggtcgtccgcccaggttccagagccagatgccatcaaggagtccctgctgtacttgtacatggacaggacctggatgccctatatattttctctgtccttggaggctctgaaatgtttccgcatcaggaacaatgagaagatgctgagtgacagccacggcgtggagaccatccgggacatcctgccagacaccagccttgggggcccatccttcttcaaaatcatcacggccaaggctgtcctgaagctgcaggccggaaacgccgaggaagccgccctgtggagggatctggtccgcaaagtcctggcatcctacttggagacagccgaggaggcggtgaccctgggcgggagcctggatgaaaactgtcaggaggtgctgaaatttgccacccgggagaatggcttcctgctgcagtacctggtggctatccccatggagaaaggccttgactcccaaggctgcttctgcgcaggctgctcccggcagatcggcttctcctttgtacgacccaagctctgtgccttctctggcctctattactgtgacatctgccaccaagacgatgcctcagtgattccggccaggatcatccacaactgggacctcaccaagcgcccgatctgcaggcaggccctgaagtttctgacacagatccgggcccagcccctcatcaacctgcagatggtgaacgcgtctctgtacgagcatgtggagcggatgcacctcattgggaggagacgggagcagctgaagctcctgggggattacctgggcctgtgccggagtggcgccctgaaggagctcagcaagaggctcaaccacaggaattatctcttggaatctccgcataggttcagtgttgctgacctccaacagatcgcagacggggtgtatgaaggattcctcaaggccctgattgaatttgcctcccagcatgtctaccactgcgacctgtgcacccagcgcggcttcatctgccagatctgccagcaccacgacatcatcttcccctttgagtttgacaccacagtcaggtgtgccgagtgcaagaccgtcttccaccagagctgccaggctgtggtgaagaagggctgcccccgctgtgcccgccggcgcaagtaccaggaacagaacattttcgcctgatgcccatctgctgaccccgctctgaaagccgggggtgagtgtggctcagccatcccggctgggtttgccatcagcccaggatactcaccgtgtcacagctgtgtccccttgtcaggaagaccctcagatgtggccagagcaccggcctcccagagaaagcccaggaagtccccgtggtgtcccctggccctccccccacccctctgctgcaggaggcgtggccaccaccagatgctccctgtctggggcaggcagggccgtttactcaccaggccctggctcaccagcgtcccggcgcctccgttagggctgcccaaacactgtggaaaggggacttggggagcattttcaattccacattcctgattaaaaggtctagttttttaaggtgggtttttcccattcatatttcaacagaaagtatttttttattcttgaccctacgtgagtcacccatgaaatccagacattctcacccccagcggatgcacaggagccactcaggcctggcttagaggtagcgggtggctggtgggcaggccactgctgggacagggtctatgggcccacccagtgcctttccttggccctcactgccagtgccaaaccgcccctcagcagggcagggccagtcctggcgaccccggttcctctgtgtcctctttactccccaccccagtgcgtctcgcctgctgagcccaccgctttctcagcgtcagagcccctagcttcttcccgcctcccctccctcagaaaggtagtgcccacactatttttaaaatgttattttatgcaatacactgttcctagtgagcagggctctggccctgaggagtctttgcaatgtattgaaggaattgctgccgtgtgagttttgaatgattttgcagtaaagacctgatctttctca

SEQ ID NO: 291532 - DNA, 5195 bp, Homo sapiens
gggccgagagaccgcatcgtcggctcggaggctgaggggctgccgcggccgggagcgcccctcgcctcgctcctcgctccgcttggtgtcatgtgattctctgagggagcagctgcgtgagtggagatgctttcagtggtggagaatggactggacccccaggctgccatcccggtcatcaagaagaagctggtgggatccgtgaaggccttgcagaagcagtacgtgtccctggacacggtggtcactagtgaagacggagatgccaacaccatgtgcagcgccctggaggccgtatttatccatggcctgcacgccaagcacatccgagctgaggccggaggaaaaaggaagaaaagtgcccaccagaagcctctgccccagcctgtcttctggcccctcctgaaagctgtcacccacaaacacatcatctcagagttggagcacctgacgtttgtcaacacggatgtgggccgctgccgggcatggctgcggctggccctgaacgatggcctgatggagtgctacctgaagctgctgctgcaggagcaggcccgcttgcatgagtactaccagcccaccgccctgctccgggatgctgaggagggcgagttcctccttagcttcctgcagggcctcacgtccttgtccttcgaactctcctacaagtctgccatcttaaatgagtggacgctcaccccattggccctgtctgggctttgcccgctttctgagctggaccctctctctacctctggtgcagaactacagcggaaggaatctctggattccatttcccattcttcaggctctgaagacatcgaagtccatcactcgggccataagatacggaggaaccagaagctgactgcctcctccctcagcctggacacggccagttcatcccagctgtcctgcagcctaaactctgatagctgcttactccaagagaatggctccaagagtccagaccattgcgaggagcccatgtcctgtgactcagacctgggcacagcaaatgctgaggactcagaccggtctctgcaagaggtattgttggaattcagcaaagcccaggtaaactctgtgccaaccaacggactgagccaagaaacagagatccccacaccacaggcctcgctctccctccatggcctcaacaccagcacatacctgcactgtgaggcacctgcagagccccttcctgcccaggcagcctctggaactcaagatggtgtccacgtgcaggagccgcgtccccaggcgcccagccccctggacttacagcagcctgtagagagcacctcaggccagcagccttctagtactgtcagcgagacagccagagaagtgggccaagggaatggcctgcagaaggcccaggctcatgacggagctggtctgaagctggtagtttcctcacccaccagtccgaaaaacaagagctggatctcagaggatgacttctaccggccttcccgggagcaacccctggagagtgcttcagaccacccaatagcttcttacagggggactccagggtcaaggcctggtctccacaggcatttttctcaagaaccaagaaaaaactgctccctgggggcgttagaccaagcgtgtgtaccttccccaggaagaaggcaagcccaggcagccccatcccaggggcataagagcttccgggtggtacaccggagacagatgggactgtccaacccattccggggtctcatgaagctgggcaccgtggagcggcggggggcaatgggcatctggaaggagctcttctgcgagctctccccgctggagttccgcctctacctgagcaacgaggagcacacctgtgtggagaactgctcgctgcttcgctgtgagtctgtggggccagcccatagtgatgggcgctttgagctggtcttctctggcaagaagctggccctgcgcgcctcctcccaggacgaagctgaggactggctggaccgggtgcgggaggccctgcagaaggtccggcctcagcaggaggatgagtgggtgaacgtgcagtacccagaccagcctgaggaaccccccgaggcgccccagggctgcctctctccctcagacctgctctcggagcccgcggccctccagggcacacagtttgactggtcgtccgcccaggttccagagccagatgccatcaaggagtccctgctgtacttgtacatggacaggacctggatgccctatatattttctctgtccttggaggctctgaaatgtttccgcatcaggaacaatgagaagatgctgagtgacagccacggcgtggagaccatccgggacatcctgccagacaccagccttgggggcccatccttcttcaaaatcatcacggccaaggctgtcctgaagctgcaggccggaaacgccgaggaagccgccctgtggagggatctggtccgcaaagtcctggcatcctacttggagacagccgaggaggcggtgaccctgggcgggagcctggatgaaaactgtcaggaggtgctgaaatttgccacccgggagaatggcttcctgctgcagtacctggtggctatccccatggagaaaggccttgactcccaaggctgcttctgcgcaggctgctcccggcagatcggcttctcctttgtacgacccaagctctgtgccttctctggcctctattactgtgacatctgccaccaagacgatgcctcagtgattccggccaggatcatccacaactgggacctcaccaagcgcccgatctgcaggcaggccctgaagtttctgacacagatccgggcccagcccctcatcaacctgcagatggtgaacgcgtctctgtacgagcatgtggagcggatgcacctcattgggaggagacgggagcagctgaagctcctgggggattacctgggcctgtgccggagtggcgccctgaaggagctcagcaagaggctcaaccacaggaattatctcttggaatctccgcataggttcagtgttgctgacctccaacagcatgtctaccactgcgacctgtgcacccagcgcggcttcatctgccagatctgccagcaccacgacatcatcttcccctttgagtttgacaccacagtcaggtgtgccgagtgcaagaccgtcttccaccagagctgccaggctgtggtgaagaagggctgcccccgctgtgcccgccggcgcaagtaccaggaacagaacattttcgcctgatgcccatctgctgaccccgctctgaaagccgggggtgagtgtggctcagccatcccggctgggtttgccatcagcccaggatactcaccgtgtcacagctgtgtccccttgtcaggaagaccctcagatgtggccagagcaccggcctcccagagaaagcccaggaagtccccgtggtgtcccctggccctccccccacccctctgctgcaggaggcgtggccaccaccagatgctccctgtctggggcaggcagggccgtttactcaccaggccctggctcaccagcgtcccggcgcctccgttagggctgcccaaacactgtggaaaggggacttggggagcattttcaattccacattcctgattaaaaggtctagttttttaaggtgggtttttcccattcatatttcaacagaaagtatttttttattcttgaccctacgtgagtcacccatgaaatccagacattctcacccccagcggatgcacaggagccactcaggcctggcttagaggtagcgggtggctggtgggcaggccactgctgggacagggtctatgggcccacccagtgcctttccttggccctcactgccagtgccaaaccgcccctcagcagggcagggccagtcctggcgaccccggttcctctgtgtcctctttactccccaccccagtgcgtctcgcctgctgagcccaccgctttctcagcgtcagagcccctagctcttctctagcctggggccttggccccattaggagaaggagaaatgactggaaaccagcactgtcagcactttgagccctcctcggtttatggagggtcgccgtcttgcccacccccgatccccgtgcgctcctcacccctctacagacaggggcgctgctgcagatgctccaggcccaccttggtgggtgcccggggtcacactctctgcctgactgacccctgccagggcacagataggcaggaccccagagagggcaggcagccacgccctgcactgtggagaagtgacctggtcctaagctgtgcagggcgtgcgggggaactgccctgtggatgcagccaccacctcacaaagccatgaattcccaaagcatcactgaacttgcccagccgggacactggagactgaagaagttccccggagcaggactgcctttgaaggggccttggggctggggtgggagtctggaattgttttcaaagtgatggtcagaccctccaggcttcggggaaatgtgggtttgctggtctctctgtcgccttcccccacctctcctggacctagcaggccctcagtcctagctgtcttacctgcgctcagcttggagtcaggcctcaggtggagagccgcatgtcactgtcagagatgagcccacccccacccttccctgggggcgattagctgctgagtcacccacccagccttggagctggatgcctgtgcagcagaacagaggcaacggtggcaggcaggtggaggctgcgcacagcttctcccggtcatggcacacacctgtgcccagacgccaatgcctcctaagccaggagctgggttatgcaccgccatggcccacattaacgctccaccacaagcccagcctagtcagagccctcattgccccatccctgagtgggcaggagcctggcctggggagggcttgggcctgtgaggattctccccgaaggtgccctcggaggcagcaggtttgaggccctggggggcccgttccccagaagctgccagtgctttcagatgcattgactcttcccgcctcccctccctcagaaaggtagtgcccacactatttttaaaatgttattttatgcaatacactgttcctagtgagcagggctctggccctgaggagtctttgcaatgtattgaaggaattgctgccgtgtgagttttgaatgattttgcagtaaagacctgatctttctca

SEQ ID NO: 291533 - DNA, 4046 bp, Homo sapiens
agtgcatggagacgagaggtgtttctaaagatgggagaaatgacagcgtgcatgtgtgccgatgggagtcaccccatagagaaggaagaaagcagtgacagaggagaggactgctccttgtccttgagtagttggccaagggagagacctcctgcacaaatggagggtttggcctcacgcagaaagaagcacacttggttcatccctggcagcaggagggaaggcgtgggtgtagggaacagggcgtgtggaggggatcttttgggtgctcttattttctcagtgaaatacaggacgcaagagcagcagtggacggtgagaatggggatgttcccatccagctttcagggtcccatgtgatagtgccccgtggctggcctgtgttctggggacagtcactggccacatgcactgcagggcatcaggcagcagaggctgccttgggcaggacagagacaggcccgccaactaatgtgcccctttttgcctctgcctccaggactgtccaacccattccggggtctcatgaagctgggcaccgtggagcggcggggggcaatgggcatctggaaggagctcttctgcgagctctccccgctggagttccgcctctacctgagcaacgaggagcacacctgtgtggagaactgctcgctgcttcgctgtgagtctgtggggccagcccatagtgatgggcgctttgagctggtcttctctggcaagaagctggccctgcgcgcctcctcccaggacgaagctgaggactggctggaccgggtgcgggaggccctgcagaaggtccggcctcagcaggaggatgagtgggtgaacgtgcagtacccagaccagcctgaggaaccccccgaggcgccccagggctgcctctctccctcagacctgctctcggagcccgcggccctccagggcacacagtttgactggtcgtccgcccaggttccagagccagatgccatcaaggagtccctgctgtacttgtacatggacaggacctggatgccctatatattttctctgtccttggaggctctgaaatgtttccgcatcaggaacaatgagaagatgctgagtgacagccacggcgtggagaccatccgggacatcctgccagacaccagccttgggggcccatccttcttcaaaatcatcacggccaaggctgtcctgaagctgcaggccggaaacgccgaggaagccgccctgtggagggatctggtccgcaaagtcctggcatcctacttggagacagccgaggaggcggtgaccctgggcgggagcctggatgaaaactgtcaggaggtgctgaaatttgccacccgggagaatggcttcctgctgcagtacctggtggctatccccatggagaaaggccttgactcccaaggctgcttctgcgcaggctgctcccggcagatcggcttctcctttgtacgacccaagctctgtgccttctctggcctctattactgtgacatctgccaccaagacgatgcctcagtgattccggccaggatcatccacaactgggacctcaccaagcgcccgatctgcaggcaggccctgaagtttctgacacagatccgggcccagcccctcatcaacctgcagatggtgaacgcgtctctgtacgagcatgtggagcggatgcacctcattgggaggagacgggagcagctgaagctcctgggggattacctgggcctgtgccggagtggcgccctgaaggagctcagcaagaggctcaaccacaggaattatctcttggaatctccgcataggttcagtgttgctgacctccaacagatcgcagacggggtgtatgaaggattcctcaaggccctgattgaatttgcctcccagcatgtctaccactgcgacctgtgcacccagcgcggcttcatctgccagatctgccagcaccacgacatcatcttcccctttgagtttgacaccacagtcaggtgtgccgagtgcaagaccgtcttccaccagagctgccaggctgtggtgaagaagggctgcccccgctgtgcccgccggcgcaagtaccaggaacagaacattttcgcctgatgcccatctgctgaccccgctctgaaagccgggggtgagtgtggctcagccatcccggctgggtttgccatcagcccaggatactcaccgtgtcacagctgtgtccccttgtcaggaagaccctcagatgtggccagagcaccggcctcccagagaaagcccaggaagtccccgtggtgtcccctggccctccccccacccctctgctgcaggaggcgtggccaccaccagatgctccctgtctggggcaggcagggccgtttactcaccaggccctggctcaccagcgtcccggcgcctccgttagggctgcccaaacactgtggaaaggggacttggggagcattttcaattccacattcctgattaaaaggtctagttttttaaggtgggtttttcccattcatatttcaacagaaagtatttttttattcttgaccctacgtgagtcacccatgaaatccagacattctcacccccagcggatgcacaggagccactcaggcctggcttagaggtagcgggtggctggtgggcaggccactgctgggacagggtctatgggcccacccagtgcctttccttggccctcactgccagtgccaaaccgcccctcagcagggcagggccagtcctggcgaccccggttcctctgtgtcctctttactccccaccccagtgcgtctcgcctgctgagcccaccgctttctcagcgtcagagcccctagctcttctctagcctggggccttggccccattaggagaaggagaaatgactggaaaccagcactgtcagcactttgagccctcctcggtttatggagggtcgccgtcttgcccacccccgatccccgtgcgctcctcacccctctacagacaggggcgctgctgcagatgctccaggcccaccttggtgggtgcccggggtcacactctctgcctgactgacccctgccagggcacagataggcaggaccccagagagggcaggcagccacgccctgcactgtggagaagtgacctggtcctaagctgtgcagggcgtgcgggggaactgccctgtggatgcagccaccacctcacaaagccatgaattcccaaagcatcactgaacttgcccagccgggacactggagactgaagaagttccccggagcaggactgcctttgaaggggccttggggctggggtgggagtctggaattgttttcaaagtgatggtcagaccctccaggcttcggggaaatgtgggtttgctggtctctctgtcgccttcccccacctctcctggacctagcaggccctcagtcctagctgtcttacctgcgctcagcttggagtcaggcctcaggtggagagccgcatgtcactgtcagagatgagcccacccccacccttccctgggggcgattagctgctgagtcacccacccagccttggagctggatgcctgtgcagcagaacagaggcaacggtggcaggcaggtggaggctgcgcacagcttctcccggtcatggcacacacctgtgcccagacgccaatgcctcctaagccaggagctgggttatgcaccgccatggcccacattaacgctccaccacaagcccagcctagtcagagccctcattgccccatccctgagtgggcaggagcctggcctggggagggcttgggcctgtgaggattctccccgaaggtgccctcggaggcagcaggtttgaggccctggggggcccgttccccagaagctgccagtgctttcagatgcattgactcttcccgcctcccctccctcagaaaggtagtgcccacactatttttaaaatgttattttatgcaatacactgttcctagtgagcagggctctggccctgaggagtctttgcaatgtattgaaggaattgctgccgtgtgagttttgaatgattttgcagtaaagacctgatctttctca

SEQ ID NO: 291534 - DNA, 2855 bp, Homo sapiens
ttccttcagtggggggaaataggggctgggaggacaggaaagagtgggaaggatctgtgaggcccagagggagggggcgttatcagagcagtccctccctcatctcagcatgattggggagggggcagtgacccttgtcattagagggagagcgggtttgggagtcagataaactgggttcagagcttgactgtaccatttacaagctgggtgaccctagccaaatctcttcatctccttgagcctcagtttccccatctgtaaaatgaagatagcccctcaggtaagtgagcaggtcatgtggcacctggccaggcagtgctcactgaacagccattccttcccatccccaatgcctggtggtacccccagatctgcaggcaggccctgaagtttctgacacagatccgggcccagcccctcatcaacctgcagatggtgaacgcgtctctgtacgagcatgtggagcggatgcacctcattgggaggagacgggagcagctgaagctcctgggggattacctgggcctgtgccggagtggcgccctgaaggagctcagcaagaggctcaaccacaggaattatctcttggaatctccgcataggttcagtgttgctgacctccaacagatcgcagacggggtgtatgaaggattcctcaaggccctgattgaatttgcctcccagcatgtctaccactgcgacctgtgcacccagcgcggcttcatctgccagatctgccagcaccacgacatcatcttcccctttgagtttgacaccacagtcaggtgtgccgagtgcaagaccgtcttccaccagagctgccaggctgtggtgaagaagggctgcccccgctgtgcccgccggcgcaagtaccaggaacagaacattttcgcctgatgcccatctgctgaccccgctctgaaagccgggggtgagtgtggctcagccatcccggctgggtttgccatcagcccaggatactcaccgtgtcacagctgtgtccccttgtcaggaagaccctcagatgtggccagagcaccggcctcccagagaaagcccaggaagtccccgtggtgtcccctggccctccccccacccctctgctgcaggaggcgtggccaccaccagatgctccctgtctggggcaggcagggccgtttactcaccaggccctggctcaccagcgtcccggcgcctccgttagggctgcccaaacactgtggaaaggggacttggggagcattttcaattccacattcctgattaaaaggtctagttttttaaggtgggtttttcccattcatatttcaacagaaagtatttttttattcttgaccctacgtgagtcacccatgaaatccagacattctcacccccagcggatgcacaggagccactcaggcctggcttagaggtagcgggtggctggtgggcaggccactgctgggacagggtctatgggcccacccagtgcctttccttggccctcactgccagtgccaaaccgcccctcagcagggcagggccagtcctggcgaccccggttcctctgtgtcctctttactccccaccccagtgcgtctcgcctgctgagcccaccgctttctcagcgtcagagcccctagctcttctctagcctggggccttggccccattaggagaaggagaaatgactggaaaccagcactgtcagcactttgagccctcctcggtttatggagggtcgccgtcttgcccacccccgatccccgtgcgctcctcacccctctacagacaggggcgctgctgcagatgctccaggcccaccttggtgggtgcccggggtcacactctctgcctgactgacccctgccagggcacagataggcaggaccccagagagggcaggcagccacgccctgcactgtggagaagtgacctggtcctaagctgtgcagggcgtgcgggggaactgccctgtggatgcagccaccacctcacaaagccatgaattcccaaagcatcactgaacttgcccagccgggacactggagactgaagaagttccccggagcaggactgcctttgaaggggccttggggctggggtgggagtctggaattgttttcaaagtgatggtcagaccctccaggcttcggggaaatgtgggtttgctggtctctctgtcgccttcccccacctctcctggacctagcaggccctcagtcctagctgtcttacctgcgctcagcttggagtcaggcctcaggtggagagccgcatgtcactgtcagagatgagcccacccccacccttccctgggggcgattagctgctgagtcacccacccagccttggagctggatgcctgtgcagcagaacagaggcaacggtggcaggcaggtggaggctgcgcacagcttctcccggtcatggcacacacctgtgcccagacgccaatgcctcctaagccaggagctgggttatgcaccgccatggcccacattaacgctccaccacaagcccagcctagtcagagccctcattgccccatccctgagtgggcaggagcctggcctggggagggcttgggcctgtgaggattctccccgaaggtgccctcggaggcagcaggtttgaggccctggggggcccgttccccagaagctgccagtgctttcagatgcattgactcttcccgcctcccctccctcagaaaggtagtgcccacactatttttaaaatgttattttatgcaatacactgttcctagtgagcagggctctggccctgaggagtctttgcaatgtattgaaggaattgctgccgtgtgagttttgaatgattttgcagtaaagacctgatctttctca

SEQ ID NO: 291535 - DNA, 1937 bp, Homo sapiens
ttcccaaatctctcattgcggaacaggttaatattcctgcacgtcgtatgatgcgatggggggacggatcgcggaaggttgtccgggtgttggagtgtcccgtgtccctgcattggagatggcacttaggcaaatccgggtgcgtgattcaagggtgtggggcgagcgactttaggtcgcgaagcaattggaagtggttccaagaaaagcctctaagcttcagtcatacgagaccgtaccgcaaaccgacacaggtgggcgagatgagtattctaaggcgcaatgagagatttaaatctctcatgtggaaaggggacttggggagcattttcaattccacattcctgattaaaaggtctagttttttaaggtgggtttttcccattcatatttcaacagaaagtatttttttattcttgaccctacgtgagtcacccatgaaatccagacattctcacccccagcggatgcacaggagccactcaggcctggcttagaggtagcgggtggctggtgggcaggccactgctgggacagggtctatgggcccacccagtgcctttccttggccctcactgccagtgccaaaccgcccctcagcagggcagggccagtcctggcgaccccggttcctctgtgtcctctttactccccaccccagtgcgtctcgcctgctgagcccaccgctttctcagcgtcagagcccctagctcttctctagcctggggccttggccccattaggagaaggagaaatgactggaaaccagcactgtcagcactttgagccctcctcggtttatggagggtcgccgtcttgcccacccccgatccccgtgcgctcctcacccctctacagacaggggcgctgctgcagatgctccaggcccaccttggtgggtgcccggggtcacactctctgcctgactgacccctgccagggcacagataggcaggaccccagagagggcaggcagccacgccctgcactgtggagaagtgacctggtcctaagctgtgcagggcgtgcgggggaactgccctgtggatgcagccaccacctcacaaagccatgaattcccaaagcatcactgaacttgcccagccgggacactggagactgaagaagttccccggagcaggactgcctttgaaggggccttggggctggggtgggagtctggaattgttttcaaagtgatggtcagaccctccaggcttcggggaaatgtgggtttgctggtctctctgtcgccttcccccacctctcctggacctagcaggccctcagtcctagctgtcttacctgcgctcagcttggagtcaggcctcaggtggagagccgcatgtcactgtcagagatgagcccacccccacccttccctgggggcgattagctgctgagtcacccacccagccttggagctggatgcctgtgcagcagaacagaggcaacggtggcaggcaggtggaggctgcgcacagcttctcccggtcatggcacacacctgtgcccagacgccaatgcctcctaagccaggagctgggttatgcaccgccatggcccacattaacgctccaccacaagcccagcctagtcagagccctcattgccccatccctgagtgggcaggagcctggcctggggagggcttgggcctgtgaggattctccccgaaggtgccctcggaggcagcaggtttgaggccctggggggcccgttccccagaagctgccagtgctttcagatgcattgactcttcccgcctcccctccctcagaaaggtagtgcccacactatttttaaaatgttattttatgcaatacactgttcctagtgagcagggctctggccctgaggagtctttgcaatgtattgaaggaattgctgccgtgtgagttttgaatgattttgcagtaaagacctgatctttctca

SEQ ID NO: 291536 - DNA, 3488 bp, Homo sapiens
gggccgagagaccgcatcgtcggctcggaggctgaggggctgccgcggccgggagcgcccctcgcctcgctcctcgctccgcttggtgtcatgtgattctctgagggagcagctgcgtgagtggagatgctttcagtggtggagaatggactggacccccaggctgccatcccggtcatcaagaagaagctggtgggatccgtgaaggccttgcagaagcagtacgtgtccctggacacggtggtcactagtgaagacggagatgccaacaccatgtgcagcgccctggaggccgtatttatccatggcctgcacgccaagcacatccgagctgaggccggaggaaaaaggaagaaaagtgcccaccagaagcctctgccccagcctgtcttctggcccctcctgaaagctgtcacccacaaacacatcatctcagagttggagcacctgacgtttgtcaacacggatgtgggccgctgccgggcatggctgcggctggccctgaacgatggcctgatggagtgctacctgaagctgctgctgcaggagcaggcccgcttgcatgagtactaccagcccaccgccctgctccgggatgctgaggagggcgagttcctccttagcttcctgcagggcctcacgtccttgtccttcgaactctcctacaagtctgccatcttaaatgagtggacgctcaccccattggccctgtctgggctttgcccgctttctgagctggaccctctctctacctctggtgcagaactacagcggaaggaatctctggattccatttcccattcttcaggctctgaagacatcgaagtccatcactcgggccataagatacggaggaaccagaagctgactgcctcctccctcagcctggacacggccagttcatcccagctgtcctgcagcctaaactctgatagctgcttactccaagagaatggctccaagagtccagaccattgcgaggagcccatgtcctgtgactcagacctgggcacagcaaatgctgaggactcagaccggtctctgcaagaggtattgttggaattcagcaaagcccaggtaaactctgtgccaaccaacggactgagccaagaaacagagatccccacaccacaggcctcgctctccctccatggcctcaacaccagcacatacctgcactgtgaggcacctgcagagccccttcctgcccaggcagcctctggaactcaagatggtgtccacgtgcaggagccgcgtccccaggcgcccagccccctggacttacagcagcctgtagagagcacctcaggccagcagccttctagtactgtcagcgagacagccagagaagtgggccaagggaatggcctgcagaaggcccaggctcatgacggagctggtctgaagctggtagtttcctcacccaccagtccgaaaaacaagagctggatctcagaggatgacttctaccggccttcccgggagcaacccctggagagtgcttcagaccacccaatagcttcttacagggggactccagggtcaaggcctggtctccacaggcatttttctcaagaaccaagaaaaaactgctccctgggggcgttagaccaagcgtgtgtaccttccccaggaagaaggcaagcccaggcagccccatcccaggggcataagagcttccgggtggtacaccggagacagatgggactgtccaacccattccggggtctcatgaagctgggcaccgtggagcggcggggggcaatgggcatctggaaggagctcttctgcgagctctccccgctggagttccgcctctacctgagcaacgaggagcacacctgtgtggagaactgctcgctgcttcgctgtgagtctgtggggccagcccatagtgatgggcgctttgagctggtcttctctggcaagaagctggccctgcgcgcctcctcccaggacgaagctgaggactggctggaccgggtgcgggaggccctgcagaaggtccggcctcagcaggaggatgagtgggtgaacgtgcagtacccagaccagcctgaggaaccccccgaggcgccccagggctgcctctctccctcagacctgctctcggagcccgcggccctccagggcacacagtttgactggtcgtccgcccaggttccagagccagatgccatcaaggagtccctgctgtacttgtacatggacaggacctggatgccctatatattttctctgtccttggaggctctgaaatgtttccgcatcaggaacaatgagaagatgctgagtgacagccacggcgtggagaccatccgggacatcctgccagacaccagccttgggggcccatccttcttcaaaatcatcacggccaaggctgtcctgaagctgcaggccggaaacgccgaggaagccgccctgtggagggatctggtccgcaaagtcctggcatcctacttggagacagccgaggaggcggtgaccctgggcgggagcctggatgaaaactgtcaggaggtgctgaaatttgccacccgggagaatggcttcctgctgcagtacctggtggctatccccatggagaaaggccttgactcccaaggctgcttctgcgcaggctgctcccggcagatcggcttctcctttgtacgacccaagctctgtgccttctctggcctctattactgtgacatctgccaccaagacgatgcctcagtgattccggccaggatcatccacaactgggacctcaccaagcgcccgatctgcaggcaggccctgaagtttctgacacagatccgggcccagcccctcatcaacctgcagatggtgaacgcgtctctgtacgagcatgtggagcggatgcacctcattgggaggagacgggagcagctgaagctcctgggggattacctgggcctgtgccggagtggcgccctgaaggagctcagcaagaggctcaaccacaggaattatctcttggaatctccgcataggttcagtgttgctgacctccaacagatcgcagacggggtgtatgaaggattcctcaaggccctgattgaatttgcctcccagcatgtctaccactgcgacctgtgcacccagcgcggcttcatctgccagatctgccagcaccacgacatcatcttcccctttgagtttgacaccacagtcaggtgtgccgagtgcaagaccgtcttccaccagagctgccaggctgtggtgaagaagggctgcccccgctgtgcccgccggcgcaagtaccaggaacagaacattttcgcctgatgcccatctgctgaccccgctctgaaagccgggggtgagtgtggctcagccatcccggctgggtttgccatcagcccaggatactcaccgtgtcacagctgtgtccccctgaggagtctttgcaatgtattgaaggaattgctgccgtgtgagttttgaatgattttgcagtaaagacctgatctttctca

SEQ ID NO: 291537 - DNA, 2188 bp, Homo sapiens
gggccgagagaccgcatcgtcggctcggaggctgaggggctgccgcggccgggagcgcccctcgcctcgctcctcgctccgcttggtgtcatgtgattctctgagggagcagctgcgtgagtggagatgctttcagtggtggagaatggactggacccccaggctgccatcccggtcatcaagaagaagctggtgggatccgtgaaggccttgcagaagcagtacgtgtccctggacacggtggtcactagtgaagacggagatgccaacaccatgtgcagcgccctggaggccgtatttatccatggcctgcacgccaagcacatccgagctgaggccggaggaaaaaggaagaaaagtgcccaccagaagcctctgccccagcctgtcttctggcccctcctgaaagctgtcacccacaaacacatcatctcagagttggagcacctgacgtttgtcaacacggatgtgggccgctgccgggcatggctgcggctggccctgaacgatggcctgatggagtgctacctgaagctgctgctgcaggagcaggcccgcttgcatgagtactaccagcccaccgccctgctccgggatgctgaggagggcgagttcctccttagcttcctgcagggcctcacgtccttgtccttcgaactctcctacaagtctgccatcttaaatgagtggacgctcaccccattggccctgtctgggctttgcccgctttctgagctggaccctctctctacctctggtgcagaactacagcggaaggaatctctggattccatttcccattcttcaggctctgaagacatcgaagtccatcactcgggccataagatacggaggaaccagaagctgactgcctcctccctcagcctggacacggccagttcatcccagctgtcctgcagcctaaactctgatagctgcttactccaagagaatggctccaagagtccagaccattgcgaggagcccatgtcctgtgactcagacctgggcacagcaaatgctgaggactcagaccggtctctgcaagaggtattgttggaattcagcaaagcccaggtaaactctgtgccaaccaacggactgagccaagaaacagagatccccacaccacaggcctcgctctccctccatggcctcaacaccagcacatacctgcactgtgaggcacctgcagagccccttcctgcccaggcagcctctggaactcaagatggtgtccacgtgcaggagccgcgtccccaggcgcccagccccctggacttacagcagcctgtagagagcacctcaggccagcagccttctagtactgtcagcgagacagccagagaagtgggccaagggaatggcctgcagaaggcccaggctcatgacggagctggtctgaagctggtagtttcctcacccaccagtccgaaaaacaagagctggatctcagaggatgacttctaccggccttcccgggagcaacccctggagagtgcttcagaccacccaatagcttcttacagggggactccagggtcaaggcctggtctccacaggcatttttctcaagaaccaagaaaaaactgctccctgggggcgttagaccaagcgtgtgtaccttccccaggaagaaggcaagcccaggcagccccatcccaggggcataagagcttccgggtggtacaccggagacagatgggtaggttaccaggagggtcccgggtgggtcccatctgcagggaccaggcctttcagaaggcagctgtgaagttctgttttccattgctaaaggggtagtgtgttcccacaagtgttataaaacctcattccagaatgccatcataatcatgttcattcagggaagcatttcaggaaaagtagtatattgtctcaaaactgcctacagaggacaaaaatactgtttcaccagtcaaataggaaaatattttccctgaaaactatgcaatttatgattatagaaaactcttgattccacctgtagctcagagcacatccggccccatgaagccccaggtgttttaaatggtccttccaaacgtgtttaccctcagtagttggtttatgtaacagctctgggtggcttgatcaaatctgctatttgttttgtttgtttgtttgttttgagatggagtctgggcaacaagagcgaaaccccacctca

SEQ ID NO: 291538 - DNA, 1677 bp, Homo sapiens
gggccgagagaccgcatcgtcggctcggaggctgaggggctgccgcggccgggagcgcccctcgcctcgctcctcgctccgcttggtgtcatgtgattctctgagggagcagctgcgtgagtggagatgctttcagtggtggagaatggactggacccccaggctgccatcccggtcatcaagaagaagctggtgggatccgtgaaggccttgcagaagcagtacgtgtccctggacacggtggtcactagtgaagacggagatgccaacaccatgtgcagcgccctggaggccgtatttatccatggcctgcacgccaagcacatccgagctgaggccggaggaaaaaggaagaaaagtgcccaccagaagcctctgccccagcctgtcttctggcccctcctgaaagctgtcacccacaaacacatcatctcagagttggagcacctgacgtttgtcaacacggatgtgggccgctgccgggcatggctgcggctggccctgaacgatggcctgatggagtgctacctgaagctgctgctgcaggagcaggcccgcttgcatgagtactaccagcccaccgccctgctccgggatgctgaggagggcgagttcctccttagcttcctgcagggcctcacgtccttgtccttcgaactctcctacaagtctgccatcttaaatgagtggacgctcaccccattggccctgtctgggctttgcccgctttctgagctggaccctctctctacctctggtgcagaactacagcggaaggaatctctggattccatttcccattcttcaggctctgaagacatcgaagtccatcactcgggccataagatacggaggaaccagaagctgactgcctcctccctcagcctggacacggccagttcatcccagctgtcctgcagcctaaactctgatagctgcttactccaagagaatggctccaagagtccagaccattgcgaggagcccatgtcctgtgactcagacctgggcacagcaaatgctgaggactcagaccggtctctgcaagaggtattgttggaattcagcaaagcccaggtaaactctgtgccaaccaacggactgagccaagaaacagagatccccacaccacaggcctcgctctccctccatggcctcaacaccagcacatacctgcactgtgaggcacctgcagagccccttcctgcccaggcagcctctggaactcaagatggtgtccacgtgcaggagccgcgtccccaggcgcccagccccctggacttacagcagcctgtagagagcacctcaggccagcagccttctagtactgtcagcgagacagccagagaagtgggccaagggaatggcctgcagaaggcccaggctcatgacggagctggtctgaagctggtagtttcctcacccaccagtccggtgagtggtgcaagccgttcagggggcagtcttgggaaatgtcagctgacacagggtttccccagctagtgaccctgagtggtctctgccttttccctgttagccttcctctccctgcatagtgatagtgttaatagcatcatgatgatggggctcatgtttcttggcatgtgagctgtagatataagcccggctgtttcttggcatgtgagctgtagatataagcccggcactgtgctgatc

SEQ ID NO: 291539 - DNA, 1767 bp, Homo sapiens
gggccgagagaccgcatcgtcggctcggaggctgaggggctgccgcggccgggagcgcccctcgcctcgctcctcgctccgcttggtgtcatgtgattctctgagggagcagctgcgtgagtggagatgctttcagtggtggagaatggactggacccccaggctgccatcccggtcatcaagaagaagctggtgggatccgtgaaggccttgcagaagcagtacgtgtccctggacacggtggtcactagtgaagacggagatgccaacaccatgtgcagcgccctggaggccgtatttatccatggcctgcacgccaagcacatccgagctgaggccggaggaaaaaggaagaaaagtgcccaccagaagcctctgccccagcctgtcttctggcccctcctgaaagctgtcacccacaagtgagatttagctggagaggttttgctttgcggaggagcagcagactatgggacacttggcttttcctccccagctgttcaggaagccaacagaggtgccctgtgttctagcatagagagagggtgaggtaggggttgaaagtgtcttctagaaaggcttatctctagaccaagcttcccagccagtgtgccagcagatcttgagaccctcagcactcaggcaagagcctgtggctgctttgagactggtcacaaaaagcaggtgagactggccacctttagcaggaacagccttttttgccacactggggcagagttacatagttacaacagaggttgtgtggcctgcaaagcctgaagaatatactatctggccctttacagaagggctgaccctgccttggatttgctgaccctgccttagattattcaaacatccgaattgtaaatctttttttttttttttgggatggagtttcgctctgtcactcaggctggagtgcaatggcgcgatctcggttcactggcacctctgcttcccaggttcaagcaattctcctgcctcagcctcctgagtaactgggacaacaggcgcgcaccatcacgcccagctaatttttgtatttttagtagagaggggttttgctatgttggtcaggctgctctcaaactcctgaccttgtgatctgcctacctccgcctcccaaagtgctgggattatataaagagtggaatcaggaaaagcatatgaatattcaccctgagacacttatctctttggcccctaactgtctgggcttttgagcaagtagctggcactgtgcctctgaggactactaaatgccaccttcagcccaaaagaagccttgtcagtctctaatcttcctttccatgcagattgccactgccttgtctcacgttcttctttcctgggtgacactggctttctatttgtcccccttatctcactctgtctttccttgagtccatcatctggtcaacatttactgagctgaagctccctggagcttactcactgagcctagtagagtgcggtctacattcccatggaggagataaacctgcgctagggactgtggtagctcagaggggcatgtacatcagacggaggcattctgggactgagtttggtacacctggggtctgatctccttatgcagaacatctaccctgcagtctgcatgactgtggtcaagtcacttttctaaacaaaaatctgtagcctacaggctcccagatgctagcctggagactgattcactaggttggggtcccagaacttgtatcctgctcaagttccccagggggttctggtgcacagctg

SEQ ID NO: 291540 - DNA, 505 bp, Homo sapiens
gctctgtgccttctctggcctctattactgtgacatctgccaccaagacgatgcctcagtgattccggccaggatcatccacaactgggacctcaccaagcgcccggtaagtctcaagcccagcagcccagctgctgagggacagaggggtgttcactcctctttgctgctgctgttcatctgtttagaggagtttggctcctctaaacaagggaagccagggtcactggttcaggcactgtgatgttggggagctaaccaagagaaaagcttggtgcctgtccacagccttgggcagggctctatcggtggctgtcttggtccccaggaggaaagagtttgaggatggtttcttgcagctacaaacataactgcttaaggcaccagcagataaatgatagatagatagataaaatagatttgatagattagatagatggatggtggatggtcaggtaggtaggtggatgagcaggtggctaggtggatggttagggggctgggc

SEQ ID NO: 291541 - DNA, 340 bp, Homo sapiens
actgttcctagtgagcagggctctggccctgaggagtctttgcaatgtattgaaggaattgctgccgtgtgagttttgaatgattttgcagtaaagacctgatctttctcacactggtctggcttctgaattctaacactgccacggccaggggggagaccaccagccatctgttaccatctgtcagggtcccctaccctcatgttagtccctggcacgggggaaggcttgggaggtccgtggcaaacacttgtaggcagagggcttgcatgccaggagtgggcagggagaagagagtaagaaaaccaccttgccaagcccagcagtcaggctcttcctg

SEQ ID NO: 291542 - DNA, 324 bp, Homo sapiens
gctgcttactccaagagaatggctccaagagtccagaccattgcgaggagcccatgtcctgtgactcagacctgggcacagcaaatgctgaggactcagaccggtctctgcaagagtgagtacgctgcccccactccttcccatcttctctcttccctcctttctttcctctcctcctccctttcttcccatagcatgtgattgtctgttactgaactctattagtaattaaagaaagccaagggagtcatcgacttctccagggactggagtagctgggaactgtagcaggcaatacaggcatagtggagaaagtggacttag

SEQ ID NO: 291543 - DNA, 887 bp, Homo sapiens
acaaagaagggaaatgactacagaactcggaagtgaggtacagaaacagctggattggttacaggaaaaacaacgtaggagagtgacacagcagggatctcgctgataaaggacctgcatctgaatccagctcctccatccatgggccatgtgtcctggttgctgagacatctggagagccttgtacctcatcaaaagaagagagacagtaatccttgcctttctttcctcctaaggttgttaacgaggcttaaatgagagaacaaggatgaaagtattttgtaaactctaatgccctgtgtataaagcagagaataatagcatctgtggtgttagaaaatgcctggaactttgtaaagatgttgtttgattcaacattactggagtaaaccacaccattagacagaatgaaagactccaccgcagagagagagactgatttttataacaactgaatttattatagcataaactaaatacaaagctctgaataaataatcgtttttttcagtcatcacatctgcaggtgtgtatgtgaacatttccataagcacataaggatacagatgtcacagacatatttagtgagggaagcccagagtcacggttctctgtgggtaagagctagatgccttgagatgaacatacagggcaccgtctcaaatgatttggactatgtgactgtgttcgtttctccttcagactctgctcaagaaagtgtattgataacaggttgctccgccctcaagtttagggcactctcccacgctctttcatgcaaagttttttaacacctctctttaagaaaattcacaaatcagaagtattaccccagcttcaatctgacaatcaggacccctactctgcccctctttcctaggatctta

SEQ ID NO: 291544 - DNA, 2045 bp, Homo sapiens
ccctatccggacaggtggctcttgccctttagactacagttcccagcatgcccaggcgattgcgtcccagaaccgacgtcccaccgccttcccacatcggatcgcagggctcccaaaatggcgagtgaggctgcggggactcgctgagcagcggagggggagcgtgcagagccgctgcggccctcacagtccggagcccggccgtgccgtgccgtagggaacatgcacttttccattcccgaaaccgagtcccgcagcggggacagcggcggctccgcctacgtggcctataacattcacgtgaatggagtcctgcactgtcgggtgcgctacagccagctcctggggctgcacgagcagcttcggaaggagtatggggccaatgtgcttcctgcattccccccaaagaagcttttctctctgactcctgctgaggtagaacagaggagagagcagttagagaagtacatgcaagctgttcggcaagacccattgcttgggagcagcgagactttcaacagtttcctgcgtcgggcacaacaggagacacagcaggtccccacagaggaagtgtccttggaagtgctgctcagcaacgggcagaaagttctggtcaacgtgctaacttcagatcagactgaggatgtcctggaggctgtagctgcaaagctggatcttccagatgacttgattggatactttagtctattcttagttcgagaaaaagaggatggagccttttcttttgtacggaagttgcaagagtttgagctgccttatgtgtctgtcaccagccttcggagtcaagagtataagattgtgctaaggaagagttattgggactctgcctatgatgacgatgtcatggagaaccgggttggcctgaacctgctttatgctcagacggtatcagatattgagcgtgggtggatcttggtcaccaaggaacagcaccggcaactcaaatctctgcaagagaaagtctccaagaaggagttcctgagactggcccagacgctgcggcactatggctacttgcgctttgatgcctgtgtggctgacttcccagaaaaggactgtcctgtggtggtgagcgcgggcaacagtgagctcagcctgcagctccgcctgcctggccagcaactccgagaaggctccttccgggtcacccgcatgcgatgctggcgggtcacctcctctgtaccattgcccagtggaagcacgagcagcccaggccggggccggggtgaggtgcgcctggaactggcttttgaatacctcatgagcaaggaccggctacagtgggtcaccatcactagcccccaggctatcatgatgagcatctgcttgcagtccatggttgatgaactgatggtgaagaaatctggcggcagtatcaggaagatgctgcgccggcgggtggggggtactctgagacgctcagacagccagcaagcagtgaagtccccaccactgcttgagtcacctgatgccacccgggagtctatggtcaaactctcaagtaagctgagtgccgtgagcttgcggggaattggcagtcccagcacagatgccagtgccagtgatgtccacggcaatttcgccttcgagggcattggagatgaggatctgtaatctccactgcttggatgtctgccctctaccccagaggaatttacagaaacttgccctgtgcctgtgtcccccatgctaggggcggaggggtcttttccttcttctttcctacctaccccttttctcttggccaggggcctcgtatcctacctttccttgtcccctgggctggctgcacagaggattgccccttctcttttcagagctggccctcgatgccaaattagcatttagtattttgcacaaagtctaagggaccatggctgcctgccttggggaggaaccatatctccctctgggccgcttctggcctcttggagccatgggccaaaggccaaggggatgggcagaggtctgtgtttggtctggcccagttccccatcattaaactcagcctgactgctgcctac

SEQ ID NO: 291545 - DNA, 879 bp, Homo sapiens
gaggtctgggtggtgaatcggccgaggctcctctgtaccattgcccagtggaagcacgagcagcccaggccggggccggggtgaggtgcgcctggaactggcttttgaatacctcatgagcaaggaccggctacagtgggtcaccatcactagcccccaggctatcatgatgagcatctgcttgcagtccatggttgatgaactgatggtgaagaaatctggcggcagtatcaggaagatgctgcgccggcgggtggggggtactctgagacgctcagacagccagcaagcagtgaagtccccaccactgcttgagtcacctgatgccacccgggagtctatggtcaaactctcaagtaagctgagtgccgtgagcttgcggggaattggcagtcccagcacagatgccagtgccagtgatgtccacggcaatttcgccttcgagggcattggagatgaggatctgtaatctccactgcttggatgtctgccctctaccccagaggaatttacagaaacttgccctgtgcctgtgtcccccatgctaggggcggaggggtcttttccttcttctttcctacctaccccttttctcttggccaggggcctcgtatcctacctttccttgtcccctgggctggctgcacagaggattgccccttctcttttcagagctggccctcgatgccaaattagcatttagtattttgcacaaagtctaagggaccatggctgcctgccttggggaggaaccatatctccctctgggccgcttctggcctcttggagccatgggccaaaggccaaggggatgggcagaggtctgtgtttggtctggcccagttccccatcattaaactcagcctgactgctgcctac

SEQ ID NO: 291546 - DNA, 930 bp, Homo sapiens
gaggtctgggtggtgaatcggccgaggctcctctgtaccattgcccagtggaagcacgagcagcccaggccggggccggggtgaggtgcgcctggaactggcttttgaatacctcatgagcaaggaccggctacagtgggtcaccatcactagcccccaggctatcatgatgagcatctgcttgcagtccatggttgatgaactgatggtgaagaaatctggcggcagtatcaggaagatgctgcgccggcgggtggggggtactctgagacgctcagacagccagcaagcagtgaagtccccaccactgcttgagtcacctgatgccacccgggagtctatggtcaaactctcaagtaagctgagtgccgtgagcttgcggggaattggcagtcccagcacagatgccagtgccagtgatgtccacggcaatttcgccttcgagggcattggagatgaggatctgtaatctccactgcttggatgtctgccctctaccccagaggaatttacagaaacttgccctgtgcctgtgtcccccatgctaggggcggaggggtcttttccttcttctttcctacctaccccttttctcttggccaggggcctcgtatcctacctttccttgtcccctgggctggctgcacagaggattgccccttctcttttcagagctggccctcgatgccaaattagcatttagtattttgcacaaagtctaagggaccatggctgcctgccttggggaggaaccatatctccctctgggccgcttctggcctcttggagccatgggccaaaggccaaggggatgggcagaggtctgtgtttggtctggcccagttccccatcattaaactcagcctgactgctgcctacaaaaaaaaaaaaaaaaaaaaaaaaaaaaaaccatacacacaaaaaaagggg

SEQ ID NO: 291547 - DNA, 929 bp, Homo sapiens
taggtacgaggctcggtgggtgaatcggccggcgagtgaggctgcggggactcgctgagcagcggagggggagcgtgcagagccgctgcggccctcacagtccggagcccggccgtgccgtgccgtagggaacatgcacttttccattcccgaaaccgagtcccgcagcggggacagcggcggctccgcctacgtggcctataacattcacgtgaatggagtcctgcactgtcgggtgcgctacagccagctcctggggctgcacgagcagcttcggaaggagtatggggccaatgtgcttcctgcattccccccaaagaagcttttctctctgactcctgctgaggtagaacagaggagagagcagttagagaagtacatgcaagctgttcggcaagacccattgcttgggagcagcgagactttcaacagtttcctgcgtcgggcacaacaggagacacagcaggtccccacagaggaagtgtccttggaagtgctgctcagcaacgggcagaaagttctggtcaacgtgctaacttcagatcagactgaggatgtcctggaggctgtagctgcaaagctggatcttccagatgacttgattggatactttagtctattcttagttcgagaaaaagaggatggagccttttcttttgtacggaagttgcaagagtttgagctgccttatgtgtctgtcaccagccttcggagtcaagagtataagattgtgctaaggaagaggacgagttatggggactctggctatgatgacgatgtctggggaaccggtgggctggagccggtttatgctccgacggtccgatttgagcgggggggtcttggtgcccggacagccgggaccaattctgggaaaattcaaaggtctaaaggccactgggcaatgatgctatcggggggtcccaagg

SEQ ID NO: 291548 - DNA, 778 bp, Homo sapiens
  misc_feature (38)..(38): n is a, c, g, or t
  misc_feature (40)..(40): n is a, c, g, or t
  misc_feature (706)..(707): n is a, c, g, or t
  misc_feature (710)..(710): n is a, c, g, or t
agcgagaggaacttaaggctaggtacgaggctgggtgntngggcgagtgaggctgcggggactcgctgagcagcggagggggagcgtgcagagccgctgcggccctcacagtccggagcccggccgtgccgtgccgtagggaacatgcacttttccattcccgaaaccgagtcccgcagcggggacagcggcggctccgcctacgtggcctataacattcacgtgaatggagtcctgcactgtcgggtgcgctacagccagctcctggggctgcacgagcagcttcggaaggagtatggggccaatgtgcttcctgcattccccccaaagaagcttttctctctgactcctgctgaggtagaacagaggagagagcagttagagaagtacatgcaagctgttcggcaagacccattgcttgggagcagcgagactttcaacagtttcctgcgtcgggcacaacaggagacacagcaggtccccacagaggaagtgtccttggaagtgctgctcagcaacgggcagaaagttctggtcaacgtgctaacttcagatcagactgaggatgtcctggaggctgtagctgcaaagctggatcttccagatgacttgattggatactttagtctattcttagttcgagaaaaagaggatggagccttttcttttgtacggagtgcagagttgagctgctatggttgcaccnnctncgggtcagagttagaaggggcaggaagttgggcccgcctgaaacagtctgggaccgggggccgaccgt

SEQ ID NO: 291549 - DNA, 2910 bp, Homo sapiens
ccctatccggacaggtggctcttgccctttagactacagttcccagcatgcccaggcgattgcgtcccagaaccgacgtcccaccgccttcccacatcggatcgcagggctcccaaaatggcgagtgaggctgcggggactcgctgagcagcggagggggagcgtgcagagccgctgcggccctcacagtccggagcccggccgtgccgtgccgtagggaacatgcacttttccattcccgaaaccgagtcccgcagcggggacagcggcggctccgcctacgtggcctataacattcacgtgaatggagtcctgcactgtcgggtgcgctacagccagctcctggggctgcacgagcagcttcggaaggagtatggggccaatgtgcttcctgcattccccccaaagaagcttttctctctgactcctgctgaggtagaacagaggagagagcagttagagaagtacatgcaagctgttcggcaagacccattgcttgggagcagcgagactttcaacagtttcctgcgtcgggcacaacaggagacacagcaggtccccacagaggaagtgtccttggaagtgctgctcagcaacgggcagaaagttctggtcaacgtgctaacttcagatcagactgaggatgtcctggaggctgtagctgcaaagctggatcttccagatgacttgattggatactttagtctattcttagttcgagaaaaagaggatggagccttttcttttgtacggaagttgcaagagtttgagctgccttatgtgtctgtcaccagccttcggagtcaagagtataagattgtgctaaggaagagttattgggactctgcctatgatgacgatgtcatggagaaccgggttggcctgaacctgctttatgctcagacggtatcagatattgagcgtgggtggatcttggtcaccaaggaacagcaccggcaactcaaatctctgcaagagaaagtctccaagaaggagttcctgagactggcccagacgctgcggcactatggctacttgcgctttgatgcctgtgtggctgacttcccagaaaaggactgtcctgtggtggtgagcgcgggcaacagtgagctcagcctgcagctccgcctgcctggccagcaactccgagaaggctccttccgggtcacccgcatgcgatgctggcgggtcacctcctctgtaccattgcccagtggaagcacgagcagcccaggccggggccggggtgaggtgcgcctggaactggcttttgaatacctcatgagcaaggaccggctacagtgggtcaccatcactagcccccaggctatcatgatgagcatctgcttgcagtccatggttgatgaactgatggtgaagaaatctggcggcagtatcaggaagatgctgcgccggcgggtggggggtactctgagacgctcagacagccagcaagcagtgaagtccccaccactgcttgagtcacctgatgccacccgggagtctatggtcaaactctcaagtaagctgagtgccgtgagcttgcggggaattggcagtcccagcacagatgccagtgccagtgatgtccacggcaatttcgccttcgagggcattggagatgaggatctgtaatctccactgcttggatgtctgccctctaccccagaggaatttacagaaacttgccctgtgcctgtgtcccccatgctaggggcggaggggtcttttccttcttctttcctacctaccccttttctcttggccaggggcctcgtatcctacctttccttgtcccctgggctggctgcacagaggattgccccttctcttttcagagctggccctcgatgccaaattagcatttagtattttgcacaaagtctaagggaccatggctgcctgccttggggaggaaccatatctccctctgggccgcttctggcctcttggagccatgggccaaaggccaaggggatgggcagaggtctgtgtttggtctggcccagttccccatcattaaactcagcctgactgctgcctacctctggttccctctcactgcccctgcttcccccatcacagcatggactactatgctaagggtaaggccaaattgcctgccattgccaattcagcatagacatggctttgttagtgtttcctttattataaagcactgaaataagttaaataaacaggtgggaggctgggcagtcccccagccggtttgtccacagcccctgggggcagtggaggtgaatacagggcccttctcactgagctcgtgaagtgcctcagtcaaggcaaggtcccctggtccatatgggcccccccgcccatggggttgggctggtccttatagtgcctacgttagtctgtgtggagcccctggccagcgggggagaaaaaggtggcttctggtccgtctgtataaaacatggggaagaaggacctagttcaggatgagtctgtgtggacagcccggctgccagcagtccccagggctggtgggccccgagagctcaaaacagagggtgggctatgaggtggggcccagccctcagaggcagagagaccaggccctcctgccccaccgtggccatgcaccttctggtggcgcttgtagttgtcccagtggcccgtggtataggcgcaggtggcacagcggaagggcttctcgcctgtgtgccgcagcatgtgacgtttgaggttcatgctctggttgcagctgtagttgcaaaggctacaccgaaaaggtttgtcaccagagtggatgcgaccatgacgcttgaggttggccagattgccacaggcataagggcagagggggcacttgtagggcttctctcctgtatggacgcgccatcgtgccgtttcaggttatccagatgagcagaggcataagga

SEQ ID NO: 291550 - DNA, 2096 bp, Homo sapiens
ccctatccggacaggtggctcttgccctttagactacagttcccagcatgcccaggcgattgcgtcccagaaccgacgtcccaccgccttcccacatcggatcgcagggctcccaaaatggcgagtgaggctgcggggactcgctgagcagcggagggggagcgtgcagagccgctgcggccctcacagtccggagcccggccgtgccgtgccgtagggaacatgcacttttccattcccgaaaccgagtcccgcagcggggacagcggcggctccgcctacgtggcctataacattcacgtgaatggagtcctgcactgtcgggtgcgctacagccagctcctggggctgcacgagcagcttcggaaggagtatggggccaatgtgcttcctgcattccccccaaagaagcttttctctctgactcctgctgaggtagaacagaggagagagcagttagagaagtacatgcaagctgttcggcaagacccattgcttgggagcagcgagactttcaacagtttcctgcgtcgggcacaacaggagacacagcaggtccccacagaggaagtgtccttggaagtgctgctcagcaacgggcagaaagttctggtcaacgtgctaacttcagatcagactgaggatgtcctggaggctgtagctgcaaagctggatcttccagatgacttgattggatactttagtctattcttagttcgagaaaaagaggatggagccttttcttttgtacggaagttgcaagagtttgagctgccttatgtgtctgtcaccagccttcggagtcaagagtataagattgtgctaaggaagagttattgggactctgcctatgatgacgatgtcatggagaaccgggttggcctgaacctgctttatgctcagacggtatcagatattgagcgtgggtggatcttggtcaccaaggaacagcaccggcaactcaaatctctgcaagagaaagtctccaagaaggagttcctgagactggcccagacgctgcggcactatggctacttgcgctttgatgcctgtgtggctgacttcccagaaaaggactgtcctgtggtggtgagcgcgggcaacagtgagctcagcctgcagctccgcctgcctggccagcaactccgagaaggctccttccgggtcacccgcatgcgatgctggcgggtcacctcctctgtaccattgcccagtggaagcacgagcagcccaggccggggccggggtgaggtgcgcctggaactggcttttgaatacctcatgagcaaggaccggctacagtgggtcaccatcactagcccccaggctatcatgatgagcatctgcttgcagtccatggttgatgaactgatggtgaagaaatctggcggcagtatcaggaagatgctgcgccggcgggtggggggtactctgagacgctcagacagccagcaagcagtgaagtccccaccactgcttgagtcacctgatgccacccgggagtctatggtcaaactctcaagtaagctgagtgccgtgagcttgcggggaattggcagtcccagcacagatgccagtgccagtgatgtccacggcaatttcgccttcgagggcattggagatgaggatctgtaatctccactgcttggatgtctgccctctaccccagaggaatttacagaaacttgccctgtgcctgtgtcccccatgctaggggcggaggggtcttttccttcttctttcctacctaccccttttctcttggccaggggcctcgtatcctacctttccttgtcccctgggctggctgcacagaggattgccccttctcttttcagagctggccctcgatgccaaattagcatttagtattttgcacaaagtctaagggaccatggctgcctgccttggggaggaaccatatctccctctgggccgcttctggcctcttggagccatgggccaaaggccaaggggatgggcagaggtctgtgtttggtctggcccagttccccatcattaaactcagcctgactgctgcctacaaaaaaaaaaaaaaaaaaaaaaaaaaaaaaccatacacacaaaaaaagggg

SEQ ID NO: 291551 - DNA, 1967 bp, Homo sapiens
  misc_feature (38)..(38): n is a, c, g, or t
  misc_feature (40)..(40): n is a, c, g, or t
agcgagaggaacttaaggctaggtacgaggctgggtgntngggcgagtgaggctgcggggactcgctgagcagcggagggggagcgtgcagagccgctgcggccctcacagtccggagcccggccgtgccgtgccgtagggaacatgcacttttccattcccgaaaccgagtcccgcagcggggacagcggcggctccgcctacgtggcctataacattcacgtgaatggagtcctgcactgtcgggtgcgctacagccagctcctggggctgcacgagcagcttcggaaggagtatggggccaatgtgcttcctgcattccccccaaagaagcttttctctctgactcctgctgaggtagaacagaggagagagcagttagagaagtacatgcaagctgttcggcaagacccattgcttgggagcagcgagactttcaacagtttcctgcgtcgggcacaacaggagacacagcaggtccccacagaggaagtgtccttggaagtgctgctcagcaacgggcagaaagttctggtcaacgtgctaacttcagatcagactgaggatgtcctggaggctgtagctgcaaagctggatcttccagatgacttgattggatactttagtctattcttagttcgagaaaaagaggatggagccttttcttttgtacggaagttgcaagagtttgagctgccttatgtgtctgtcaccagccttcggagtcaagagtataagattgtgctaaggaagagttattgggactctgcctatgatgacgatgtcatggagaaccgggttggcctgaacctgctttatgctcagacggtatcagatattgagcgtgggtggatcttggtcaccaaggaacagcaccggcaactcaaatctctgcaagagaaagtctccaagaaggagttcctgagactggcccagacgctgcggcactatggctacttgcgctttgatgcctgtgtggctgacttcccagaaaaggactgtcctgtggtggtgagcgcgggcaacagtgagctcagcctgcagctccgcctgcctggccagcaactccgagaaggctccttccgggtcacccgcatgcgatgctggcgggtcacctcctctgtaccattgcccagtggaagcacgagcagcccaggccggggccggggtgaggtgcgcctggaactggcttttgaatacctcatgagcaaggaccggctacagtgggtcaccatcactagcccccaggctatcatgatgagcatctgcttgcagtccatggttgatgaactgatggtgaagaaatctggcggcagtatcaggaagatgctgcgccggcgggtggggggtactctgagacgctcagacagccagcaagcagtgaagtccccaccactgcttgagtcacctgatgccacccgggagtctatggtcaaactctcaagtaagctgagtgccgtgagcttgcggggaattggcagtcccagcacagatgccagtgccagtgatgtccacggcaatttcgccttcgagggcattggagatgaggatctgtaatctccactgcttggatgtctgccctctaccccagaggaatttacagaaacttgccctgtgcctgtgtcccccatgctaggggcggaggggtcttttccttcttctttcctacctaccccttttctcttggccaggggcctcgtatcctacctttccttgtcccctgggctggctgcacagaggattgccccttctcttttcagagctggccctcgatgccaaattagcatttagtattttgcacaaagtctaagggaccatggctgcctgccttggggaggaaccatatctccctctgggccgcttctggcctcttggagccatgggccaaaggccaaggggatgggcagaggtctgtgtttggtctggcccagttccccatcattaaactcagcctgactgctgcctac

SEQ ID NO: 291552 - DNA, 1948 bp, Homo sapiens
aaaaaaaaaaaaaaaaaaaaaaggcgagtgaggctgcggggactcgctgagcagcggagggggagcgtgcagagccgctgcggccctcacagtccggagcccggccgtgccgtgccgtagggaacatgcacttttccattcccgaaaccgagtcccgcagcggggacagcggcggctccgcctacgtggcctataacattcacgtgaatggagtcctgcactgtcgggtgcgctacagccagctcctggggctgcacgagcagcttcggaaggagtatggggccaatgtgcttcctgcattccccccaaagaagcttttctctctgactcctgctgaggtagaacagaggagagagcagttagagaagtacatgcaagctgttcggcaagacccattgcttgggagcagcgagactttcaacagtttcctgcgtcgggcacaacaggagacacagcaggtccccacagaggaagtgtccttggaagtgctgctcagcaacgggcagaaagttctggtcaacgtgctaacttcagatcagactgaggatgtcctggaggctgtagctgcaaagctggatcttccagatgacttgattggatactttagtctattcttagttcgagaaaaagaggatggagccttttcttttgtacggaagttgcaagagtttgagctgccttatgtgtctgtcaccagccttcggagtcaagagtataagattgtgctaaggaagagttattgggactctgcctatgatgacgatgtcatggagaaccgggttggcctgaacctgctttatgctcagacggtatcagatattgagcgtgggtggatcttggtcaccaaggaacagcaccggcaactcaaatctctgcaagagaaagtctccaagaaggagttcctgagactggcccagacgctgcggcactatggctacttgcgctttgatgcctgtgtggctgacttcccagaaaaggactgtcctgtggtggtgagcgcgggcaacagtgagctcagcctgcagctccgcctgcctggccagcaactccgagaaggctccttccgggtcacccgcatgcgatgctggcgggtcacctcctctgtaccattgcccagtggaagcacgagcagcccaggccggggccggggtgaggtgcgcctggaactggcttttgaatacctcatgagcaaggaccggctacagtgggtcaccatcactagcccccaggctatcatgatgagcatctgcttgcagtccatggttgatgaactgatggtgaagaaatctggcggcagtatcaggaagatgctgcgccggcgggtggggggtactctgagacgctcagacagccagcaagcagtgaagtccccaccactgcttgagtcacctgatgccacccgggagtctatggtcaaactctcaagtaagctgagtgccgtgagcttgcggggaattggcagtcccagcacagatgccagtgccagtgatgtccacggcaatttcgccttcgagggcattggagatgaggatctgtaatctccactgcttggatgtctgccctctaccccagaggaatttacagaaacttgccctgtgcctgtgtcccccatgctaggggcggaggggtcttttccttcttctttcctacctaccccttttctcttggccaggggcctcgtatcctacctttccttgtcccctgggctggctgcacagaggattgccccttctcttttcagagctggccctcgatgccaaattagcatttagtattttgcacaaagtctaagggaccatggctgcctgccttggggaggaaccatatctccctctgggccgcttctggcctcttggagccatgggccaaaggccaaggggatgggcagaggtctgtgtttggtctggcccagttccccatcattaaactcagcctgactgctgcctac

SEQ ID NO: 291553 - DNA, 1991 bp, Homo sapiens
ccctatccggacaggtggctcttgccctttagactacagttcccagcatgcccaggcgattgcgtcccagaaccgacgtcccaccgccttcccacatcggatcgcagggctcccaaaatggcgagtgaggctgcggggactcgctgagcagcggagggggagcgtgcagagccgctgcggccctcacagtccggagcccggccgtgccgtgccgtagggaacatgcacttttccattcccgaaaccgagtcccgcagcggggacagcggcggctccgcctacgtggcctataacattcacgtgaatggagtcctgcactgtcgggtgcgctacagccagctcctggggctgcacgagcagcttcggaaggagtatggggccaatgtgcttcctgcattccccccaaagaagcttttctctctgactcctgctgaggtagaacagaggagagagcagttagagaagtacatgcaagctgttcggcaagacccattgcttgggagcagcgagactttcaacagtttcctgcgtcgggcacaacaggagacacagcaggtccccacagaggaagtgtccttggaagtgctgctcagcaacgggcagaaagttctggtcaacgtgctaacttcagatcagactgaggatgtcctggaggctgtagctgcaaagctggatcttccagatgacttgattggatactttagtctattcttagttcgagaaaaagaggatggagccttttcttttgtacggaagttgcaagagtttgagctgccttatgtgtctgtcaccagccttcggagtcaagagtataagattgtgctaaggaagagttattgggactctgcctatgatgacgatgtcatggagaaccgggttggcctgaacctgctttatgctcagacggtatcagatattgagcgtgggtggatcttggtcaccaaggaacagcaccggcaactcaaatctctgcaagagaaagtctccaagaaggagttcctgagactggcccagacgctgcggcactatggctacttgcgctttgatgcctgtgtggctgacttcccagtccgcctgcctggccagcaactccgagaaggctccttccgggtcacccgcatgcgatgctggcgggtcacctcctctgtaccattgcccagtggaagcacgagcagcccaggccggggccggggtgaggtgcgcctggaactggcttttgaatacctcatgagcaaggaccggctacagtgggtcaccatcactagcccccaggctatcatgatgagcatctgcttgcagtccatggttgatgaactgatggtgaagaaatctggcggcagtatcaggaagatgctgcgccggcgggtggggggtactctgagacgctcagacagccagcaagcagtgaagtccccaccactgcttgagtcacctgatgccacccgggagtctatggtcaaactctcaagtaagctgagtgccgtgagcttgcggggaattggcagtcccagcacagatgccagtgccagtgatgtccacggcaatttcgccttcgagggcattggagatgaggatctgtaatctccactgcttggatgtctgccctctaccccagaggaatttacagaaacttgccctgtgcctgtgtcccccatgctaggggcggaggggtcttttccttcttctttcctacctaccccttttctcttggccaggggcctcgtatcctacctttccttgtcccctgggctggctgcacagaggattgccccttctcttttcagagctggccctcgatgccaaattagcatttagtattttgcacaaagtctaagggaccatggctgcctgccttggggaggaaccatatctccctctgggccgcttctggcctcttggagccatgggccaaaggccaaggggatgggcagaggtctgtgtttggtctggcccagttccccatcattaaactcagcctgactgctgcctac

SEQ ID NO: 291554 - DNA, 1843 bp, Homo sapiens
ccctatccggacaggtggctcttgccctttagactacagttcccagcatgcccaggcgattgcgtcccagaaccgacgtcccaccgccttcccacatcggatcgcagggctcccaaaatggcgagtgaggctgcggggactcgctgagcagcggagggggagcgtgcagagccgctgcggccctcacagtccggagcccggccgtgccgtgccgtagggaacatgcacttttccattcccgaaaccgagtcccgcagcggggacagcggcggctccgcctacgtggcctataacattcacgtgaatggagtcctgcactgtcgggtgcgctacagccagctcctggggctgcacgagcagcttcggaaggagtatggggccaatgtgcttcctgcattccccccaaagaagcttttctctctgactcctgctgaggtagaacagaggagagagcagttagagaagtacatgcaagctgttcggcaagacccattgcttgggagcagcgagactttcaacagtttcctgcgtcgggcacaacaggagacacagcaggtccccacagaggaagtgtccttggaagtgctgctcagcaacgggcagaaagttctggtcaacgtgctaacttcagatcagactgaggatgtcctggaggctgtagctgcaaagctggatcttccagatgacttgattggatactttagtctattcttagttcgagaaaaagaggatggagccttttcttttgtacggaagttgcaagagtttgagctgccttatgtgtctgtcaccagccttcggagtcaagagtataagattgtgctaaggaagagttattgggactctgcctatgatgacgatgtcatggagaaccgggttggcctgaacctgctttatgctcagacggtatcagatattgagcgtgggtggatcttggtcaccaaggaacagcaccggcaactcaaatctctgcaagagaaagtctccaagaaggagttcctgagactggcccagacgctgcggcactatggctacttgcgctttgatgcctgtgtggctgacttcccagaaaaggactgtcctgtggtggtgagcgcgggcaacagtgagctcagcctgcagctccgcctgcctggccagcaactccgagaaggctccttccgggtcacccgcatgcgatgctggcgggtcacctcctctgtaccattgcccagtggaagcacgagcagcccaggccggggccggggtgaggtgcgcctggaactggcttttgaatacctcatgagcaaggaccggctacagtgggtcaccatcactagcccccaggctatcatgatgagcatctgcttgcagtccatggttgatgaactgatggtgaagaaatctggcggcagtatcaggaagatgctgcgccggcgggtggggggtactctgagacgctcagacagccagcaagcagtgaagtccccaccactgcttgagtcacctgatgccacccgggagtctatggtcaaactctcaagtaagctgagtgccgtgagcttgcggggaattggcagtcccagcacagatgccagtgccagtgatgtccacggcaatttcgccttcgagggcattggagatgaggatctgtaatctccactgcttggatgtctgccctctaccccagaggaatttacagaaacttgccctgtgcctgtgtcccccatgctaggggcggaggggtcttttccttcttctttcctacctaccccttttctcttggccaggggcctcgtatcctacctttccttgtcccctgggctgtttttttttttttttttttttttctttttagtgctgg

SEQ ID NO: 291555 - DNA, 1553 bp, Homo sapiens
  misc_feature (1544)..(1544): n is a, c, g, or t
ccctatccggacaggtggctcttgccctttagactacagttcccagcatgcccaggcgattgcgtcccagaaccgacgtcccaccgccttcccacatcggatcgcagggctcccaaaatggcgagtgaggctgcggggactcgctgagcagcggagggggagcgtgcagagccgctgcggccctcacagtccggagcccggccgtgccgtgccgtagggaacatgcacttttccattcccgaaaccgagtcccgcagcggggacagcggcggctccgcctacgtggcctataacattcacgtgaatggagtcctgcactgtcgggtgcgctacagccagctcctggggctgcacgagcagcttcggaaggagtatggggccaatgtgcttcctgcattccccccaaagaagcttttctctctgactcctgctgaggtagaacagaggagagagcagttagagaagtacatgcaagctgttcggcaagacccattgcttgggagcagcgagactttcaacagtttcctgcgtcgggcacaacaggagacacagcaggtccccacagaggaagtgtccttggaagtgctgctcagcaacgggcagaaagttctggtcaacgtgctaacttcagatcagactgaggatgtcctggaggctgtagctgcaaagctggatcttccagatgacttgattggatactttagtctattcttagttcgagaaaaagaggatggagccttttcttttgtacggaagttgcaagagtttgagctgccttatgtgtctgtcaccagccttcggagtcaagagtataagattgtgctaaggaagagttattgggactctgcctatgatgacgatgtcatggagaaccgggttggcctgaacctgctttatgctcagacggtatcagatattgagcgtgggtggatcttggtcaccaaggaacagcaccggcaactcaaatctctgcaagagaaagtctccaagaaggagttcctgagactggcccagacgctgcggcactatggctacttgcgctttgatgcctgtgtggctgacttcccagaaaaggactgtcctgtggtggtgagcgcgggcaacagtgagctcagcctgcagctccgcctgcctggccagcaactccgagaaggctccttccgggtcacccgcatgcgatgctggcgggtcacctcctctgtaccattgcccagtggaagcacgagcagcccaggccggggccggggtgaggtgcgcctggaactggcttttgaatacctcatgagcaaggaccggctacagtgggtcaccatcactagcccccaggctatcatgatgagcatctgcttgcagtccatggttgatgaactgatggtgaagaaatctggcggcagtatcaggaagatgctgcgccggcgggtggggggtactctgagacgctcagacagccagcaagcagtgaagtccccaccactgcttgagtcaacctgatgccaccagggagtctatggtcaaactctcaagtaagctgagtgcgggagctngggaatggg

SEQ ID NO: 291556 - DNA, 1585 bp, Homo sapiens
  misc_feature (1576)..(1576): n is a, c, g, or t
ccctatccggacaggtggctcttgccctttagactacagttcccagcatgcccaggcgattgcgtcccagaaccgacgtcccaccgccttcccacatcggatcgcagggctcccaaaatggcgagtgaggctgcggggactcgctgagcagcggagggggagcgtgcagagccgctgcggccctcacagtccggagcccggccgtgccgtgccgtagggaacatgcacttttccattcccgaaaccgagtcccgcagcggggacagcggcggctccgcctacgtggcctataacattcacgtgaatggagtcctgcactgtcgggtgcgctacagccagctcctggggctgcacgagcagcttcggaaggagtatggggccaatgtgcttcctgcattccccccaaagaagcttttctctctgactcctgctgaggtagaacagaggagagagcagttagagaagtacatgcaagctgttcggcaagacccattgcttgggagcagcgagactttcaacagtttcctgcgtcgggcacaacaggagacacagcaggtccccacagaggaagtgtccttggaagtgctgctcagcaacgggcagaaagttctggtcaacgtgctaacttcagatcagactgaggatgtcctggaggctgtagctgcaaagctggatcttccagatgacttgattggatactttagtctattcttagttcgagaaaaagaggatggagccttttcttttgtacggaagttgcaagagtttgagctgccttatgtgtctgtcaccagccttcggagtcaagagtataagattgtgctaaggaagagttattgggactctgcctatgatgacgatgtcatggagaaccgggttggcctgaacctgctttatgctcagacggtatcagatattgagcgtgggtggatcttggtcaccaaggaacagcaccggcaactcaaatctctgcaagagaaagtctccaagaaggagttcctgagactggcccagacgctgcggcactatggctacttgcgctttgatgcctgtgtggctgacttcccagaaaaggactgtcctgtggtggtgagcgcgggcaacagtgagctcagcctgcagctccgcctgcctggccagcaactccgagaaggctccttccgggtcacccgcatgcgatgctggcgggtcacctcctctgtaccattgcccagtggaagcacgagcagcccaggccggggccggggtgaggtgcgcctggaactggcttttgaatacctcatgagcaaggaccggctacagtgggtcaccatcactagcccccaggctatcatgatgagcatctgcttgcagtccatggttgatgaactgatggtgaagaaatctggcggcagtatcaggaaggtaggcagcaagtgtggactgagcagtgagcagatgctgcgccggcgggtggggggtactctgagacgctcagacagccagcaagcagtgaagtccccaccactgcttgagtcacctgatgccacccgggagtctatggtcaaactctcaagtaagctgagtgcgggagctngggaatggg

SEQ ID NO: 291557 - DNA, 1985 bp, Homo sapiens
  misc_feature (46)..(47): n is a, c, g, or t
tggcgttattatgtgacacctaatagaaaccgcgctgtggttttannaaaacagtgtcgtcgatcggataatggatagtgggatcgctgacagcgaggagagcgtgcagagccgctgcggccctcacagtccggagcccggccgtgccgtgccgtagggaacatgcacttttccattcccgaaaccgagtcccgcagcggggacagcggcggctccgcctacgtggcctataacattcacgtgaatggagtcctgcactgtcgggtgcgctacagccagctcctggggctgcacgagcagcttcggaaggagtatggggccaatgtgcttcctgcattccccccaaagaagcttttctctctgactcctgctgaggtagaacagaggagagagcagttagagaagtacatgcaagctgttcggcaagacccattgcttgggagcagcgagactttcaacagtttcctgcgtcgggcacaacaggagacacagcaggtccccacagaggaagtgtccttggaagtgctgctcagcaacgggcagaaagttctggtcaacgtgctaacttcagatcagactgaggatgtcctggaggctgtagctgcaaagctggatcttccagatgacttgattggatactttagtctattcttagttcgagaaaaagaggatggagccttttcttttgtacggaagttgcaagagtttgagctgccttatgtgtctgtcaccagccttcggagtcaagagtataagattgtgctaaggaagagttattgggactctgcctatgatgacgatgtcatggagaaccgggttggcctgaacctgctttatgctcagacggtatcagatattgagcgtgggtggatcttggtcaccaaggaacagcaccggcaactcaaatctctgcaagagaaagtctccaagaaggagttcctgagactggcccagacgctgcggcactatggctacttgcgctttgatgcctgtgtggctgacttcccagaaaaggactgtcctgtggtggtgagcgcgggcaacagtgagctcagcctgcagctccgcctgcctggccagcaactccgagaaggctccttccgggtcacccgcatgcgatgctggcgggtcacctcctctgtaccattgcccagtggaagcacgagcagcccaggccggggccggggtgaggtgcgcctggaactggcttttgaatacctcatgagcaaggaccggctacagtgggtcaccatcactagcccccaggctatcatgatgagcatctgcttgcagtccatggttgatgaactgatggtgaagaaatctggcggcagtatcaggaagatgctgcgccggcgggtggggggtactctgagacgctcagacagccagcaagcagtgaagtccccaccactgcttgagtcacctgatgccacccgggagtctatggtcaaactctcaagtaagctgagtgccgtgagcttgcggggaattggcagtcccagcacagatgccagtgccagtgatgtccacggcaatttcgccttcgagggcattggagatgaggatctgtaatctccactgcttggatgtctgccctctaccccagaggaatttacagaaacttgccctgtgcctgtgtcccccatgctaggggcggaggggtcttttccttcttctttcctacctaccccttttctcttggccaggggcctcgtatcctacctttccttgtcccctgggctggctgcacagaggattgccccttctcttttcagagctggccctcgatgccaaattagcatttagtattttgcacaaagtctaagggaccatggctgcctgccttggggaggaaccatatctccctctgggccgcttctggcctcttggagccatgggccaaaggccaaggggatgggcagaggtctgtgtttggtctggcccagttccccatcattaaactcagcctgactgctgcctac

SEQ ID NO: 291558 - DNA, 1879 bp, Homo sapiens
ccctatccggacaggtggctcttgccctttagactacagttcccagcatgcccaggcgattgcgtcccagaaccgacgtcccaccgccttcccacatcggatcgcagggctcccaaaatgcctataacattcacgtgaatggagtcctgcactgtcgggtgcgctacagccagctcctggggctgcacgagcagcttcggaaggagtatggggccaatgtgcttcctgcattccccccaaagaagcttttctctctgactcctgctgaggtagaacagaggagagagcagttagagaagtacatgcaagctgttcggcaagacccattgcttgggagcagcgagactttcaacagtttcctgcgtcgggcacaacaggagacacagcaggtccccacagaggaagtgtccttggaagtgctgctcagcaacgggcagaaagttctggtcaacgtgctaacttcagatcagactgaggatgtcctggaggctgtagctgcaaagctggatcttccagatgacttgattggatactttagtctattcttagttcgagaaaaagaggatggagccttttcttttgtacggaagttgcaagagtttgagctgccttatgtgtctgtcaccagccttcggagtcaagagtataagattgtgctaaggaagagttattgggactctgcctatgatgacgatgtcatggagaaccgggttggcctgaacctgctttatgctcagacggtatcagatattgagcgtgggtggatcttggtcaccaaggaacagcaccggcaactcaaatctctgcaagagaaagtctccaagaaggagttcctgagactggcccagacgctgcggcactatggctacttgcgctttgatgcctgtgtggctgacttcccagaaaaggactgtcctgtggtggtgagcgcgggcaacagtgagctcagcctgcagctccgcctgcctggccagcaactccgagaaggctccttccgggtcacccgcatgcgatgctggcgggtcacctcctctgtaccattgcccagtggaagcacgagcagcccaggccggggccggggtgaggtgcgcctggaactggcttttgaatacctcatgagcaaggaccggctacagtgggtcaccatcactagcccccaggctatcatgatgagcatctgcttgcagtccatggttgatgaactgatggtgaagaaatctggcggcagtatcaggaagatgctgcgccggcgggtggggggtactctgagacgctcagacagccagcaagcagtgaagtccccaccactgcttgagtcacctgatgccacccgggagtctatggtcaaactctcaagtaagctgagtgccgtgagcttgcggggaattggcagtcccagcacagatgccagtgccagtgatgtccacggcaatttcgccttcgagggcattggagatgaggatctgtaatctccactgcttggatgtctgccctctaccccagaggaatttacagaaacttgccctgtgcctgtgtcccccatgctaggggcggaggggtcttttccttcttctttcctacctaccccttttctcttggccaggggcctcgtatcctacctttccttgtcccctgggctggctgcacagaggattgccccttctcttttcagagctggccctcgatgccaaattagcatttagtattttgcacaaagtctaagggaccatggctgcctgccttggggaggaaccatatctccctctgggccgcttctggcctcttggagccatgggccaaaggccaaggggatgggcagaggtctgtgtttggtctggcccagttccccatcattaaactcagcctgactgctgcctac

SEQ ID NO: 291559 - DNA, 2418 bp, Homo sapiens
ccctatccggacaggtggctcttgccctttagactacagttcccagcatgcccaggcgattgcgtcccagaaccgacgtcccaccgccttcccacatcggatcgcagggctcccaaaatggcgagtgaggctgcggggactcgctgagcagcggagggggagcgtgcagagccgctgcggccctcacagtccggagcccggccgtgccgtgccgtagggaacatgcacttttccattcccgaaaccgagtcccgcagcggggacagcggcggctccgcctacgtggcctataacattcacgtgaatggagtcctgcactgtcgggtgcgctacagccagctcctggggctgcacgagcagcttcggaaggagtatggggccaatgtgcttcctgcattccccccaaagaagcttttctctctgactcctgctgaggtagaacagaggagagagcagttagagaagtacatgcaagctggtgagtggttgcaggaaactaggttgactatattgaggactatggggagagacttaaaaacagctggttctgtggaagggcctgatttaatttctagatctaggaaggctcttgtttgatctgttatgcagttagcaaagtaaatagtgtacgaggatgtgtaactctgtgtactagcaaaacaatttgggcactaacatctatgagaaatactagtataacactagtcttaatatcagtggagagaacttaatttgtatctgatgtgctttagattaacatcattgttatttccctagttctatagactggactcacctagatggcagccaagggtggggcaggtgaagaatttatgcaaacagtgagtgagttcggcaagacccattgcttgggagcagcgagactttcaacagtttcctgcgtcgggcacaacaggagacacagcaggtccccacagaggaagtgtccttggaagtgctgctcagcaacgggcagaaagttctggtcaacgtgctaacttcagatcagactgaggatgtcctggaggctgtagctgcaaagctggatcttccagatgacttgattggatactttagtctattcttagttcgagaaaaagaggatggagccttttcttttgtacggaagttgcaagagtttgagctgccttatgtgtctgtcaccagccttcggagtcaagagtataagattgtgctaaggaagagttattgggactctgcctatgatgacgatgtcatggagaaccgggttggcctgaacctgctttatgctcagacggtatcagatattgagcgtgggtggatcttggtcaccaaggaacagcaccggcaactcaaatctctgcaagagaaagtctccaagaaggagttcctgagactggcccagacgctgcggcactatggctacttgcgctttgatgcctgtgtggctgacttcccagaaaaggactgtcctgtggtggtgagcgcgggcaacagtgagctcagcctgcagctccgcctgcctggccagcaactccgagaaggctccttccgggtcacccgcatgcgatgctggcgggtcacctcctctgtaccattgcccagtggaagcacgagcagcccaggccggggccggggtgaggtgcgcctggaactggcttttgaatacctcatgagcaaggaccggctacagtgggtcaccatcactagcccccaggctatcatgatgagcatctgcttgcagtccatggttgatgaactgatggtgaagaaatctggcggcagtatcaggaagatgctgcgccggcgggtggggggtactctgagacgctcagacagccagcaagcagtgaagtccccaccactgcttgagtcacctgatgccacccgggagtctatggtcaaactctcaagtaagctgagtgccgtgagcttgcggggaattggcagtcccagcacagatgccagtgccagtgatgtccacggcaatttcgccttcgagggcattggagatgaggatctgtaatctccactgcttggatgtctgccctctaccccagaggaatttacagaaacttgccctgtgcctgtgtcccccatgctaggggcggaggggtcttttccttcttctttcctacctaccccttttctcttggccaggggcctcgtatcctacctttccttgtcccctgggctggctgcacagaggattgccccttctcttttcagagctggccctcgatgccaaattagcatttagtattttgcacaaagtctaagggaccatggctgcctgccttggggaggaaccatatctccctctgggccgcttctggcctcttggagccatgggccaaaggccaaggggatgggcagaggtctgtgtttggtctggcccagttccccatcattaaactcagcctgactgctgcctac

SEQ ID NO: 291560 - DNA, 1683 bp, Homo sapiens
  misc_feature (39)..(40): n is a, c, g, or t
cgactttagaggaacccctccttgaatccaagcagtcgnnagaaagaagcttttctctctgactcctgctgaggtagaacagaggagagagcagttagagaagtacatgcaagctgttcggcaagacccattgcttgggagcagcgagactttcaacagtttcctgcgtcgggcacaacaggagacacagcaggtccccacagaggaagtgtccttggaagtgctgctcagcaacgggcagaaagttctggtcaacgtgctaacttcagatcagactgaggatgtcctggaggctgtagctgcaaagctggatcttccagatgacttgattggatactttagtctattcttagttcgagaaaaagaggatggagccttttcttttgtacggaagttgcaagagtttgagctgccttatgtgtctgtcaccagccttcggagtcaagagtataagattgtgctaaggaagagttattgggactctgcctatgatgacgatgtcatggagaaccgggttggcctgaacctgctttatgctcagacggtatcagatattgagcgtgggtggatcttggtcaccaaggaacagcaccggcaactcaaatctctgcaagagaaagtctccaagaaggagttcctgagactggcccagacgctgcggcactatggctacttgcgctttgatgcctgtgtggctgacttcccagaaaaggactgtcctgtggtggtgagcgcgggcaacagtgagctcagcctgcagctccgcctgcctggccagcaactccgagaaggctccttccgggtcacccgcatgcgatgctggcgggtcacctcctctgtaccattgcccagtggaagcacgagcagcccaggccggggccggggtgaggtgcgcctggaactggcttttgaatacctcatgagcaaggaccggctacagtgggtcaccatcactagcccccaggctatcatgatgagcatctgcttgcagtccatggttgatgaactgatggtgaagaaatctggcggcagtatcaggaagatgctgcgccggcgggtggggggtactctgagacgctcagacagccagcaagcagtgaagtccccaccactgcttgagtcacctgatgccacccgggagtctatggtcaaactctcaagtaagctgagtgccgtgagcttgcggggaattggcagtcccagcacagatgccagtgccagtgatgtccacggcaatttcgccttcgagggcattggagatgaggatctgtaatctccactgcttggatgtctgccctctaccccagaggaatttacagaaacttgccctgtgcctgtgtcccccatgctaggggcggaggggtcttttccttcttctttcctacctaccccttttctcttggccaggggcctcgtatcctacctttccttgtcccctgggctggctgcacagaggattgccccttctcttttcagagctggccctcgatgccaaattagcatttagtattttgcacaaagtctaagggaccatggctgcctgccttggggaggaaccatatctccctctgggccgcttctggcctcttggagccatgggccaaaggccaaggggatgggcagaggtctgtgtttggtctggcccagttccccatcattaaactcagcctgactgctgcctac

SEQ ID NO: 291561 - DNA, 1974 bp, Homo sapiens
  misc_feature (38)..(38): n is a, c, g, or t
  misc_feature (40)..(40): n is a, c, g, or t
agcgagaggaacttaaggctaggtacgaggctgggtgntngggcgagtgaggctgcggggactcgctgagcagcggagggggagcgtgcagagccgctgcggccctcacagtccggagcccggccgtgccgtgccgtagggaacatgcacttttccattcccgaaaccgagtcccgcagcggggacagcggcggctccgcctacgtggcctataacattcacgtgaatggagtcctgcactgtcgggtgcgctacagccagctcctggggctgcacgagcaggtgggactagcacccctgccttgagacagcttcaagcccttccctacacgtggacatcagtgtctccctttacccgctcttcttgttcccgtaggctgtagttcccctttaatcactgccacaggttcggcaagacccattgcttgggagcagcgagactttcaacagtttcctgcgtcgggcacaacaggagacacagcaggtccccacagaggaagtgtccttggaagtgctgctcagcaacgggcagaaagttctggtcaacgtgctaacttcagatcagactgaggatgtcctggaggctgtagctgcaaagctggatcttccagatgacttgattggatactttagtctattcttagttcgagaaaaagaggatggagccttttcttttgtacggaagttgcaagagtttgagctgccttatgtgtctgtcaccagccttcggagtcaagagtataagattgtgctaaggaagagttattgggactctgcctatgatgacgatgtcatggagaaccgggttggcctgaacctgctttatgctcagacggtatcagatattgagcgtgggtggatcttggtcaccaaggaacagcaccggcaactcaaatctctgcaagagaaagtctccaagaaggagttcctgagactggcccagacgctgcggcactatggctacttgcgctttgatgcctgtgtggctgacttcccagaaaaggactgtcctgtggtggtgagcgcgggcaacagtgagctcagcctgcagctccgcctgcctggccagcaactccgagaaggctccttccgggtcacccgcatgcgatgctggcgggtcacctcctctgtaccattgcccagtggaagcacgagcagcccaggccggggccggggtgaggtgcgcctggaactggcttttgaatacctcatgagcaaggaccggctacagtgggtcaccatcactagcccccaggctatcatgatgagcatctgcttgcagtccatggttgatgaactgatggtgaagaaatctggcggcagtatcaggaagatgctgcgccggcgggtggggggtactctgagacgctcagacagccagcaagcagtgaagtccccaccactgcttgagtcacctgatgccacccgggagtctatggtcaaactctcaagtaagctgagtgccgtgagcttgcggggaattggcagtcccagcacagatgccagtgccagtgatgtccacggcaatttcgccttcgagggcattggagatgaggatctgtaatctccactgcttggatgtctgccctctaccccagaggaatttacagaaacttgccctgtgcctgtgtcccccatgctaggggcggaggggtcttttccttcttctttcctacctaccccttttctcttggccaggggcctcgtatcctacctttccttgtcccctgggctggctgcacagaggattgccccttctcttttcagagctggccctcgatgccaaattagcatttagtattttgcacaaagtctaagggaccatggctgcctgccttggggaggaaccatatctccctctgggccgcttctggcctcttggagccatgggccaaaggccaaggggatgggcagaggtctgtgtttggtctggcccagttccccatcattaaactcagcctgactgctgcctac

SEQ ID NO: 291562 - DNA, 1210 bp, Homo sapiens
ccctatccggacaggtggctcttgccctttagactacagttcccagcatgcccaggcgattgcgtcccagaaccgacgtcccaccgccttcccacatcggatcgcagggctcccaaaatggcgagtgaggctgcggggactcgctgagcagcggagggggagcgtgcagagccgctgcggccctcacagtccggagcccggccgtgccgtgccgtagggaacatgcacttttccattcccgaaaccgagtcccgcagcggggacagcggcggctccgcctacgtggcctataacattcacgtgaatggagtcctgcactgtcgggtgcgctacagccagctcctggggctgcacgagcagcttcggaaggagtatggggccaatgtgcttcctgcattccccccaaagaagcttttctctctgactcctgctgaggtagaacagaggagagagcagttagagaagtacatgcaagctgttcggcaagacccattgcttgggagcagcgagactttcaacagtttcctgcgtcgggcacaacaggagacacagcaggtccccacagaggaagtgtccttggaagtgctgctcagcaacgggcagaaagttctggtcaacgtgctaacttcagatcagactgaggatgtcctggaggctgtagctgcaaagctggatcttccagatgacttgattggatactttagtctattcttagttcgagaaaaagaggatggagccttttcttttgtacggaagttgcaagagtttgagctgccttatgtgtctgtcaccagccttcggagtcaagagtataagattgtgctaaggaagagttattgggactctgcctatgatgacgatgtcatggagaaccgggttggcctgaacctgctttatgctcagacggtatcagatattgagcgtgggtggatcttggtcaccaaggaacagcaccggcaactcaaatctctgcaagagaaagtctccaagaaggagttcctgagactggcccagacgctgcggcactatggctacttgcgctttgatgcctgtgtggctgacttcccagaaaaggactgtcctgtggtggtgagcgcgggcaacagtgagctcagcctgcagctccgcctgcctggccagcaactccgagaaggctccttccgggtcacccgcatgcgttctcagacggtaggatccgtagatcgacgca

SEQ ID NO: 291563 - DNA, 1890 bp, Homo sapiens
tgcctcagcctcccaagtagctagaattacaggcgcactgccaccatgtccggctaatttttgtatttttagtggagacggggttttgccgtgttggcctggctggtctcgaactcctgacctcaggtgatccacccgccttggcctcccaaagtgctgggattacgggtgtgagccaccacacccagccaggccatgtcatcttaataacagaggagtcatcttttttaatggaatggaacttctattcttatgaaatcaaagaaatcacagcctatatttaagcagctgagaataaagacacacaagggacctagaaatagagttgggcataggtcaaggcaagggacaaggcagtgcttcccatccccatgtgtgctcacaacaggagacacagcaggtccccacagaggaagtgtccttggaagtgctgctcagcaacgggcagaaagttctggtcaacgtgctaacttcagatcagactgaggatgtcctggaggctgtagctgcaaagctggatcttccagatgacttgattggatactttagtctattcttagttcgagaaaaagaggatggagccttttcttttgtacggaagttgcaagagtttgagctgccttatgtgtctgtcaccagccttcggagtcaagagtataagattgtgctaaggaagagttattgggactctgcctatgatgacgatgtcatggagaaccgggttggcctgaacctgctttatgctcagacggtatcagatattgagcgtgggtggatcttggtcaccaaggaacagcaccggcaactcaaatctctgcaagagaaagtctccaagaaggagttcctgagactggcccagacgctgcggcactatggctacttgcgctttgatgcctgtgtggctgacttcccagaaaaggactgtcctgtggtggtgagcgcgggcaacagtgagctcagcctgcagctccgcctgcctggccagcaactccgagaaggctccttccgggtcacccgcatgcgatgctggcgggtcacctcctctgtaccattgcccagtggaagcacgagcagcccaggccggggccggggtgaggtgcgcctggaactggcttttgaatacctcatgagcaaggaccggctacagtgggtcaccatcactagcccccaggctatcatgatgagcatctgcttgcagtccatggttgatgaactgatggtgaagaaatctggcggcagtatcaggaagatgctgcgccggcgggtggggggtactctgagacgctcagacagccagcaagcagtgaagtccccaccactgcttgagtcacctgatgccacccgggagtctatggtcaaactctcaagtaagctgagtgccgtgagcttgcggggaattggcagtcccagcacagatgccagtgccagtgatgtccacggcaatttcgccttcgagggcattggagatgaggatctgtaatctccactgcttggatgtctgccctctaccccagaggaatttacagaaacttgccctgtgcctgtgtcccccatgctaggggcggaggggtcttttccttcttctttcctacctaccccttttctcttggccaggggcctcgtatcctacctttccttgtcccctgggctggctgcacagaggattgccccttctcttttcagagctggccctcgatgccaaattagcatttagtattttgcacaaagtctaagggaccatggctgcctgccttggggaggaaccatatctccctctgggccgcttctggcctcttggagccatgggccaaaggccaaggggatgggcagaggtctgtgtttggtctggcccagttccccatcattaaactcagcctgactgctgcctac

SEQ ID NO: 291564 - DNA, 1704 bp, Homo sapiens
  misc_feature (38)..(38): n is a, c, g, or t
  misc_feature (40)..(40): n is a, c, g, or t
agcgagaggaacttaaggctaggtacgaggctgggtgntngggcgagtgaggctgcggggactcgctgagcagcggagggggagcgtgcagagccgctgcggccctcacagtccggagcccggccgtgccgtgccgtagggaacatgcacttttccattcccgaaaccgagtcccgcagcggggacagcggcggctccgcctacgtgttcggcaagacccattgcttgggagcagcgagactttcaacagtttcctgcgtcgggcacaacaggagacacagcaggtccccacagaggaagtgtccttggaagtgctgctcagcaacgggcagaaagttctggtcaacgtgctaacttcagatcagactgaggatgtcctggaggctgtagctgcaaagctggatcttccagatgacttgattggatactttagtctattcttagttcgagaaaaagaggatggagccttttcttttgtacggaagttgcaagagtttgagctgccttatgtgtctgtcaccagccttcggagtcaagagtataagattgtgctaaggaagagacggtatcagatattgagcgtgggtggatcttggtcaccaaggaacagcaccggcaactcaaatctctgcaagagaaagtctccaagaaggagttcctgagactggcccagacgctgcggcactatggctacttgcgctttgatgcctgtgtggctgacttcccagaaaaggactgtcctgtggtggtgagcgcgggcaacagtgagctcagcctgcagctccgcctgcctggccagcaactccgagaaggctccttccgggtcacccgcatgcgatgctggcgggtcacctcctctgtaccattgcccagtggaagcacgagcagcccaggccggggccggggtgaggtgcgcctggaactggcttttgaatacctcatgagcaaggaccggctacagtgggtcaccatcactagcccccaggctatcatgatgagcatctgcttgcagtccatggttgatgaactgatggtgaagaaatctggcggcagtatcaggaagatgctgcgccggcgggtggggggtactctgagacgctcagacagccagcaagcagtgaagtccccaccactgcttgagtcacctgatgccacccgggagtctatggtcaaactctcaagtaagctgagtgccgtgagcttgcggggaattggcagtcccagcacagatgccagtgccagtgatgtccacggcaatttcgccttcgagggcattggagatgaggatctgtaatctccactgcttggatgtctgccctctaccccagaggaatttacagaaacttgccctgtgcctgtgtcccccatgctaggggcggaggggtcttttccttcttctttcctacctaccccttttctcttggccaggggcctcgtatcctacctttccttgtcccctgggctggctgcacagaggattgccccttctcttttcagagctggccctcgatgccaaattagcatttagtattttgcacaaagtctaagggaccatggctgcctgccttggggaggaaccatatctccctctgggccgcttctggcctcttggagccatgggccaaaggccaaggggatgggcagaggtctgtgtttggtctggcccagttccccatcattaaactcagcctgactgctgcctac

SEQ ID NO: 291565 - DNA, 1515 bp, Homo sapiens
ccctatccggacaggtggctcttgccctttagactacagttcccagcatgcccaggcgattgcgtcccagaaccgacgtcccaccgccttcccacatcggatcgcagggctcccaaaatggcgagtgaggctgcggggactcgctgagcagcggagggggagcgtgcagagccgctgcggccctcacagtccggagcccggccgtgccgtgccgtagggaacatgcacttttccattcccgaaaccgagtcccgcagcggggacagcggcggctccgcctacgtggcctataacattcacgtgaatggagtcctgcactgtcgggtgcgctacagccagctcctggggctgcacgagcagcttcggaaggagtatggggccaatgtgcttcctgcattccccccaaagaagcttttctctctgactcctgctgaggtagaacagaggagagagcagttagagaagtacatgcaagctgttcggcaagacccattgcttgggagcagcgagactttcaacagtttcctgcgtcgggcacaacaggagacacagcaggtccccacagaggaagtgtccttggaagtgctgctcagcaacgggcagaaagttctggtcaacgtgctaacttcagatcagactgaggatgtcctggaggctgtagctgcaaagctggatcttccagatgacttgattggatactttagtctattcttagttcgagaaaaagaggatggagccttttcttttgtacggaagttgcaagagtttgagctgccttatgtgtctgtcaccagccttcggagtcaagagtataagattgtgctaaggaagagacggtatcagatattgagcgtgggtggatcttggtcaccaaggaacagcaccggcaactcaaatctctgcaagagaaagtctccaagaaggagttcctgagactggcccagacgctgcggcactatggctacttgcgctttgatgcctgtgtggctgacttcccagaaaaggactgtcctgtggtggtgagcgcgggcaacagtgagctcagcctgcagctccgcctgcctggccagcaactccgagaaggctccttccgggtcacccgcatgcgatgctggcgggtcacctcctctgtaccattgcccagtggaagcacgagcagcccaggccggggccggggtgaggtgcgcctggaactggcttttgaatacctcatgagcaaggaccggctacagtgggtcaccatcactagcccccaggctatcatgatgagcatctgcttgcagtccatggttgatgaactgatggtgaagaaatctggcggcagtatcaggaagatgctgcgccggcgggtggggggtactctgagacgctcagacagccagcaagcagtgaagtccccaccactgcttgagtcacctgatgccacccgggagtctatggtcaaactctcagtgagttccagcgttggtgaggttgctgtttgttgggggatcttgcacgcccaagatctctgac

SEQ ID NO: 291566 - DNA, 1018 bp, Homo sapiens
ccctatccggacaggtggctcttgccctttagactacagttcccagcatgcccaggcgattgcgtcccagaaccgacgtcccaccgccttcccacatcggatcgcagggctcccaaaatggcgagtgaggctgcggggactcgctgagcagcggagggggagcgtgcagagccgctgcggccctcacagtccggagcccggccgtgccgtgccgtagggaacatgcacttttccattcccgaaaccgagtcccgcagcggggacagcggcggctccgcctacgtggcctataacattcacgtgaatggagtcctgcactgtcgggtgcgctacagccagctcctggggctgcacgagcagcttcggaaggagtatggggccaatgtgcttcctgcattccccccaaagaagcttttctctctgactcctgctgaggtagaacagaggagagagcagttagagaagtacatgcaagctgttcggcaagacccattgcttgggagcagcgagactttcaacagtttcctgcgtcgggcacaacaggagacacagcaggtccccacagaggaagtgtccttggaagtgctgctcagcaacgggcagaaagttctggtcaacgtgctaacttcagatcagactgaggatgtcctggaggctgtagctgcaaagctggatcttccagatgacttgattggatactttagtctattcttagttcgagaaaaagaggatggagccttttcttttgtacggaagttgcaagagtttgagctgccttatgtgtctgtcaccagccttcggagtcaagagtataagattgtgctaaggaagaggacgagttatggggactctggctatgatgacgatgtctggggaaccggtgggctggagccggtttatgctccgacggtccgatttgagcgggggggtcttggtgcccggacagccgggaccaattctgggaaaattcaaaggtctaaaggccactgggcaatgatgctatcggggggtcccaagg

SEQ ID NO: 291567 - DNA, 856 bp, Homo sapiens
  misc_feature (784)..(785): n is a, c, g, or t
  misc_feature (788)..(788): n is a, c, g, or t
ccctatccggacaggtggctcttgccctttagactacagttcccagcatgcccaggcgattgcgtcccagaaccgacgtcccaccgccttcccacatcggatcgcagggctcccaaaatggcgagtgaggctgcggggactcgctgagcagcggagggggagcgtgcagagccgctgcggccctcacagtccggagcccggccgtgccgtgccgtagggaacatgcacttttccattcccgaaaccgagtcccgcagcggggacagcggcggctccgcctacgtggcctataacattcacgtgaatggagtcctgcactgtcgggtgcgctacagccagctcctggggctgcacgagcagcttcggaaggagtatggggccaatgtgcttcctgcattccccccaaagaagcttttctctctgactcctgctgaggtagaacagaggagagagcagttagagaagtacatgcaagctgttcggcaagacccattgcttgggagcagcgagactttcaacagtttcctgcgtcgggcacaacaggagacacagcaggtccccacagaggaagtgtccttggaagtgctgctcagcaacgggcagaaagttctggtcaacgtgctaacttcagatcagactgaggatgtcctggaggctgtagctgcaaagctggatcttccagatgacttgattggatactttagtctattcttagttcgagaaaaagaggatggagccttttcttttgtacggagtgcagagttgagctgctatggttgcaccnnctncgggtcagagttagaaggggcaggaagttgggcccgcctgaaacagtctgggaccgggggccgaccgt

SEQ ID NO: 291568 - DNA, 483 bp, Homo sapiens
  misc_feature (39)..(40): n is a, c, g, or t
cgactttagaggaacccctccttgaatccaagcagtcgnnaggctgagacaaaaaaacattttcaaaacaaaacaaatctgggtgacggttagtgggggctcatcttcctattctctctctttttatacacacatgaacatttccaaaatacaatgtgaataattttttttttttgagacagcgactgcttggattacaaggagtcgaaagaaagaagcttttctctctgactcctgctgaggtagaacagaggagagagcagttagagaagtacatgcaagctgttcggcaagacccattgcttgggagcagcgagactttcaacagtttcctgcgtcgggcacaacaggagacacagcaggtccccacagaggaagtgtccttggaagtgctgctcagcaacgggcagaaagttctggtcaacgtgctaacttcagatcagactgaggatgtcctggagctctccattgtattgcagggat

SEQ ID NO: 291569 - DNA, 339 bp, Homo sapiens
ctagatgtgaggcttgtcttgagagggaggggaagtgatcctgccctcaccggcaccttgtgtctgtccccagatgctgcgccggcgggtggggggtactctgagacgctcagacagccagcaagcagtgaagtccccaccactgcttgtaagtattacctcctggtcagaaccctggctctcagccctgcctcacctctcctagtgagtttctgacacctctgcctcttcttccccaggagtcacctgatgccacccgggagtctatggtcaaactctcagtgagttccagcgttggtgaggttgctgtttgttgggggatcttgcacgcccaagatc

SEQ ID NO: 291570 - DNA, 582 bp, Homo sapiens
gggcacccaagagaacattatgagcatatgtagattgcctcatctcattttctgtgtttatgtgaagggttgtatctctttctctaaatagcttcggaaggagtatggggccaatgtgcttcctgcattccccccaaagaagcttttctctctgactcctgctgaggtagaacagaggagagagcagttagagaagtacatgcaagctggtgagtggttgcaggaaactaggttgactatattgaggactatggggagagacttaaaaacagctggttctgtggaagggcctgatttaatttctagatctaggaaggctcttgtttgatctgttatgcagttagcaaagtaaatagtgtacgaggatgtgtaactctgtgtactagcaaaacaatttgggcactaacatctatgagaaatactagtataacactagtcttaatatcagtggagagaacttaatttgtatctgatgtgctttagattaacatcattgttatttccctagttctatagactggactcacctagatggcagccaagggtggggcaggtgaagaatttatgcaaacagtgagtgag

SEQ ID NO: 291571 - DNA, 338 bp, Homo sapiens
tgaaatcaaagaaatcacagcctatatttaagcagctgagaataaagacacacaagggacctagaaatagagttgggcataggtcaaggcaagggacaaggcagtgcttcccatccccatgtgtgctcacaacaggagacacagcaggtccccacagaggaagtgtccttggaagtgctgctcagcaacgggcagaaagttctggtcaacgtgctaacttcagatcagactgaggatgtcctggaggtgaggcgcttgttcagcactgccccttcttcccctacatcctggggtcctgggcttggagaatgattggaaccagccagtatgatgagctg

SEQ ID NO: 291572 - DNA, 254 bp, Homo sapiens
aggggcctcgtatcctacctttccttgtcccctgggctggctgcacagaggattgccccttctcttttcagagctggccctcgatgccaaattagcatttagtattttgcacaaagtctaagggaccatggctgcctgccttggggaggaaccatatctccctctgggccgcttctggcctcttggagccatgggccaaaggccaaggggatgggcagaggtctgtgtttggtctggcccagttccccatcatt

SEQ ID NO: 291573 - DNA, 1947 bp, Homo sapiens
tatttcattccgggctggtgctttagattgtattactgtgcccgtcgtgttcacaattaacgagcgtgcagagccgctgcggccctcacagtccggagcccggccgtgccgtgccgtagggaacatgcacttttccattcccgaaaccgagtcccgcagcggggacagcggcggctccgcctacgtggcctataacattcacgtgaatggagtcctgcactgtcgggtgcgctacagccagctcctggggctgcacgagcagcttcggaaggagtatggggccaatgtgcttcctgcattccccccaaagaagcttttctctctgactcctgctgaggtagaacagaggagagagcagttagagaagtacatgcaagctgttcggcaagacccattgcttgggagcagcgagactttcaacagtttcctgcgtcgggcacaacaggagacacagcaggtccccacagaggaagtgtccttggaagtgctgctcagcaacgggcagaaagttctggtcaacgtgctaacttcagatcagactgaggatgtcctggaggctgtagctgcaaagctggatcttccagatgacttgattggatactttagtctattcttagttcgagaaaaagaggatggagccttttcttttgtacggaagttgcaagagtttgagctgccttatgtgtctgtcaccagccttcggagtcaagagtataagattgtgctaaggaagagttattgggactctgcctatgatgacgatgtcatggagaaccgggttggcctgaacctgctttatgctcagacggtatcagatattgagcgtgggtggatcttggtcaccaaggaacagcaccggcaactcaaatctctgcaagagaaagtctccaagaaggagttcctgagactggcccagacgctgcggcactatggctacttgcgctttgatgcctgtgtggctgacttcccagaaaaggactgtcctgtggtggtgagcgcgggcaacagtgagctcagcctgcagctccgcctgcctggccagcaactccgagaaggctccttccgggtcacccgcatgcgatgctggcgggtcacctcctctgtaccattgcccagtggaagcacgagcagcccaggccggggccggggtgaggtgcgcctggaactggcttttgaatacctcatgagcaaggaccggctacagtgggtcaccatcactagcccccaggctatcatgatgagcatctgcttgcagtccatggttgatgaactgatggtgaagaaatctggcggcagtatcaggaagatgctgcgccggcgggtggggggtactctgagacgctcagacagccagcaagcagtgaagtccccaccactgcttgagtcacctgatgccacccgggagtctatggtcaaactctcaagtaagctgagtgccgtgagcttgcggggaattggcagtcccagcacagatgccagtgccagtgatgtccacggcaatttcgccttcgagggcattggagatgaggatctgtaatctccactgcttggatgtctgccctctaccccagaggaatttacagaaacttgccctgtgcctgtgtcccccatgctaggggcggaggggtcttttccttcttctttcctacctaccccttttctcttggccaggggcctcgtatcctacctttccttgtcccctgggctggctgcacagaggattgccccttctcttttcagagctggccctcgatgccaaattagcatttagtattttgcacaaagtctaagggaccatggctgcctgccttggggaggaaccatatctccctctgggccgcttctggcctcttggagccatgggccaaaggccaaggggatgggcagaggtctgtgtttggtctggcccagttccccatcattaaactcagcctgactgctgcctac

SEQ ID NO: 291574 - DNA, 2143 bp, Homo sapiens
ccctatccggacaggtggctcttgccctttagactacagttcccagcatgcccaggcgattgcgtcccagaaccgacgtcccaccgccttcccacatcggatcgcagggctcccaaaatggcgagtgaggctgcggggactcgctgagcagcggagggggagcgtgcagagccgctgcggccctcacagtccggagcccggccgtgccgtgccgtagggaacatgcacttttccattcccgaaaccgagtcccgcagcggggacagcggcggctccgcctacgtggcctataacattcacgtgaatggagtcctgcactgtcgggtgcgctacagccagctcctggggctgcacgagcagcttcggaaggagtatggggccaatgtgcttcctgcattccccccaaagaagcttttctctctgactcctgctgaggtagaacagaggagagagcagttagagaagtacatgcaagctgttcggcaagacccattgcttgggagcagcgagactttcaacagtttcctgcgtcgggcacaacaggagacacagcaggtccccacagaggaagtgtccttggaagtgctgctcagcaacgggcagaaagttctggtcaacgtgctaacttcagatcagactgaggatgtcctggaggctgtagctgcaaagctggatcttccagatgacttgattggatactttagtctattcttagttcgagaaaaagaggatggagccttttcttttgtacggaagttgcaagagtttgagctgccttatgtgtctgtcaccagccttcggagtcaagagtataagattgtgctaaggaagagttattgggactctgcctatgatgacgatgtcatggagaaccgggttggcctgaacctgctttatgctcagacggtatcagatattgagcgtgggtggatcttggtcaccaaggaacagcaccggcaactcaaatctctgcaagagaaagtctccaagaaggagttcctgagactggcccagacgctgcggcactatggctacttgcgctttgatgcctgtgtggctgacttcccagaaaaggactgtcctgtggtggtgagcgcgggcaacagtgagctcagcctgcagctccgcctgcctggccagcaactccgagaaggctccttccgggtcacccgcatgcgatgctggcgggtcacctcctctgtaccattgcccagtggaagcacgagcagcccaggccggggccggggtgaggtgcgcctggaactggcttttgaatacctctggttccctctcactgcccctgcttcccccatcacagcatggactactatgctaagggtaaggccaaattgcctgccattgccaattcagcatagacatggctttgttagtgtttcctttattataaagcactgaaataagttaaataaacaggtgggaggctgggcagtcccccagccggtttgtccacagcccctgggggcagtggaggtgaatacagggcccttctcactgagctcgtgaagtgcctcagtcaaggcaaggtcccctggtccatatgggcccccccgcccatggggttgggctggtccttatagtgcctacgttagtctgtgtggagcccctggccagcgggggagaaaaaggtggcttctggtccgtctgtataaaacatggggaagaaggacctagttcaggatgagtctgtgtggacagcccggctgccagcagtccccagggctggtgggccccgagagctcaaaacagagggtgggctatgaggtggggcccagccctcagaggcagagagaccaggccctcctgccccaccgtggccatgcaccttctggtggcgcttgtagttgtcccagtggcccgtggtataggcgcaggtggcacagcggaagggcttctcgcctgtgtgccgcagcatgtgacgtttgaggttcatgctctggttgcagctgtagttgcaaaggctacaccgaaaaggtttgtcaccagagtggatgcgaccatgacgcttgaggttggccagattgccacaggcataagggcagagggggcacttgtagggcttctctcctgtatggacgcgccatcgtgccgtttcaggttatccagatgagcagaggcataagga

SEQ ID NO: 291575 - DNA, 2119 bp, Homo sapiens
ccctatccggacaggtggctcttgccctttagactacagttcccagcatgcccaggcgattgcgtcccagaaccgacgtcccaccgccttcccacatcggatcgcagggctcccaaaatggcgagtgaggctgcggggactcgctgagcagcggagggggagcgtgcagagccgctgcggccctcacagtccggagcccggccgtgccgtgccgtagggaacatgcacttttccattcccgaaaccgagtcccgcagcggggacagcggcggctccgcctacgtggcctataacattcacgtgaatggagtcctgcactgtcgggtgcgctacagccagctcctggggctgcacgagcagcttcggaaggagtatggggccaatgtgcttcctgcattccccccaaagaagcttttctctctgactcctgctgaggtagaacagaggagagagcagttagagaagtacatgcaagctgttctatagactggactcacctagatggcagccaagggtggggcaggtgaagaatttatgcaaacagtgagtgagttcggcaagacccattgcttgggagcagcgagactttcaacagtttcctgcgtcgggcacaacaggagacacagcaggtccccacagaggaagtgtccttggaagtgctgctcagcaacgggcagaaagttctggtcaacgtgctaacttcagatcagactgaggatgtcctggaggctgtagctgcaaagctggatcttccagatgacttgattggatactttagtctattcttagttcgagaaaaagaggatggagccttttcttttgtacggaagttgcaagagtttgagctgccttatgtgtctgtcaccagccttcggagtcaagagtataagattgtgctaaggaagagttattgggactctgcctatgatgacgatgtcatggagaaccgggttggcctgaacctgctttatgctcagacggtatcagatattgagcgtgggtggatcttggtcaccaaggaacagcaccggcaactcaaatctctgcaagagaaagtctccaagaaggagttcctgagactggcccagacgctgcggcactatggctacttgcgctttgatgcctgtgtggctgacttcccagaaaaggactgtcctgtggtggtgagcgcgggcaacagtgagctcagcctgcagctccgcctgcctggccagcaactccgagaaggctccttccgggtcacccgcatgcgatgctggcgggtcacctcctctgtaccattgcccagtggaagcacgagcagcccaggccggggccggggtgaggtgcgcctggaactggcttttgaatacctcatgagcaaggaccggctacagtgggtcaccatcactagcccccaggctatcatgatgagcatctgcttgcagtccatggttgatgaactgatggtgaagaaatctggcggcagtatcaggaagatgctgcgccggcgggtggggggtactctgagacgctcagacagccagcaagcagtgaagtccccaccactgcttgagtcacctgatgccacccgggagtctatggtcaaactctcaagtaagctgagtgccgtgagcttgcggggaattggcagtcccagcacagatgccagtgccagtgatgtccacggcaatttcgccttcgagggcattggagatgaggatctgtaatctccactgcttggatgtctgccctctaccccagaggaatttacagaaacttgccctgtgcctgtgtcccccatgctaggggcggaggggtcttttccttcttctttcctacctaccccttttctcttggccaggggcctcgtatcctacctttccttgtcccctgggctggctgcacagaggattgccccttctcttttcagagctggccctcgatgccaaattagcatttagtattttgcacaaagtctaagggaccatggctgcctgccttggggaggaaccatatctccctctgggccgcttctggcctcttggagccatgggccaaaggccaaggggatgggcagaggtctgtgtttggtctggcccagttccccatcattaaactcagcctgactgctgcctac

SEQ ID NO: 291576 - DNA, 1852 bp, Homo sapiens
  misc_feature (39)..(40): n is a, c, g, or t
cgactttagaggaacccctccttgaatccaagcagtcgnnaggctgagacaaaaaaacattttcaaaacaaaacaaatctgggtgacggttagtgggggctcatcttcctattctctctctttttatacacacatgaacatttccaaaatacaatgtgaataattttttttttttgagacagcgactgcttggattacaaggagtcgaaagaaagaagcttttctctctgactcctgctgaggtagaacagaggagagagcagttagagaagtacatgcaagctgttcggcaagacccattgcttgggagcagcgagactttcaacagtttcctgcgtcgggcacaacaggagacacagcaggtccccacagaggaagtgtccttggaagtgctgctcagcaacgggcagaaagttctggtcaacgtgctaacttcagatcagactgaggatgtcctggaggctgtagctgcaaagctggatcttccagatgacttgattggatactttagtctattcttagttcgagaaaaagaggatggagccttttcttttgtacggaagttgcaagagtttgagctgccttatgtgtctgtcaccagccttcggagtcaagagtataagattgtgctaaggaagagttattgggactctgcctatgatgacgatgtcatggagaaccgggttggcctgaacctgctttatgctcagacggtatcagatattgagcgtgggtggatcttggtcaccaaggaacagcaccggcaactcaaatctctgcaagagaaagtctccaagaaggagttcctgagactggcccagacgctgcggcactatggctacttgcgctttgatgcctgtgtggctgacttcccagaaaaggactgtcctgtggtggtgagcgcgggcaacagtgagctcagcctgcagctccgcctgcctggccagcaactccgagaaggctccttccgggtcacccgcatgcgatgctggcgggtcacctcctctgtaccattgcccagtggaagcacgagcagcccaggccggggccggggtgaggtgcgcctggaactggcttttgaatacctcatgagcaaggaccggctacagtgggtcaccatcactagcccccaggctatcatgatgagcatctgcttgcagtccatggttgatgaactgatggtgaagaaatctggcggcagtatcaggaagatgctgcgccggcgggtggggggtactctgagacgctcagacagccagcaagcagtgaagtccccaccactgcttgagtcacctgatgccacccgggagtctatggtcaaactctcaagtaagctgagtgccgtgagcttgcggggaattggcagtcccagcacagatgccagtgccagtgatgtccacggcaatttcgccttcgagggcattggagatgaggatctgtaatctccactgcttggatgtctgccctctaccccagaggaatttacagaaacttgccctgtgcctgtgtcccccatgctaggggcggaggggtcttttccttcttctttcctacctaccccttttctcttggccaggggcctcgtatcctacctttccttgtcccctgggctggctgcacagaggattgccccttctcttttcagagctggccctcgatgccaaattagcatttagtattttgcacaaagtctaagggaccatggctgcctgccttggggaggaaccatatctccctctgggccgcttctggcctcttggagccatgggccaaaggccaaggggatgggcagaggtctgtgtttggtctggcccagttccccatcattaaactcagcctgactgctgcctac

SEQ ID NO: 291577 - DNA, 1927 bp, Homo sapiens
ccctatccggacaggtggctcttgccctttagactacagttcccagcatgcccaggcgattgcgtcccagaaccgacgtcccaccgccttcccacatcggatcgcagggctcccaaaatggcgagtgaggctgcggggactcgctgagcagcggagggggagcgtgcagagccgctgcggccctcacagtccggagcccggccgtgccgtgccgtagggaacatgcacttttccattcccgaaaccgagtcccgcagcggggacagcggcggctccgcctacgtggcctataacattcacgtgaatggagtcctgcactgtcgggtgcgctacagccagctcctggggctgcacgagcagttcggcaagacccattgcttgggagcagcgagactttcaacagtttcctgcgtcgggcacaacaggagacacagcaggtccccacagaggaagtgtccttggaagtgctgctcagcaacgggcagaaagttctggtcaacgtgctaacttcagatcagactgaggatgtcctggaggctgtagctgcaaagctggatcttccagatgacttgattggatactttagtctattcttagttcgagaaaaagaggatggagccttttcttttgtacggaagttgcaagagtttgagctgccttatgtgtctgtcaccagccttcggagtcaagagtataagattgtgctaaggaagagttattgggactctgcctatgatgacgatgtcatggagaaccgggttggcctgaacctgctttatgctcagacggtatcagatattgagcgtgggtggatcttggtcaccaaggaacagcaccggcaactcaaatctctgcaagagaaagtctccaagaaggagttcctgagactggcccagacgctgcggcactatggctacttgcgctttgatgcctgtgtggctgacttcccagaaaaggactgtcctgtggtggtgagcgcgggcaacagtgagctcagcctgcagctccgcctgcctggccagcaactccgagaaggctccttccgggtcacccgcatgcgatgctggcgggtcacctcctctgtaccattgcccagtggaagcacgagcagcccaggccggggccggggtgaggtgcgcctggaactggcttttgaatacctcatgagcaaggaccggctacagtgggtcaccatcactagcccccaggctatcatgatgagcatctgcttgcagtccatggttgatgaactgatggtgaagaaatctggcggcagtatcaggaagatgctgcgccggcgggtggggggtactctgagacgctcagacagccagcaagcagtgaagtccccaccactgcttgagtcacctgatgccacccgggagtctatggtcaaactctcaagtaagctgagtgccgtgagcttgcggggaattggcagtcccagcacagatgccagtgccagtgatgtccacggcaatttcgccttcgagggcattggagatgaggatctgtaatctccactgcttggatgtctgccctctaccccagaggaatttacagaaacttgccctgtgcctgtgtcccccatgctaggggcggaggggtcttttccttcttctttcctacctaccccttttctcttggccaggggcctcgtatcctacctttccttgtcccctgggctggctgcacagaggattgccccttctcttttcagagctggccctcgatgccaaattagcatttagtattttgcacaaagtctaagggaccatggctgcctgccttggggaggaaccatatctccctctgggccgcttctggcctcttggagccatgggccaaaggccaaggggatgggcagaggtctgtgtttggtctggcccagttccccatcattaaactcagcctgactgctgcctac

SEQ ID NO: 291578 - DNA, 1923 bp, Homo sapiens
  misc_feature (38)..(38): n is a, c, g, or t
  misc_feature (40)..(40): n is a, c, g, or t
agcgagaggaacttaaggctaggtacgaggctgggtgntngggcgagtgaggctgcggggactcgctgagcagcggagggggagcgtgcagagccgctgcggccctcacagtccggagcccggccgtgccgtgccgtagggaacatgcacttttccattcccgaaaccgagtcccgcagcggggacagcggcggctccgcctacgtggcctataacattcacgtgaatggagtcctgcactgtcgggtgcgctacagccagctcctggggctgcacgagcagttctatagactggactcacctagatggcagccaagggtggggcaggtgaagaatttatgcaaacagtgagtgagttcggcaagacccattgcttgggagcagcgagactttcaacagtttcctgcgtcgggcacaacaggagacacagcaggtccccacagaggaagtgtccttggaagtgctgctcagcaacgggcagaaagttctggtcaacgtgctaacttcagatcagactgaggatgtcctggaggctgtagctgcaaagctggatcttccagatgacttgattggatactttagtctattcttagttcgagaaaaagaggatggagccttttcttttgtacggaagttgcaagagtttgagctgccttatgtgtctgtcaccagccttcggagtcaagagtataagattgtgctaaggaagagttattgggactctgcctatgatgacgatgtcatggagaaccgggttggcctgaacctgctttatgctcagacggtatcagatattgagcgtgggtggatcttggtcaccaaggaacagcaccggcaactcaaatctctgcaagagaaagtctccaagaaggagttcctgagactggcccagacgctgcggcactatggctacttgcgctttgatgcctgtgtggctgacttcccagaaaaggactgtcctgtggtggtgagcgcgggcaacagtgagctcagcctgcagctccgcctgcctggccagcaactccgagaaggctccttccgggtcacccgcatgcgatgctggcgggtcacctcctctgtaccattgcccagtggaagcacgagcagcccaggccggggccggggtgaggtgcgcctggaactggcttttgaatacctcatgagcaaggaccggctacagtgggtcaccatcactagcccccaggctatcatgatgagcatctgcttgcagtccatggttgatgaactgatggtgaagaaatctggcggcagtatcaggaagatgctgcgccggcgggtggggggtactctgagacgctcagacagccagcaagcagtgaagtccccaccactgcttgagtcacctgatgccacccgggagtctatggtcaaactctcaagtaagctgagtgccgtgagcttgcggggaattggcagtcccagcacagatgccagtgccagtgatgtccacggcaatttcgccttcgagggcattggagatgaggatctgtaatctccactgcttggatgtctgccctctaccccagaggaatttacagaaacttgccctgtgcctgtgtcccccatgctaggggcggaggggtcttttccttcttctttcctacctaccccttttctcttggccaggggcctcgtatcctacctttccttgtcccctgggctggctgcacagaggattgccccttctcttttcagagctggccctcgatgccaaattagcatttagtattttgcacaaagtctaagggaccatggctgcctgccttggggaggaaccatatctccctctgggccgcttctggcctcttggagccatgggccaaaggccaaggggatgggcagaggtctgtgtttggtctggcccagttccccatcattaaactcagcctgactgctgcctac

SEQ ID NO: 291579 - DNA, 1055 bp, Homo sapiens
ccctatccggacaggtggctcttgccctttagactacagttcccagcatgcccaggcgattgcgtcccagaaccgacgtcccaccgccttcccacatcggatcgcagggctcccaaaatggcgagtgaggctgcggggactcgctgagcagcggagggggagcgtgcagagccgctgcggccctcacagtccggagcccggccgtgccgtgccgtagggaacatgcacttttccattcccgaaaccgagtcccgcagcggggacagcggcggctccgcctacgtggcctataacattcacgtgaatggagtcctgcactgtcgggtgcgctacagccagctcctggggctgcacgagcagcttcggaaggagtatggggccaatgtgcttcctgcattccccccaaagaagcttttctctctgactcctgctgaggtagaacagaggagagagcagttagagaagtacatgcaagctgttcggcaagacccattgcttgggagcagcgagactttcaacagtttcctgcgtcgggcacaacaggagacacagcaggtccccacagaggaagtgtccttggaagtgctgctcagcaacgggcagaaagttctggtcaacgtgctaacttcagatcagactgaggatgtcctggaggctgtagctgcaaagctggatcttccagatgacttgattggatactttagtctattcttagttcgagaaaaagaggatggagccttttcttttgtacggaagttgcaagagtttgagctgccttatgtgtctgtcaccagccttcggagtcaagagtataagattgtgctaaggaagagttattgggactctgcctatgatgacgatgtcatggagaaccgggttggcctgaacctgctttatgctcagacggtatcagatattgagcgtgggtggatcttggtcaccaaggaacagcaccggcaactcaaatctctgcaagagaaagtctccaagaaggagttcctgagcctggcgcttgcgctactggaaatgctcacgggtttcctacagagacacag

SEQ ID NO: 291580 - DNA, 765 bp, Homo sapiens
ccacttgaactaccgattcccgagctcggtacccctagtcagacacgctatcatgatgagcatctgcttgcagtccatggttgatgaactgatggtgaagaaatctggcggcagtatcaggaagatgctgcgccggcgggtggggggtactctgagacgctcagacagccagcaagcagtgaagtccccaccactgcttgagtcacctgatgccacccgggagtctatggtcaaactctcaagtaagctgagtgccgtgagcttgcggggaattggcagtcccagcacagatgccagtgccagtgatgtccacggcaatttcgccttcgagggcattggagatgaggatctgtaatctccactgcttggatgtctgccctctaccccagaggaatttacagaaacttgccctgtgcctgtgtcccccatgctaggggcggaggggtcttttccttcttctttcctacctaccccttttctcttggccaggggcctcgtatcctacctttccttgtcccctgggctggctgcacagaggattgccccttctcttttcagagctggccctcgatgccaaattagcatttagtattttgcacaaagtctaagggaccatggctgcctgccttggggaggaaccatatctccctctgggccgcttctggcctcttggagccatgggccaaaggccaaggggatgggcagaggtctgtgtttggtctggcccagttccccatcattaaactcagcctgactgctgcctac

SEQ ID NO: 291581 - DNA, 1183 bp, Homo sapiens
ccctatccggacaggtggctcttgccctttagactacagttcccagcatgcccaggcgattgcgtcccagaaccgacgtcccaccgccttcccacatcggatcgcagggctcccaaaatggcgagtgaggctgcggggactcgctgagcagcggagggggagcgtgcagagccgctgcggccctcacagtccggagcccggccgtgccgtgccgtagggaacatgcacttttccattcccgaaaccgagtcccgcagcggggacagcggcggctccgcctacgtggcctataacattcacgtgaatggagtcctgcactgtcgggtgcgctacagccagctcctggggctgcacgagcagcttcggaaggagtatggggccaatgtgcttcctgcattccccccaaagaagcttttctctctgactcctgctgaggtagaacagaggagagagcagttagagaagtacatgcaagctgttcggcaagacccattgcttgggagcagcgagactttcaacagtttcctgcgtcgggcacaacaggagacacagcaggtccccacagaggaagtgtccttggaagtgctgctcagcaacgggcagaaagttctggtcaacgtgctaacttcagatcagactgaggatgtcctggaggctgtagctgcaaagctggatcttccagatgacttgattggatactttagtctattcttagttcgagaaaaagaggatggagccttttcttttgtacggaagttgcaagagtttgagctgccttatgtgtctgtcaccagccttcggagtcaagagtataagattgtgctaaggaagaggttgggacctgactagatgaggagtcatgagcacggggtggcggcaaaagaaaaggagaaggataacacattgaccccgctgcgctagacaccacagcccaccccgcaagaccacttacagcaacccccagaagagagcaggaaaggacaacaagaggccaaaggagacgagcgagagcagcggtagacggacaagcaaagacgcgtgccgacaccagaacgaaaaacagaccaggagtctgaacaaaagaaccaggacacaacactgagcaacgcaacaagaaaaccacagggcgaggacacccagccagacgacacacgacagacgcgacaacaccacactggaacat

SEQ ID NO: 291582 - DNA, 1508 bp, Homo sapiens
ccctatccggacaggtggctcttgccctttagactacagttcccagcatgcccaggcgattgcgtcccagaaccgacgtcccaccgccttcccacatcggatcgcagggctcccaaaatggcgagtgaggctgcggggactcgctgagcagcggagggggagcgtgcagagccgctgcggccctcacagtccggagcccggccgtgccgtgccgtagggaacatgcacttttccattcccgaaaccgagtcccgcagcggggacagcggcggctccgcctacgtggcctataacattcacgtgaatggagtcctgcactgtcgggtgcgctacagccagctcctggggctgcacgagcagcttcggaaggagtatggggccaatgtgcttcctgcattccccccgctgcacagaggattgccccttctcttttcagagctggccctcgatgccaaattagcatttagtattttgcacaaagtctaagggaccatggctgcctgccttggggaggaaccatatctccctctgggccgcttctggcctcttggagccatgggccaaaggccaaggggatgggcagaggtctgtgtttggtctggcccagttccccatcattaaactcagcctgactgctgcctacctctggttccctctcactgcccctgcttcccccatcacagcatggactactatgctaagggtaaggccaaattgcctgccattgccaattcagcatagacatggctttgttagtgtttcctttattataaagcactgaaataagttaaataaacaggtgggaggctgggcagtcccccagccggtttgtccacagcccctgggggcagtggaggtgaatacagggcccttctcactgagctcgtgaagtgcctcagtcaaggcaaggtcccctggtccatatgggcccccccgcccatggggttgggctggtccttatagtgcctacgttagtctgtgtggagcccctggccagcgggggagaaaaaggtggcttctggtccgtctgtataaaacatggggaagaaggacctagttcaggatgagtctgtgtggacagcccggctgccagcagtccccagggctggtgggccccgagagctcaaaacagagggtgggctatgaggtggggcccagccctcagaggcagagagaccaggccctcctgccccaccgtggccatgcaccttctggtggcgcttgtagttgtcccagtggcccgtggtataggcgcaggtggcacagcggaagggcttctcgcctgtgtgccgcagcatgtgacgtttgaggttcatgctctggttgcagctgtagttgcaaaggctacaccgaaaaggtttgtcaccagagtggatgcgaccatgacgcttgaggttggccagattgccacaggcataagggcagagggggcacttgtagggcttctctcctgtatggacgcgccatcgtgccgtttcaggttatccagatgagcagaggcataagga

SEQ ID NO: 291583 - DNA, 561 bp, Homo sapiens
accagatgaccatggaatgcggctgtcttttctttggaaaagagggagtgtctgatgaagcactaaggagagcttctgtaagggaaaggcccctcaggacagtcaggggcagaggctctgttacaaggtcctgctcccggagccacagctatgcagttggaggcatcacgctcatataggaatgtgtgcggtcatactgaacacatgtgcaaagccacaaaaacaaggatgtccagtgagggaccaacacattggccgggaacaactcagacacccagcagtctggagcaggttggactggtccggccattctatgcagtactgagctaccccaaagcgggtgcatccacgaagacacaccggattcagttgttaggttaaatgagatgcacgtgtccggaaggaacccaggaaactcttggtcattccctctggagtaccagggtaaaacacatgtgcaagaactttgtcaatagctggggggagggggcgtcacacacgaccctctggtgacagtgagcaaagcctgggctgtgtgctctcctgccctgcacaccctga

SEQ ID NO: 291584 - DNA, 496 bp, Homo sapiens
cttctgagctggaaaggtccaagaaacataggctattgataatgggattttgaatttagtttgtggagggcaattcagtatcaatattctttgaccaaggaatttgtctgctaggaatgtgtgcggtcatactgaacacatgtgcaaagccacaaaaacaaggatgtccagtgagggaccaacacattggccgggaacaactcagacacccagcagtctggagcaggttggactggtccggccattctatgcagtactgagctaccccaaagcgggtgcatccacgaagacacaccggattcagttgttaggttaaatgagatgcacgtgtccggaaggaacccaggaaactcttggtcattccctctggagtaccagggtaaaacacatgtgcaagaactttgtcaatagctggggggagggggcgtcacacacgaccctctggtgacagtgagcaaagcctgggctgtgtgctctcctgccctgcacaccctga

SEQ ID NO: 291585 - DNA, 666 bp, Homo sapiens
gtttccccctgagggaagtatacctgtcctgccagccttggtctctggcagggaaggtccttccaacagagagggaattgcttagaattgactcaacactgcctccttgctgaatggataattcaagcaaacaactcaagagctggatgctgcccagacaggtaggcagccagataaagtgagtgtccagggaaagagcagtaagggtcagaagagaaagagcctggtgttctcactgcctcctgccttccttatgactgtctgttcagaagtcctcctagcatctttcttctgccttcccctgctcctgtccctgaaaccttttcttcaaaagaagtggaaaagaggaactgggaacccatatagcaacagcatcacctggaatgaattcctttagaacatactgtcttggaaatctgaagcctgcagggctggacaggcaagaagagcagtgagcactgcatgaacctgcatgtactccgaaatatttttcaaatggaaaagaaaacagagaacacaattttcaaaatatctagagccctccaagaagtctttgtagagatctataaaatctcaaggcaatttaaagaatagaaaaatgttttagaaacactattctctccacatcctggggcagcagccttctccaaagaaacagaaagaagg

SEQ ID NO: 291586 - DNA, 663 bp, Homo sapiens
ctgggggagaaggaagcctatatattatgtaggatccaagtctcaaactgctttcctagggagtgtgaggttcttggagattaagtgcagtacctttctgtcttgagccttgtaggctgcccctctaatttaatgccagtcttgaaataaacagaatgctttccaagtcatcgctaattttaacactttaaatttagaattgcttagaattgactcaacactgcctccttgctgaatggataattcaagcaaacaactcaagagctggatgctgcccagacaggtaggcagccagataaagtgagtgtccagggaaagagcagtaagggtcagaagagaaagagcctggtgttctcactgcctcctgccttccttatgactgtctgttcagaagtcctcctagcatctttcttctgccttcccctgctcctgtccctgaaaccttttcttcaaaagaagtggaaaagaggaactgggaacccatatagcaacagcatcacctggaatgaattcctttagaacatactgtcttggaaatctgaagcctgcagggctggacaggcaagaagagcagtgagcactgcatgaacctgtaagtaaatctgcatgtggatggtgttttgggtttttttcagacagagccttactctgttgcataggctg

SEQ ID NO: 291587 - DNA, 2116 bp, Homo sapiens
tggctaggagaggcgggggttaatcggacgatgctcagactacaggtgtgagccaccatgcccggccttctcctttaagtattgttggcctcactttcccaactaaaatgggagctcactaagaacaaaggctgttccttcatcttatacttagtaccttgaaagggcctaccacacagtaggtggtcacgtgttagtctgttaggtcttttggattttctaggtagacaatcacatcgattgcaaataatagtctttctcttttcagtctttgtatttcttttttcttgttttattgcattgactgagctcatcagtgaaatgttgaatagtagcaatgatggagggcaccccaatcttattatgctcaatactcattaatttatgcaataggaatgtaaagtacctactgcaggtcaaatcctgtgcctggggataacagtgtaacacatttgagatcttttcctgtccactgaaatgcctgagcagtagcagtatttcagtaaacacgacaatgctgagaatatcaccaaattctccagacttgctgaagtgttcctttgggatcctggttcccaaaaagtatggacataggtccctgctggtggccccaggttccaggccatcagtaaggttgggggctgcagactggaccactgcaccgtggagcagaggtgaagaaaccaagacgcagagaggccaagccccttgccttgggtcacacagccaaaggaggcagagccagaactcacaaccagatccagaggcaacagggacatggccacctgggacgaaaaggcagtcacccgcagggccaaggtggctcccgctgagaggatgagcaagttcttaaggcacttcacggtcgtgggagacgactaccatgcctggaacatcaactacaagaaatgggagaatgaagaggaggaggaggaggaggagcagccaccacccacaccagtctcaggcgtcatcatcatctgcttggtggttctggatgccctcctggtgcttgctgagctcatcctggacctgaagatcatccagcccgacaagaataactatgctgccatggtattccactacatgagcatcaccatcttggtcttttttatgatggagatcatctttaaattatttgtcttccgcctggagttctttcaccacaagtttgagatcctggatgccgtcgtggtggtggtctcattcatcctcgacattgtcctcctgttccaggagcaccagtttgaggctctgggcctgctgattctgctccggctgtggcgggtggcccggatcatcaatgggattatcatctcagttaagacacgttcagaacggcaactcttaaggttaaaacagatgaatgtacaattggccgccaagattcaacaccttgagttcagctgctctgagaaggaacaagaaattgaaagacttaacaaactattgcgacagcatggacttcttggtgaagtgaactagacccggaccagctcccctcaaaaagaagacactgtctcatgggcctgtgctgtcacgagaggaacagctgcccctcctgggccgcttggtgagaggtttggtttgatacctctgcctccctcctgccagcatggattctgggtggacacagccttgtggaaggtccagtaccaccaagagctgcccatccactcccaccccacactgtatcaaatgtatcacattttctcatgttgaacactttagccttaattgaaaatgagcaacaaagctggacaattgctagttgtatataaaatttaatctcaccgaatgtacagttttcaaatttcacgtgtatattaaggaactgatgcatctgagcattctgaaagaaagaaaaagaagctactttagctgccaccccattctagaaaagtctcttattttcaagctgttctaaatagcttcgtctcagtttccccaaaaggggtacccaggcccctcctctgtgtgccccagctgcatcagccagcttctaggtggctccattgttttctgccacctgacaacatttttcctcaattactgtacaactactgtataaaataaaacaactactgtataaaataaactctctcttttccctgga

SEQ ID NO: 291588 - DNA, 1605 bp, Homo sapiens
ctctgaggctcccagtcgcagcggtgaccgcgggcgggtggggcgccgggtgaagaaaccaagacgcagagaggccaagccccttgccttgggtcacacagccaaaggaggcagagccagaactcacaaccagatccagaggcaacagggacatggccacctgggacgaaaaggcagtcacccgcagggccaaggtggctcccgctgagaggatgagcaagttcttaaggcacttcacggtcgtgggagacgactaccatgcctggaacatcaactacaagaaatgggagaatgaagaggaggaggaggaggaggagcagccaccacccacaccagtctcaggcgaggaaggcagagctgcagcccctgacgttgcccctgcccctggccccgcacccagggccccccttgacttcaggggcatgttgaggaaactgttcagctcccacaggtttcaggtcatcatcatctgcttggtggttctggatgccctcctggtgcttgctgagctcatcctggacctgaagatcatccagcccgacaagaataactatgctgccatggtattccactacatgagcatcaccatcttggtcttttttatgatggagatcatctttaaattatttgtcttccgcctggagttctttcaccacaagtttgagatcctggatgccgtcgtggtggtggtctcattcatcctcgacattgtcctcctgttccaggagcaccagtttgaggctctgggcctgctgattctgctccggctgtggcgggtggcccggatcatcaatgggattatcatctcagttaagacacgttcagaacggcaactcttaaggttaaaacagatgaatgtacaattggccgccaagattcaacaccttgagttcagctgctctgagaaggaacaagaaattgaaagacttaacaaactattgcgacagcatggacttcttggtgaagtgaactagacccggaccagctcccctcaaaaagaagacactgtctcatgggcctgtgctgtcacgagaggaacagctgcccctcctgggccgcttggtgagaggtttggtttgatacctctgcctccctcctgccagcatggattctgggtggacacagccttgtggaaggtccagtaccaccaagagctgcccatccactcccaccccacactgtatcaaatgtatcacattttctcatgttgaacactttagccttaattgaaaatgagcaacaaagctggacaattgctagttgtatataaaatttaatctcaccgaatgtacagttttcaaatttcacgtgtatattaaggaactgatgcatctgagcattctgaaagaaagaaaaagaagctactttagctgccaccccattctagaaaagtctcttattttcaagctgttctaaatagcttcgtctcagtttccccaaaaggggtacccaggcccctcctctgtgtgccccagctgcatcagccagcttctaggtggctccattgttttctgccacctgacaacatttttcctcaattactgtacaactactgtataaaataaaacaactactgtataaaataaactctctcttttccctgga

SEQ ID NO: 291589 - DNA, 1605 bp, Homo sapiens
cgagttggcccggagcaaggcggcccaggacaggcaggggctgcacgcggtgaagaaaccaagacgcagagaggccaagccccttgccttgggtcacacagccaaaggaggcagagccagaactcacaaccagatccagaggcaacagggacatggccacctgggacgaaaaggcagtcacccgcagggccaaggtggctcccgctgagaggatgagcaagttcttaaggcacttcacggtcgtgggagacgactaccatgcctggaacatcaactacaagaaatgggagaatgaagaggaggaggaggaggaggagcagccaccacccacaccagtctcaggcgaggaaggcagagctgcagcccctgacgttgcccctgcccctggccccgcacccagggccccccttgacttcaggggcatgttgaggaaactgttcagctcccacaggtttcaggtcatcatcatctgcttggtggttctggatgccctcctggtgcttgctgagctcatcctggacctgaagatcatccagcccgacaagaataactatgctgccatggtattccactacatgagcatcaccatcttggtcttttttatgatggagatcatctttaaattatttgtcttccgcctggagttctttcaccacaagtttgagatcctggatgccgtcgtggtggtggtctcattcatcctcgacattgtcctcctgttccaggagcaccagtttgaggctctgggcctgctgattctgctccggctgtggcgggtggcccggatcatcaatgggattatcatctcagttaagacacgttcagaacggcaactcttaaggttaaaacagatgaatgtacaattggccgccaagattcaacaccttgagttcagctgctctgagaaggaacaagaaattgaaagacttaacaaactattgcgacagcatggacttcttggtgaagtgaactagacccggaccagctcccctcaaaaagaagacactgtctcatgggcctgtgctgtcacgagaggaacagctgcccctcctgggccgcttggtgagaggtttggtttgatacctctgcctccctcctgccagcatggattctgggtggacacagccttgtggaaggtccagtaccaccaagagctgcccatccactcccaccccacactgtatcaaatgtatcacattttctcatgttgaacactttagccttaattgaaaatgagcaacaaagctggacaattgctagttgtatataaaatttaatctcaccgaatgtacagttttcaaatttcacgtgtatattaaggaactgatgcatctgagcattctgaaagaaagaaaaagaagctactttagctgccaccccattctagaaaagtctcttattttcaagctgttctaaatagcttcgtctcagtttccccaaaaggggtacccaggcccctcctctgtgtgccccagctgcatcagccagcttctaggtggctccattgttttctgccacctgacaacatttttcctcaattactgtacaactactgtataaaataaaacaactactgtataaaataaactctctcttttccctgga

SEQ ID NO: 291590 - DNA, 1823 bp, Homo sapiens
cttgtcccacgctttctaggatgggaaccaaggtgacatctgtacacatattgagttgatgatctcagctcactgactgcaacctccaccccagattcaagcaattttcctgtctcagcctcccaagtagcaggatttacagagaacgctgcctacctcaccccaacggcatttgaaagtagactggctcatctgaaatgcttatttgcaagcatctaacttcctgaccctgtgtcacagatggccccacttggccccaagcccctggtgaagaaaccaagacgcagagaggccaagccccttgccttgggtcacacagccaaaggaggcagagccagaactcacaaccagatccagaggcaacagggacatggccacctgggacgaaaaggcagtcacccgcagggccaaggtggctcccgctgagaggatgagcaagttcttaaggcacttcacggtcgtgggagacgactaccatgcctggaacatcaactacaagaaatgggagaatgaagaggaggaggaggaggaggagcagccaccacccacaccagtctcaggcgaggaaggcagagctgcagcccctgacgttgcccctgcccctggccccgcacccagggccccccttgacttcaggggcatgttgaggaaactgttcagctcccacaggtttcaggtcatcatcatctgcttggtggttctggatgccctcctggtgcttgctgagctcatcctggacctgaagatcatccagcccgacaagaataactatgctgccatggtattccactacatgagcatcaccatcttggtcttttttatgatggagatcatctttaaattatttgtcttccgcctggagttctttcaccacaagtttgagatcctggatgccgtcgtggtggtggtctcattcatcctcgacattgtcctcctgttccaggagcaccagtttgaggctctgggcctgctgattctgctccggctgtggcgggtggcccggatcatcaatgggattatcatctcagttaagacacgttcagaacggcaactcttaaggttaaaacagatgaatgtacaattggccgccaagattcaacaccttgagttcagctgctctgagaaggaacaagaaattgaaagacttaacaaactattgcgacagcatggacttcttggtgaagtgaactagacccggaccagctcccctcaaaaagaagacactgtctcatgggcctgtgctgtcacgagaggaacagctgcccctcctgggccgcttggtgagaggtttggtttgatacctctgcctccctcctgccagcatggattctgggtggacacagccttgtggaaggtccagtaccaccaagagctgcccatccactcccaccccacactgtatcaaatgtatcacattttctcatgttgaacactttagccttaattgaaaatgagcaacaaagctggacaattgctagttgtatataaaatttaatctcaccgaatgtacagttttcaaatttcacgtgtatattaaggaactgatgcatctgagcattctgaaagaaagaaaaagaagctactttagctgccaccccattctagaaaagtctcttattttcaagctgttctaaatagcttcgtctcagtttccccaaaaggggtacccaggcccctcctctgtgtgccccagctgcatcagccagcttctaggtggctccattgttttctgccacctgacaacatttttcctcaattactgtacaactactgtataaaataaaacaactactgtataaaataaactctctcttttccctgga

SEQ ID NO: 291591 - DNA, 1727 bp, Homo sapiens
accaagggaagttctgagggctgagaggttgctcattcgtcagagcgtgctgcccaccctccacccctgcatggcagaaactgtgcaggggacgaggccaaggaatcaggagacccagaggcaggggtggcccggagacggtgggatggagcagaagctccccgaaaggggttggcggggtggattcgccccgctccagccggcggaggaagtgaagaaaccaagacgcagagaggccaagccccttgccttgggtcacacagccaaaggaggcagagccagaactcacaaccaggcagtcacccgcagggccaaggtggctcccgctgagaggatgagcaagttcttaaggcacttcacggtcgtgggagacgactaccatgcctggaacatcaactacaagaaatgggagaatgaagaggaggaggaggaggaggagcagccaccacccacaccagtctcaggcgaggaaggcagagctgcagcccctgacgttgcccctgcccctggccccgcacccagggccccccttgacttcaggggcatgttgaggaaactgttcagctcccacaggtttcaggtcatcatcatctgcttggtggttctggatgccctcctggtgcttgctgagctcatcctggacctgaagatcatccagcccgacaagaataactatgctgccatggtattccactacatgagcatcaccatcttggtcttttttatgatggagatcatctttaaattatttgtcttccgcctggagttctttcaccacaagtttgagatcctggatgccgtcgtggtggtggtctcattcatcctcgacattgtcctcctgttccaggagcaccagtttgaggctctgggcctgctgattctgctccggctgtggcgggtggcccggatcatcaatgggattatcatctcagttaagacacgttcagaacggcaactcttaaggttaaaacagatgaatgtacaattggccgccaagattcaacaccttgagttcagctgctctgagaaggaacaagaaattgaaagacttaacaaactattgcgacagcatggacttcttggtgaagtgaactagacccggaccagctcccctcaaaaagaagacactgtctcatgggcctgtgctgtcacgagaggaacagctgcccctcctgggccgcttggtgagaggtttggtttgatacctctgcctccctcctgccagcatggattctgggtggacacagccttgtggaaggtccagtaccaccaagagctgcccatccactcccaccccacactgtatcaaatgtatcacattttctcatgttgaacactttagccttaattgaaaatgagcaacaaagctggacaattgctagttgtatataaaatttaatctcaccgaatgtacagttttcaaatttcacgtgtatattaaggaactgatgcatctgagcattctgaaagaaagaaaaagaagctactttagctgccaccccattctagaaaagtctcttattttcaagctgttctaaatagcttcgtctcagtttccccaaaaggggtacccaggcccctcctctgtgtgccccagctgcatcagccagcttctaggtggctccattgttttctgccacctgacaacatttttcctcaattactgtacaactactgtataaaataaaacaactactgtataaaataaactctctcttttccctgga

SEQ ID NO: 291592 - DNA, 1565 bp, Homo sapiens
ctctgaggctcccagtcgcagcggtgaccgcgggcgggtggggcgccgggtgaagaaaccaagacgcagagaggccaagccccttgccttgggtcacacagccaaaggaggcagagccagaactcacaaccaggcagtcacccgcagggccaaggtggctcccgctgagaggatgagcaagttcttaaggcacttcacggtcgtgggagacgactaccatgcctggaacatcaactacaagaaatgggagaatgaagaggaggaggaggaggaggagcagccaccacccacaccagtctcaggcgaggaaggcagagctgcagcccctgacgttgcccctgcccctggccccgcacccagggccccccttgacttcaggggcatgttgaggaaactgttcagctcccacaggtttcaggtcatcatcatctgcttggtggttctggatgccctcctggtgcttgctgagctcatcctggacctgaagatcatccagcccgacaagaataactatgctgccatggtattccactacatgagcatcaccatcttggtcttttttatgatggagatcatctttaaattatttgtcttccgcctggagttctttcaccacaagtttgagatcctggatgccgtcgtggtggtggtctcattcatcctcgacattgtcctcctgttccaggagcaccagtttgaggctctgggcctgctgattctgctccggctgtggcgggtggcccggatcatcaatgggattatcatctcagttaagacacgttcagaacggcaactcttaaggttaaaacagatgaatgtacaattggccgccaagattcaacaccttgagttcagctgctctgagaaggaacaagaaattgaaagacttaacaaactattgcgacagcatggacttcttggtgaagtgaactagacccggaccagctcccctcaaaaagaagacactgtctcatgggcctgtgctgtcacgagaggaacagctgcccctcctgggccgcttggtgagaggtttggtttgatacctctgcctccctcctgccagcatggattctgggtggacacagccttgtggaaggtccagtaccaccaagagctgcccatccactcccaccccacactgtatcaaatgtatcacattttctcatgttgaacactttagccttaattgaaaatgagcaacaaagctggacaattgctagttgtatataaaatttaatctcaccgaatgtacagttttcaaatttcacgtgtatattaaggaactgatgcatctgagcattctgaaagaaagaaaaagaagctactttagctgccaccccattctagaaaagtctcttattttcaagctgttctaaatagcttcgtctcagtttccccaaaaggggtacccaggcccctcctctgtgtgccccagctgcatcagccagcttctaggtggctccattgttttctgccacctgacaacatttttcctcaattactgtacaactactgtataaaataaaacaactactgtataaaataaactctctcttttccctgga

SEQ ID NO: 291593 - DNA, 1489 bp, Homo sapiens
tgtgggctctgagtggccaactgcctgaagctcttgctctctgtccccgccttctaggcagtcacccgcagggccaaggtggctcccgctgagaggatgagcaagttcttaaggcacttcacggtcgtgggagacgactaccatgcctggaacatcaactacaagaaatgggagaatgaagaggaggaggaggaggaggagcagccaccacccacaccagtctcaggcgaggaaggcagagctgcagcccctgacgttgcccctgcccctggccccgcacccagggccccccttgacttcaggggcatgttgaggaaactgttcagctcccacaggtttcaggtcatcatcatctgcttggtggttctggatgccctcctggtgcttgctgagctcatcctggacctgaagatcatccagcccgacaagaataactatgctgccatggtattccactacatgagcatcaccatcttggtcttttttatgatggagatcatctttaaattatttgtcttccgcctggagttctttcaccacaagtttgagatcctggatgccgtcgtggtggtggtctcattcatcctcgacattgtcctcctgttccaggagcaccagtttgaggctctgggcctgctgattctgctccggctgtggcgggtggcccggatcatcaatgggattatcatctcagttaagacacgttcagaacggcaactcttaaggttaaaacagatgaatgtacaattggccgccaagattcaacaccttgagttcagctgctctgagaaggaacaagaaattgaaagacttaacaaactattgcgacagcatggacttcttggtgaagtgaactagacccggaccagctcccctcaaaaagaagacactgtctcatgggcctgtgctgtcacgagaggaacagctgcccctcctgggccgcttggtgagaggtttggtttgatacctctgcctccctcctgccagcatggattctgggtggacacagccttgtggaaggtccagtaccaccaagagctgcccatccactcccaccccacactgtatcaaatgtatcacattttctcatgttgaacactttagccttaattgaaaatgagcaacaaagctggacaattgctagttgtatataaaatttaatctcaccgaatgtacagttttcaaatttcacgtgtatattaaggaactgatgcatctgagcattctgaaagaaagaaaaagaagctactttagctgccaccccattctagaaaagtctcttattttcaagctgttctaaatagcttcgtctcagtttccccaaaaggggtacccaggcccctcctctgtgtgccccagctgcatcagccagcttctaggtggctccattgttttctgccacctgacaacatttttcctcaattactgtacaactactgtataaaataaaacaactactgtataaaataaactctctcttttccctgga

SEQ ID NO: 291594 - DNA, 1821 bp, Homo sapiens
  misc_feature (1755)..(1755): n is a, c, g, or t
ctctgaggctcccagtcgcagcggtgaccgcgggcgggtggggcgccgggtgaagaaaccaagacgcagagaggccaagccccttgccttgggtcacacagccaaaggaggcagagccagaactcacaaccagatccagaggcaacagggacatggccacctgggacgaaaaggcagtcacccgcagggccaaggtggctcccgctgagaggatgagcaagttcttaaggcacttcacggtcgtgggagacgactaccatgcctggaacatcaactacaagaaatgggagaatgaagaggaggaggaggaggaggagcagccaccacccacaccagtctcaggcgaggaaggcagagctgcagcccctgacgttgcccctgcccctggccccgcacccagggccccccttgacttcaggggcatgttgaggaaactgttcagctcccacaggtttcaggtcatcatcatctgcttggtggttctggatgccctcctggtgcttgctgagctcatcctggacctgaagatcatccagcccgacaagaataactatgctgccatggtattccactacatgagcatcaccatcttggtcttttttatgatggagatcatctttaaattatttgtcttccgcctggagttctttcaccacaagtttgagatcctggatgccgtcgtggtggtggtctcattcatcctcgacattgtcctcctgttccaggagcaccagtttgaggctctgggcctgctgattctgctccggctgtggcgggtggcccggatcatcaatgggattatcatctcagttaagacacgttcagaacggcaactcttaaggttaaaacagatgaatgtacaattggccgccaagattcaacaccttgagttcagctgctctgagaaggaacaagaaattgaaagacttaacaaactattgcgacagcatggacttcttggtgaagtgaactagacccggaccagctcccctcaaaaagaagacactgtctcatgggcctgtgctgtcacgagaggaacagctgcccctcctgggccgcttggtgagaggtttggtttgatacctctgcctccctcctgccagcatggattctgggtggacacagccttgtggaaggtccagtaccaccaagagctgcccatccactcccaccccacactgtatcaaatgtatcacattttctcatgttgaacactttagccttaattgaaaatgagcaacaaagctggacaattgctagttgtatataaaatttaatctcaccgaatgtacagttttcaaatttcacgtgtatattaaggaactgatgcatctgagcattctgaaagaaagaaaaagaagctactttagctgccaccccattctagaaaagtctcttattttcaagctgttctaaatagcttcgtctcagtttccccaaaaggggtacccaggcccctcctctgtgtgccccagctgcatcagccagcttctaggtggctccattgttttctgccacctgacaacatttttcctcaattactgtacaactactgtataaaataaaacaactactgtataaaataaactctctcttttccctggaaaaaaaaaaaaaaaaaaaaaaaaaagaaaaaaaaaaaaaaaaaaaaaaaaaaaaaaaaaaaaaaaaaaacaaaaaaaaaataaaaagagaaggagcgagccaacgacgaacataaataactgaccatcgagaaccaccaccacctaatgnccactcccccttacactatctcaaatagacacaacgcacacaaaagaagagaagaaaataaacagg

SEQ ID NO: 291595 - DNA, 1653 bp, Homo sapiens
accaagggaagttctgagggctgagaggttgctcattcgtcagagcgtgctgcccaccctccacccctgcatggcagaaactgtgcaggggacgaggccaaggaatcaggagacccagaggcaggggtggcccggagacggtgggatggagcagaagctccccgaaaggggttggcggggtggattcgccccgctccagccggcggaggaagtgaagaaaccaagacgcagagaggccaagccccttgccttgggtcacacagccaaaggaggcagagccagaactcacaaccagatccagaggcaacagggacatggccacctgggacgaaaaggcagtcacccgcagggccaaggtggctcccgctgagaggatgagcaagttcttaaggcacttcacggtcgtgggagacgactaccatgcctggaacatcaactacaagaaatgggagaatgaagaggaggaggaggaggaggagcagccaccacccacaccagtctcaggcgtcatcatcatctgcttggtggttctggatgccctcctggtgcttgctgagctcatcctggacctgaagatcatccagcccgacaagaataactatgctgccatggtattccactacatgagcatcaccatcttggtcttttttatgatggagatcatctttaaattatttgtcttccgcctggagttctttcaccacaagtttgagatcctggatgccgtcgtggtggtggtctcattcatcctcgacattgtcctcctgttccaggagcaccagtttgaggctctgggcctgctgattctgctccggctgtggcgggtggcccggatcatcaatgggattatcatctcagttaagacacgttcagaacggcaactcttaaggttaaaacagatgaatgtacaattggccgccaagattcaacaccttgagttcagctgctctgagaaggaacaagaaattgaaagacttaacaaactattgcgacagcatggacttcttggtgaagtgaactagacccggaccagctcccctcaaaaagaagacactgtctcatgggcctgtgctgtcacgagaggaacagctgcccctcctgggccgcttggtgagaggtttggtttgatacctctgcctccctcctgccagcatggattctgggtggacacagccttgtggaaggtccagtaccaccaagagctgcccatccactcccaccccacactgtatcaaatgtatcacattttctcatgttgaacactttagccttaattgaaaatgagcaacaaagctggacaattgctagttgtatataaaatttaatctcaccgaatgtacagttttcaaatttcacgtgtatattaaggaactgatgcatctgagcattctgaaagaaagaaaaagaagctactttagctgccaccccattctagaaaagtctcttattttcaagctgttctaaatagcttcgtctcagtttccccaaaaggggtacccaggcccctcctctgtgtgccccagctgcatcagccagcttctaggtggctccattgttttctgccacctgacaacatttttcctcaattactgtacaactactgtataaaataaaacaactactgtataaaataaactctctcttttccctgga

SEQ ID NO: 291596 - DNA, 1373 bp, Homo sapiens
cgagttggcccggagcaaggcggcccaggacaggcaggggctgcacgcggtgaagaaaccaagacgcagagaggccaagccccttgccttgggtcacacagccaaaggaggcagagccagaactcacaaccagatccagaggcaacagggacatggccacctgggacgaaaaggcagtcacccgcagggccaaggtggctcccgctgagaggatgagcaagttcttaaggcacttcacggtcgtgggagacgactaccatgcctggaacatcaactacaagaaatgggagaatgaagaggaggaggaggaggaggagcagccaccacccacaccagtctcaggcgaggaaggcagagctgcagcccctgacgttgcccctgcccctggccccgcacccagggccccccttgacttcaggggcatgttgaggaaactgttcagctcccacaggtttcaggtcatcatcatctgcttggtggttctggatgccctcctggtgcttgctgagctcatcctggacctgaagatcatccagcccgacaagaataactatgctgccatgggattatcatctcagttaagacacgttcagaacggcaactcttaaggttaaaacagatgaatgtacaattggccgccaagattcaacaccttgagttcagctgctctgagaaggaacaagaaattgaaagacttaacaaactattgcgacagcatggacttcttggtgaagtgaactagacccggaccagctcccctcaaaaagaagacactgtctcatgggcctgtgctgtcacgagaggaacagctgcccctcctgggccgcttggtgagaggtttggtttgatacctctgcctccctcctgccagcatggattctgggtggacacagccttgtggaaggtccagtaccaccaagagctgcccatccactcccaccccacactgtatcaaatgtatcacattttctcatgttgaacactttagccttaattgaaaatgagcaacaaagctggacaattgctagttgtatataaaatttaatctcaccgaatgtacagttttcaaatttcacgtgtatattaaggaactgatgcatctgagcattctgaaagaaagaaaaagaagctactttagctgccaccccattctagaaaagtctcttattttcaagctgttctaaatagcttcgtctcagtttccccaaaaggggtacccaggcccctcctctgtgtgccccagctgcatcagccagcttctaggtggctccattgttttctgccacctgacaacatttttcctcaattactgtacaactactgtataaaataaaacaactactgtataaaataaactctctcttttccctgga

SEQ ID NO: 291597 - DNA, 587 bp, Homo sapiens
cagtttcatatatgcccctcttctgatccttcctcctgttggctgaatgcaaacaaaatgaatggagctggagaaattgtattgaactatgacatagaagccaaacaccaaggatgacaaagcaaggagctacaaataatctggattcctgacatcatagacctccattctggccttattcatctacctggatttttatgcttggagtcttctgtgaacccattgcgtggatgcatcacaagaacaccattagtggtcaagccatccatctgtccatctgatgtcttccatttggcagccttctcctagtagaaataatagcagtgagcttccaacttgtaacttgtaacttggaatgaaagctagtataaaagaaagcatcatttagaaaaaaagctttttaccccaagaaagatgttttttgatgagtcaaatcctgcagcataaatccgtgctgtaaagggaggattccgttcacatatgattctgcaggcaaatcttgatatagtgctttgtactgactgtgtatcagaattactttgacttccaggaaccgtgtcagttactacaaaatcaatggggctttc

SEQ ID NO: 291598 - DNA, 1823 bp, Homo sapiens
cggcgggccccgcagcgccggacgctggttgcgcgctcccaggcgccgagcggccccgggcacgcgcgcgcgccaccggcccggcaggtgctgtccttattcccagcccagtcaagagctaccggggctggctagtcatgggggagcccagtagagaggagtataaaatccagtcctttgatgcagagacccagcagctgctgaagacagcactcaaagatccgggtgctgtggacttggagaaagtggccaatgtgattgtggaccattctctgcaggactgtgtgttcagcaaggaagcaggacgcatgtgctacgccatcattcaggcagagagtaaacaagcaggccagagtgtcttccgacgtggactcctcaaccggctgcagcaggagtaccaggctcgggagcagctgcgagcacgctccctgcagggctgggtctgctatgtcacctttatctgcaacatctttgactacctgagggtgaacaacatgcccatgatggccctggtgaaccctgtctatgactgcctcttccggctggcccagccagacagtttgagcaaggaggaggaggtggactgtttggtgctgcagctgcaccgggttggggagcagctggagaaaatgaatgggcagcgcatggatgagctctttgtgctgatccgggatggcttcctgctcccaactggcctcagctccctggcccagctgctgctgctggagatcattgagttccgggcggccggctggaagacaacgccagctgcccacaagtattactacagcgaagtctccgactaggcctccagatcagggcttcctcaccagcactggcctttcttctacccacctctaaagctggcagtggagtctctgcctcacccaaagacttttcccttccagactttgagtgtcttcccttctagactttcccatctcctggtgagatgtttcccacttatgccgtggtcctgccctgagcccctttccccaccacaacccaccacggccaggcagagaagggcaactcccaagagccactgcactgtgtaaccattagtgcaactactaccttggtgcctcagtttacccatctgtaaaatgggtaagcatagccactggtgggatattttgggatgtcaaggggtggaggcagagcacaagtcacaccagaaactgctttttatacattttgtataaggacaactctggaaacaagcctatttcctccagccagtttcactgaatgctgcaccacatgctacaccagttcagcgtgagaattttctaataaatcttttctgatactaaaactgcttcctttatatgtccaaaggtccgccccaacctaagggaagagaaaacagccctgagtttcctggaggaaattcccaagtcaatgtgctccctctttacaaggaaataggggcagagagagcaagttccagcctcaaagaaagaaggattaacggatagtgaatatgctgctacatctttcttacgaggcctgcccacccttacaaaggaactacatccttaacccacaggtagttttcagcgtggcagtagctcacactgtttcttgcggcagagggccctgggctcctcctggagactctaccaccagcggtagtgggccagggcacggttggcctctgccatcttgtgcaagtcatgcttcctcttgatcacggggccctggttatggaaagcctccagcagcttgtgtgacagcttctccggcatcagtgtccgctggtgctttttatcccggcactcagtgatcatccacttcatggctaggaagcggcgacgccg

SEQ ID NO: 291599 - DNA, 2615 bp, Homo sapiens
ccgcctctcccgcccgcgggaccctgggccgtgggctccgcagcccgccctgtgcctccgggaggggcgttccgggcgcggggggaacggccgagggctggagaccctaaaggcgcctcctacggccagaggggagcctccggcgggagccacctctccggggcgcatcatcctgccccccagtaagaggaaggctccagaatggagctcaggaattaggagtctcgagtgcgtagggccgggttactgccactcgggagccgatccgaccagcctgtcccagggagaagctggcacgggtctggggagttcaggctgctcccggcaggggcggcggacagggcgcctgcgtccccacccacgcaggccggccccatccgggggatgcagcggcgggtgttgagaccgaaggactcggcgaaagccagaaagagagggttggggagaggggctcggagacctgctggggacagagtcgcaccgcttggagttcccagcctggccctcacccggcatcttcctgggccagcaacgtcaggccggtttatttaagcaactgtaacgtccgcccgcacacaccctgccccagtctactcctgcctcctgctgggactggagggtgggcgctttcctgcttcagcttctcgctcttgtgtaatcccacaagcgagggatttctaaactgagcagcaggtgcctggctgatgcccagtccccaccagaagccaagcctggtgggccttcagccaaccaccgcacgccacggaccgcccaggagtccctgtcccgagcgcgccgtcagccccgtccagggcctgcaggacggaacccgccctgcgctccacacctgaggccgctcccttcgcctcttctcctcaggtgctgtccttattcccagcccagtcaagagctaccggggctggctagtcatgggggagcccagtagagaggagtataaaatccagtcctttgatgcagagacccagcagctgctgaagacagcactcaaagatccgggtgctgtggacttggagaaagtggccaatgtgattgtggaccattctctgcaggactgtgtgttcagcaaggaagcaggacgcatgtgctacgccatcattcaggcagagagtaaacaagcaggccagagtgtcttccgacgtggactcctcaaccggctgcagcaggagtaccaggctcgggagcagctgcgagcacgctccctgcagggctgggtctgctatgtcacctttatctgcaacatctttgactacctgagggtgaacaacatgcccatgatggccctggtgaaccctgtctatgactgcctcttccggctggcccagccagacagtttgagcaaggaggaggaggtggactgtttggtgctgcagctgcaccgggttggggagcagctggagaaaatgaatgggcagcgcatggatgagctctttgtgctgatccgggatggcttcctgctcccaactggcctcagctccctggcccagctgctgctgctggagatcattgagttccgggcggccggctggaagacaacgccagctgcccacaagtattactacagcgaagtctccgactaggcctccagatcagggcttcctcaccagcactggcctttcttctacccacctctaaagctggcagtggagtctctgcctcacccaaagacttttcccttccagactttgagtgtcttcccttctagactttcccatctcctggtgagatgtttcccacttatgccgtggtcctgccctgagcccctttccccaccacaacccaccacggccaggcagagaagggcaactcccaagagccactgcactgtgtaaccattagtgcaactactaccttggtgcctcagtttacccatctgtaaaatgggtaagcatagccactggtgggatattttgggatgtcaaggggtggaggcagagcacaagtcacaccagaaactgctttttatacattttgtataaggacaactctggaaacaagcctatttcctccagccagtttcactgaatgctgcaccacatgctacaccagttcagcgtgagaattttctaataaatcttttctgatactaaaactgcttcctttatatgtccaaaggtccgccccaacctaagggaagagaaaacagccctgagtttcctggaggaaattcccaagtcaatgtgctccctctttacaaggaaataggggcagagagagcaagttccagcctcaaagaaagaaggattaacggatagtgaatatgctgctacatctttcttacgaggcctgcccacccttacaaaggaactacatccttaacccacaggtagttttcagcgtggcagtagctcacactgtttcttgcggcagagggccctgggctcctcctggagactctaccaccagcggtagtgggccagggcacggttggcctctgccatcttgtgcaagtcatgcttcctcttgatcacggggccctggttatggaaagcctccagcagcttgtgtgacagcttctccggcatcagtgtccgctggtgctttttatcccggcactcagtgatcatccacttcatggctaggaagcggcgacgccg

SEQ ID NO: 291600 - DNA, 1918 bp, Homo sapiens
ccgcctctcccgcccgcgggaccctgggccgtgggctccgcagcccgccctgtgcctccgggaggggcgttccgggcgcggggggaacggccgagggctggagaccctaaaggcgcctcctacggccagaggggagcctccggcgggagccacctctccggggcgcatcatcctgccccccagtgctgtccttattcccagcccagtcaagagctaccggggctggctagtcatgggggagcccagtagagaggagtataaaatccagtcctttgatgcagagacccagcagctgctgaagacagcactcaaagatccgggtgctgtggacttggagaaagtggccaatgtgattgtggaccattctctgcaggactgtgtgttcagcaaggaagcaggacgcatgtgctacgccatcattcaggcagagagtaaacaagcaggccagagtgtcttccgacgtggactcctcaaccggctgcagcaggagtaccaggctcgggagcagctgcgagcacgctccctgcagggctgggtctgctatgtcacctttatctgcaacatctttgactacctgagggtgaacaacatgcccatgatggccctggtgaaccctgtctatgactgcctcttccggctggcccagccagacagtttgagcaaggaggaggaggtggactgtttggtgctgcagctgcaccgggttggggagcagctggagaaaatgaatgggcagcgcatggatgagctctttgtgctgatccgggatggcttcctgctcccaactggcctcagctccctggcccagctgctgctgctggagatcattgagttccgggcggccggctggaagacaacgccagctgcccacaagtattactacagcgaagtctccgactaggcctccagatcagggcttcctcaccagcactggcctttcttctacccacctctaaagctggcagtggagtctctgcctcacccaaagacttttcccttccagactttgagtgtcttcccttctagactttcccatctcctggtgagatgtttcccacttatgccgtggtcctgccctgagcccctttccccaccacaacccaccacggccaggcagagaagggcaactcccaagagccactgcactgtgtaaccattagtgcaactactaccttggtgcctcagtttacccatctgtaaaatgggtaagcatagccactggtgggatattttgggatgtcaaggggtggaggcagagcacaagtcacaccagaaactgctttttatacattttgtataaggacaactctggaaacaagcctatttcctccagccagtttcactgaatgctgcaccacatgctacaccagttcagcgtgagaattttctaataaatcttttctgatactaaaactgcttcctttatatgtccaaaggtccgccccaacctaagggaagagaaaacagccctgagtttcctggaggaaattcccaagtcaatgtgctccctctttacaaggaaataggggcagagagagcaagttccagcctcaaagaaagaaggattaacggatagtgaatatgctgctacatctttcttacgaggcctgcccacccttacaaaggaactacatccttaacccacaggtagttttcagcgtggcagtagctcacactgtttcttgcggcagagggccctgggctcctcctggagactctaccaccagcggtagtgggccagggcacggttggcctctgccatcttgtgcaagtcatgcttcctcttgatcacggggccctggttatggaaagcctccagcagcttgtgtgacagcttctccggcatcagtgtccgctggtgctttttatcccggcactcagtgatcatccacttcatggctaggaagcggcgacgccg

SEQ ID NO: 291601 - DNA, 2796 bp, Homo sapiens
ccgcctctcccgcccgcgggaccctgggccgtgggctccgcagcccgccctgtgcctccgggaggggcgttccgggcgcggggggaacggccgagggctggagaccctaaaggcgcctcctacggccagaggggagcctccggcgggagccacctctccggggcgcatcatcctgccccccagtaagaggaaggctccagaatggagctcaggaattaggagtctcgagtgcgtagggccgggttactgccactcgggagccgatccgaccagcctgtcccagggagaagctggcacgggtctggggagttcaggctgctcccggcaggggcggcggacagggcgcctgcgtccccacccacgcaggccggccccatccgggggatgcagcggcgggtgttgagaccgaaggactcggcgaaagccagaaagagagggttggggagaggggctcggagacctgctggggacagagtcgcaccgcttggagttcccagcctggccctcacccggcatcttcctgggccagcaacgtcaggccggtttatttaagcaactgtaacgtccgcccgcacacaccctgccccagtctactcctgcctcctgctgggactggagggtgggcgctttcctgcttcagcttctcgctcttgtgtaatcccacaagcgagggatttctaaactgagcagcaggtgcctggctgatgcccagtccccaccagaagccaagcctggtgggccttcagccaaccaccgcacgccacggaccgcccaggagtccctgtcccgagcgcgccgtcagccccgtccagggcctgcaggacggaacccgccctgcgctccacacctgaggccgctcccttcgcctcttctcctcaggtgctgtccttattcccagcccagtcaagagctaccggggctggctagtcatgggggagcccagtagagaggagtataaaatccagtcctttgatgcagagacccagcagctgctgaagacagcactcaaagatccgggtgctgtggacttggagaaagtggccaatgtgattgtggaccattctctgcaggactgtgtgttcagcaaggaagcaggacgcatgtgctacgccatcattcaggttgggggttgggagaggaaaggaagctgctttgaggaaggtgcttcaggagtgggcagaaggcctggcctgcaggacagagatgcacagggtctagctcaaagagagagagaggcataggatgggtggggttacaggggcaccgccccccacccttcaccttcctctccctggctcacaggcagagagtaaacaagcaggccagagtgtcttccgacgtggactcctcaaccggctgcagcaggagtaccaggctcgggagcagctgcgagcacgctccctgcagggctgggtctgctatgtcacctttatctgcaacatctttgactacctgagggtgaacaacatgcccatgatggccctggtgaaccctgtctatgactgcctcttccggctggcccagccagacagtttgagcaaggaggaggaggtggactgtttggtgctgcagctgcaccgggttggggagcagctggagaaaatgaatgggcagcgcatggatgagctctttgtgctgatccgggatggcttcctgctcccaactggcctcagctccctggcccagctgctgctgctggagatcattgagttccgggcggccggctggaagacaacgccagctgcccacaagtattactacagcgaagtctccgactaggcctccagatcagggcttcctcaccagcactggcctttcttctacccacctctaaagctggcagtggagtctctgcctcacccaaagacttttcccttccagactttgagtgtcttcccttctagactttcccatctcctggtgagatgtttcccacttatgccgtggtcctgccctgagcccctttccccaccacaacccaccacggccaggcagagaagggcaactcccaagagccactgcactgtgtaaccattagtgcaactactaccttggtgcctcagtttacccatctgtaaaatgggtaagcatagccactggtgggatattttgggatgtcaaggggtggaggcagagcacaagtcacaccagaaactgctttttatacattttgtataaggacaactctggaaacaagcctatttcctccagccagtttcactgaatgctgcaccacatgctacaccagttcagcgtgagaattttctaataaatcttttctgatactaaaactgcttcctttatatgtccaaaggtccgccccaacctaagggaagagaaaacagccctgagtttcctggaggaaattcccaagtcaatgtgctccctctttacaaggaaataggggcagagagagcaagttccagcctcaaagaaagaaggattaacggatagtgaatatgctgctacatctttcttacgaggcctgcccacccttacaaaggaactacatccttaacccacaggtagttttcagcgtggcagtagctcacactgtttcttgcggcagagggccctgggctcctcctggagactctaccaccagcggtagtgggccagggcacggttggcctctgccatcttgtgcaagtcatgcttcctcttgatcacggggccctggttatggaaagcctccagcagcttgtgtgacagcttctccggcatcagtgtccgctggtgctttttatcccggcactcagtgatcatccacttcatggctaggaagcggcgacgccg

SEQ ID NO: 291602 - DNA, 1892 bp, Homo sapiens
cggcgggccccgcagcgccggacgctggttgcgcgctcccaggcgccgagcggccccgggcacgcgcgcgcgccaccggcccggcaggtgctgtccttattcccagcccagtcaagagctaccggggctggctagtcatgggggagcccagtagagaggagtataccccgtctcttgaatgcacagttgcctgctttgagacagaagatggagaatattccgtttgccagaggagctatagtaattgctctcgcctgatgccttcccgctgtaacacgcagtacagagatccgggtgctgtggacttggagaaagtggccaatgtgattgtggaccattctctgcaggactgtgtgttcagcaaggaagcaggacgcatgtgctacgccatcattcaggcagagagtaaacaagcaggccagagtgtcttccgacgtggactcctcaaccggctgcagcaggagtaccaggctcgggagcagctgcgagcacgctccctgcagggctgggtctgctatgtcacctttatctgcaacatctttgactacctgagggtgaacaacatgcccatgatggccctggtgaaccctgtctatgactgcctcttccggctggcccagccagacagtttgagcaaggaggaggaggtggactgtttggtgctgcagctgcaccgggttggggagcagctggagaaaatgaatgggcagcgcatggatgagctctttgtgctgatccgggatggcttcctgctcccaactggcctcagctccctggcccagctgctgctgctggagatcattgagttccgggcggccggctggaagacaacgccagctgcccacaagtattactacagcgaagtctccgactaggcctccagatcagggcttcctcaccagcactggcctttcttctacccacctctaaagctggcagtggagtctctgcctcacccaaagacttttcccttccagactttgagtgtcttcccttctagactttcccatctcctggtgagatgtttcccacttatgccgtggtcctgccctgagcccctttccccaccacaacccaccacggccaggcagagaagggcaactcccaagagccactgcactgtgtaaccattagtgcaactactaccttggtgcctcagtttacccatctgtaaaatgggtaagcatagccactggtgggatattttgggatgtcaaggggtggaggcagagcacaagtcacaccagaaactgctttttatacattttgtataaggacaactctggaaacaagcctatttcctccagccagtttcactgaatgctgcaccacatgctacaccagttcagcgtgagaattttctaataaatcttttctgatactaaaactgcttcctttatatgtccaaaggtccgccccaacctaagggaagagaaaacagccctgagtttcctggaggaaattcccaagtcaatgtgctccctctttacaaggaaataggggcagagagagcaagttccagcctcaaagaaagaaggattaacggatagtgaatatgctgctacatctttcttacgaggcctgcccacccttacaaaggaactacatccttaacccacaggtagttttcagcgtggcagtagctcacactgtttcttgcggcagagggccctgggctcctcctggagactctaccaccagcggtagtgggccagggcacggttggcctctgccatcttgtgcaagtcatgcttcctcttgatcacggggccctggttatggaaagcctccagcagcttgtgtgacagcttctccggcatcagtgtccgctggtgctttttatcccggcactcagtgatcatccacttcatggctaggaagcggcgacgccg

SEQ ID NO: 291603 - DNA, 1318 bp, Homo sapiens
cggcgggccccgcagcgccggacgctggttgcgcgctcccaggcgccgagcggccccgggcacgcgcgcgcgccaccggcccggcaggtgctgtccttattcccagcccagtcaagagctaccggggctggctagtcatgggggagcccagtagagaggagtataaaatccagtcctttgatgcagagacccagcagctgctgaagacagcactcaaagatccgggtgctgtggacttggagaaagtggccaatgtgattgtggaccattctctgcaggactgtgtgttcagcaaggaagcaggacgcatgtgctacgccatcattcaggcagagagtaaacaagcaggccagagtgtcttccgacgtggactcctcaaccggctgcagcaggagtaccaggctcgggagcagctgcgagcacgctccctgcagggctgggtctgctatgtcacctttatctgcaacatctttgactacctgagggtgaacaacatgcccatgatggccctggtgaaccctgtctatgactgcctcttccggctggcccagccagacagtttgagcaaggaggaggaggtggactgtttggtgctgcagctgcaccgggttggggagcagctggagaaaatgaatgggcagcgcatggatgagctctttgtgctgatccgggatggcttcctgctcccaactggcctcagctccctggcccagctgctgctgctggagatcattgagttccgggcggccggctggaagacaacgccagctgcccacaagtattactacagcgaagtctccgactaggcctccagatcagggcttcctcaccagcactggcctttcttctacccacctctaaagctggcagtggagtctctgcctcacccaaagacttttcccttccagactttgagtgtcttcccttctagactttcccatctcctggtgagatgtttcccacttatgccgtggtcctgccctgagcccctttccccaccacaacccaccacggccaggcagagaagggcaactcccaagagccactgcactgtgtaaccattagtgcaactactaccttggtgcctcagtttacccatctgtaaaatgggtaagcatagccactggtgggatattttgggatgtcaaggggtggaggcagagcacaagtcacaccagaaactgctttttatacattttgtataaggacaactctggaaacaagcctatttcctccagccagtttcactgaatgctgcaccacatgctacaccagttcagcgtgagaattttctaataaatcttttctgatactaaaa

SEQ ID NO: 291604 - DNA, 2459 bp, Homo sapiens
ccgcctctcccgcccgcgggaccctgggccgtgggctccgcagcccgccctgtgcctccgggaggggcgttccgggcgcggggggaacggccgagggctggagaccctaaaggcgcctcctacggccagaggggagcctccggcgggagccacctctccggggcgcatcatcctgccccccagtaagaggaaggctccagaatggagctcaggaattaggagtctcgagtgcgtagggccgggttactgccactcgggagccgatccgaccagcctgtcccagggagaagctggcacgggtctggggagttcaggctgctcccggcaggggcggcggacagggcgcctgcgtccccacccacgcaggccggccccatccgggggatgcagcggcgggtgttgagaccgaaggactcggcgaaagccagaaagagagggttggggagaggggctcggagacctgctggggacagagtcgcaccgcttggagttcccagcctggccctcacccggcatcttcctgggccagcaacgtcaggccggtttatttaagcaactgtaacgtccgcccgcacacaccctgccccagtctactcctgcctcctgctgggactggagggtgggcgctttcctgcttcagcttctcgctcttgtgtaatcccacaagcgagggatttctaaactgagcagcaggtgcctggctgatgcccagtccccaccagaagccaagcctggtgggccttcagccaaccaccgcacgccacggaccgcccaggagtccctgtcccgagcgcgccgtcagccccgtccagggcctgcaggacggaacccgccctgcgctccacacctgaggccgctcccttcgcctcttctcctcaggtgctgtccttattcccagcccagtcaagagctaccggggctggctagtcatgggggagcccagtagagaggagtataaaatccagtcctttgatgcagagacccagcagctgctgaagacagcactcaaagatccgggtgctgtggacttggagaaagtggccaatgtgattgtggaccattctctgcaggactgtgtgttcagcaaggaagcaggacgcatgtgctacgccatcattcaggtgaacaacatgcccatgatggccctggtgaaccctgtctatgactgcctcttccggctggcccagccagacagtttgagcaaggaggaggaggtggactgtttggtgctgcagctgcaccgggttggggagcagctggagaaaatgaatgggcagcgcatggatgagctctttgtgctgatccgggatggcttcctgctcccaactggcctcagctccctggcccagctgctgctgctggagatcattgagttccgggcggccggctggaagacaacgccagctgcccacaagtattactacagcgaagtctccgactaggcctccagatcagggcttcctcaccagcactggcctttcttctacccacctctaaagctggcagtggagtctctgcctcacccaaagacttttcccttccagactttgagtgtcttcccttctagactttcccatctcctggtgagatgtttcccacttatgccgtggtcctgccctgagcccctttccccaccacaacccaccacggccaggcagagaagggcaactcccaagagccactgcactgtgtaaccattagtgcaactactaccttggtgcctcagtttacccatctgtaaaatgggtaagcatagccactggtgggatattttgggatgtcaaggggtggaggcagagcacaagtcacaccagaaactgctttttatacattttgtataaggacaactctggaaacaagcctatttcctccagccagtttcactgaatgctgcaccacatgctacaccagttcagcgtgagaattttctaataaatcttttctgatactaaaactgcttcctttatatgtccaaaggtccgccccaacctaagggaagagaaaacagccctgagtttcctggaggaaattcccaagtcaatgtgctccctctttacaaggaaataggggcagagagagcaagttccagcctcaaagaaagaaggattaacggatagtgaatatgctgctacatctttcttacgaggcctgcccacccttacaaaggaactacatccttaacccacaggtagttttcagcgtggcagtagctcacactgtttcttgcggcagagggccctgggctcctcctggagactctaccaccagcggtagtgggccagggcacggttggcctctgccatcttgtgcaagtcatgcttcctcttgatcacggggccctggttatggaaagcctccagcagcttgtgtgacagcttctccggcatcagtgtccgctggtgctttttatcccggcactcagtgatcatccacttcatggctaggaagcggcgacgccg

SEQ ID NO: 291605 - DNA, 1769 bp, Homo sapiens
cggcgggccccgcagcgccggacgctggttgcgcgctcccaggcgccgagcggccccgggcacgcgcgcgcgccaccggcccggcaggtgctgtccttattcccagcccagtcaagagctaccggggctggctagtcatgggggagcccagtagagaggagtataaaatccagtcctttgatgcagagacccagcagctgctgaagacagcactcaaagatccgggtgctgtggacttggagaaagtggccaatgtgattgtggaccattctctgcaggactgtgtgttcagcaaggaagcaggacgcatgtgctacgccatcattcaggcagagagtaaacaagcaggccagagtgtcttccgacgtggactcctcaaccggctgcagcaggagtaccaggctcgggagcagctgcgagcacgctccctgcagggctgggtctgctatgtcacctttatctgcaacatctttgactacctgagggtgaacaacatgcccatgatggccctggtgaaccctgtctatgactgcctcttccggctggcccagccagacagtttgagcaaggaggaggaggtggactgtttggtgctgcagctgcaccgggttggggagcagctggagctgctcccaactggcctcagctccctggcccagctgctgctgctggagatcattgagttccgggcggccggctggaagacaacgccagctgcccacaagtattactacagcgaagtctccgactaggcctccagatcagggcttcctcaccagcactggcctttcttctacccacctctaaagctggcagtggagtctctgcctcacccaaagacttttcccttccagactttgagtgtcttcccttctagactttcccatctcctggtgagatgtttcccacttatgccgtggtcctgccctgagcccctttccccaccacaacccaccacggccaggcagagaagggcaactcccaagagccactgcactgtgtaaccattagtgcaactactaccttggtgcctcagtttacccatctgtaaaatgggtaagcatagccactggtgggatattttgggatgtcaaggggtggaggcagagcacaagtcacaccagaaactgctttttatacattttgtataaggacaactctggaaacaagcctatttcctccagccagtttcactgaatgctgcaccacatgctacaccagttcagcgtgagaattttctaataaatcttttctgatactaaaactgcttcctttatatgtccaaaggtccgccccaacctaagggaagagaaaacagccctgagtttcctggaggaaattcccaagtcaatgtgctccctctttacaaggaaataggggcagagagagcaagttccagcctcaaagaaagaaggattaacggatagtgaatatgctgctacatctttcttacgaggcctgcccacccttacaaaggaactacatccttaacccacaggtagttttcagcgtggcagtagctcacactgtttcttgcggcagagggccctgggctcctcctggagactctaccaccagcggtagtgggccagggcacggttggcctctgccatcttgtgcaagtcatgcttcctcttgatcacggggccctggttatggaaagcctccagcagcttgtgtgacagcttctccggcatcagtgtccgctggtgctttttatcccggcactcagtgatcatccacttcatggctaggaagcggcgacgccg

SEQ ID NO: 291606 - DNA, 891 bp, Homo sapiens
gaattcaccaaagactttcttccagacttgagtgtccatctcctggtgagatgttcccacttatgcggactttcacaccacggcaggcagagaagggcaactcccaagagccactgcactgtgtaaccattagtgcaactactaccttggtgcctcagtttacccatctgtaaaatgggtaagcatagccactggtgggatattttgggatgtcaaggggtggaggcagagcacaagtcacaccagaaactgctttttatacattttgtataaggacaactctggaaacaagcctatttcctccagccagtttcactgaatgctgcaccacatgctacaccagttcagcgtgagaattttctaataaatcttttctgatactaaaactgcttcctttatatgtccaaaggtccgccccaacctaagggaagagaaaacagccctgagtttcctggaggaaattcccaagtcaatgtgctccctctttacaaggaaataggggcagagagagcaagttccagcctcaaagaaagaaggattaacggatagtgaatatgctgctacatctttcttacgaggcctgcccacccttacaaaggaactacatccttaacccacaggtagttttcagcgtggcagtagctcacactgtttcttgcggcagagggccctgggctcctcctggagactctaccaccagcggtagtgggccagggcacggttggcctctgccatcttgtgcaagtcatgcttcctcttgatcacggggccctggttatggaaagcctccagcagcttgtgtgacagcttctccggcatcagtgtccgctggtgctttttatcccggcactcagtgatcatccacttcatggctaggaagcggcgacgccg

SEQ ID NO: 291607 - DNA, 1492 bp, Homo sapiens
cggcgggccccgcagcgccggacgctggttgcgcgctcccaggcgccgagcggccccgggcacgcgcgcgcgccaccggcccggcaggtgctgtccttattcccagcccagtcaagagctaccggggctggctagtcatgggggagcccagtagagaggagtataaaatccagtcctttgatgcagagacccagcagctgctgaagacagcactcaaagatccgggtgctgtggacttggagaaagtggccaatgtgattgtggaccattctctgcaggactgtgtgttcagcaaggaagcaggacgcatgtgctacgccatcattcaggcagagagtaaacaagcaggccagagtgtcttccgacgtggactcctcaaccggctgcagcaggagtaccaggctcgggagcagctgcgagcacgctccctgcagggctgggtctgctatgtcacctttatctgcaacatctttgactacctgagggtgaacaacatgcccatgatggccctggtgaaccctgtctatgactgcctcttccggctggcccagccagacagtttgagcaaggaggaggaggtggactgtttggtgctgcagctgcaccgggttggggagcagctggagaaaatgaatgggcagcgcatggatgagctctttgtgctgatccgggatggcttcctgctcccaactggcctcagctccctggcccagctgctgctgctggagatcattgagttccgggcggccggctggaagacaacgccagctgcccacaagtattactacagcgaagtctccgactaggcctccagatcagggcttcctcaccagcactggcctttcttctacccacctctaaagctggcagtggagtctctgcctcacccaaagacttttcccttccagactttgagtgtcttcccttctagactttcccatctcctggtgagatgtttcccacttatgccgtggtcctgccctgagcccctttccccaccacaacccaccacggccaggcagagaagggcaactcccaagagccactgcactgtgtaaccattagtgcaactactaccttggtgcctcagtttacccatctgtaaaatgggtaagcatagccactggtgggatattttgggatgtcaaggggtggaggcagagcacaagtcacaccagaaactgctttttatacattttgtataaggacaactctggaaacaagcctatttcctccagccagtttcactgaatgctgcaccacatgctacaccagttcagcgtgagaattttctaataaatcttttctgatactaaaactgcttcctttatatgtccaaaggtccgccccaacctaagggaagagaaaacagccctgagtttcctggaggaaattcccaagtcaatgtgctccctctttacaaggaaataggggcagagagagcaagttccagcctcaaaggtcgacgcggccgcgaatttagtagtagtag

SEQ ID NO: 291608 - DNA, 1442 bp, Homo sapiens
cggcgggccccgcagcgccggacgctggttgcgcgctcccaggcgccgagcggccccgggcacgcgcgcgcgccaccggcccggcaggtgctgtccttattcccagcccagtcaagagctaccggggctggctagtcatgggggagcccagtagagaggagtataaaatccagtcctttgatgcagagacccagcagctgctgaagacagcactcaaagatccgggtgctgtggacttggagaaagtggccaatgtgattgtggaccattctctgcaggactgtgtgttcagcaaggaagcaggacgcatgtgctacgccatcattcaggcagagagtaaacaagcaggccagagtgtcttccgacgtggactcctcaaccggctgcagcaggagtaccaggctcgggagcagctgcgagcacgctccctgcagggctgggtctgctatgtcacctttatctgcaacatctttgactacctgagggtgaacaacatgcccatgatggccctggtgaaccctgtctatgactgcctcttccggctggcccagccagacagtttgagcaaggaggaggaggtggactgtttggtgctgcagctgcaccgggttggggagcagctggagaaaatgaatgggcagcgcatggatgagctctttgtgctgatccgggatggcttcctgctcccaactggcctcagctccctggcccagctgctgctgctggagatcattgagttccgggcggccggctggaagacaacgccagctgcccacaagtattactacagcgaagtctccgactaggcctccagatcagggcttcctcaccagcactggcctttcttctacccacctctaaagctggcagtggagtctctgcctcacccaaagacttttcccttccagactttgagtgtcttcccttctagactttcccatctcctggtgagatgtttcccacttatgccgtggtcctgccctgagcccctttccccaccacaacccaccacggccaggcagagaagggcaactcccaagagccactgcactgtgtaaccattagtgcaactactaccttggtgcctcagtttacccatctgtaaaatgggtaagcatagccactggtgggatattttgggatgtcaaggggtggaggcagagcacaagtcacaccagaaactgctttttatacattttgtataaggacaactctggaaacaagcctatttcctccagccagtttcactgaatgctgcaccacatggctcacacatccgcggtaaaattctacaaacctctcgcatcaaacaaaaaaacaccaggcgggccgcgccacaagcgcaaggggcataacacgcgcgcgaaccacaggcaggtgcaacaaggcaatcaccacggataaagcagcgctccacacctgtgtgacattacatatatagt

SEQ ID NO: 291609 - DNA, 400 bp, Homo sapiens
cctttgatgcagagacccagcagctgctgaagacagcactcaaaggtgagcacgggacccctcctgagctggggtcaggagctacagagaagggcccctgtgggcagcaccagaggctgagcctggtgaatgcctccacccctcccctcattctctgacgataggagtcggcaacgtaattcttgaactggaagacaagctacattgaggccattattttggagtatgaatcacagtcacctctcagactgtaaagactgttttaaaagtttaaccatagggctaggcgcagtggctcatgtctgtagttccagcactttggaaagccaaggtgggcagattgcttgagtccaggagttcaagaccagtcccggaaacatggtgtaaaccccatctctac

SEQ ID NO: 291610 - DNA, 562 bp, Homo sapiens
agtttatccaatagagagcagccaaaacctactggctcagtagcttccttctcagtcagaaagccaacgtatgatggcagctgtgcaagccatggctagctgtgggtacagacggccccaaagccaaaccagggtcaggcagtgtgtgggaggcaggagagtgggatgaagaagtggtttggagacaggcttgagtggagcctggccagatgagggacctcaggcaagtcccggaactcatttctttctgtgtaagatgtggaagtacccactggatggtaaggagggagcaagggaatgagtgtaaaggcaaagcacagcacctggcacttggcaaatgctgtgtgagaggctggcactgccccagttcacttgtgttacccacactgtcgcctgcaggtggactgtttggtgctgcagctgcaccgggttggggagcagctggagaaaatgaatgggcagcgcatggatgagctctttgtgctgatccgggatggcttcctgctcccaactggcctcagctccctggcccagctgctgctgctggagatcattgagttcc

SEQ ID NO: 291611 - DNA, 1946 bp, Homo sapiens
cggcgggccccgcagcgccggacgctggttgcgcgctcccaggcgccgagcggccccgggcacgcgcgcgcgccaccggcccggcaggtgctgtccttattcccagcccagtcaagagctaccggggctggctagtcatgggggagcccagtagagaggagtataaaatccagtcctttgatgcagagacccagcagctgctgaagacagcactcaaagccccgtctcttgaatgcacagttgcctgctttgagacagaagatggagaatattccgtttgccagaggagctatagtaattgctctcgcctgatgccttcccgctgtaacacgcagtacagagatccgggtgctgtggacttggagaaagtggccaatgtgattgtggaccattctctgcaggactgtgtgttcagcaaggaagcaggacgcatgtgctacgccatcattcaggcagagagtaaacaagcaggccagagtgtcttccgacgtggactcctcaaccggctgcagcaggagtaccaggctcgggagcagctgcgagcacgctccctgcagggctgggtctgctatgtcacctttatctgcaacatctttgactacctgagggtgaacaacatgcccatgatggccctggtgaaccctgtctatgactgcctcttccggctggcccagccagacagtttgagcaaggaggaggaggtggactgtttggtgctgcagctgcaccgggttggggagcagctggagaaaatgaatgggcagcgcatggatgagctctttgtgctgatccgggatggcttcctgctcccaactggcctcagctccctggcccagctgctgctgctggagatcattgagttccgggcggccggctggaagacaacgccagctgcccacaagtattactacagcgaagtctccgactaggcctccagatcagggcttcctcaccagcactggcctttcttctacccacctctaaagctggcagtggagtctctgcctcacccaaagacttttcccttccagactttgagtgtcttcccttctagactttcccatctcctggtgagatgtttcccacttatgccgtggtcctgccctgagcccctttccccaccacaacccaccacggccaggcagagaagggcaactcccaagagccactgcactgtgtaaccattagtgcaactactaccttggtgcctcagtttacccatctgtaaaatgggtaagcatagccactggtgggatattttgggatgtcaaggggtggaggcagagcacaagtcacaccagaaactgctttttatacattttgtataaggacaactctggaaacaagcctatttcctccagccagtttcactgaatgctgcaccacatgctacaccagttcagcgtgagaattttctaataaatcttttctgatactaaaactgcttcctttatatgtccaaaggtccgccccaacctaagggaagagaaaacagccctgagtttcctggaggaaattcccaagtcaatgtgctccctctttacaaggaaataggggcagagagagcaagttccagcctcaaagaaagaaggattaacggatagtgaatatgctgctacatctttcttacgaggcctgcccacccttacaaaggaactacatccttaacccacaggtagttttcagcgtggcagtagctcacactgtttcttgcggcagagggccctgggctcctcctggagactctaccaccagcggtagtgggccagggcacggttggcctctgccatcttgtgcaagtcatgcttcctcttgatcacggggccctggttatggaaagcctccagcagcttgtgtgacagcttctccggcatcagtgtccgctggtgctttttatcccggcactcagtgatcatccacttcatggctaggaagcggcgacgccg

SEQ ID NO: 291612 - DNA, 2717 bp, Homo sapiens
ccgcctctcccgcccgcgggaccctgggccgtgggctccgcagcccgccctgtgcctccgggaggggcgttccgggcgcggggggaacggccgagggctggagaccctaaaggcgcctcctacggccagaggggagcctccggcgggagccacctctccggggcgcatcatcctgccccccagtaagaggaaggctccagaatggagctcaggaattaggagtctcgagtgcgtagggccgggttactgccactcgggagccgatccgaccagcctgtcccagggagaagctggcacgggtctggggagttcaggctgctcccggcaggggcggcggacagggcgcctgcgtccccacccacgcaggccggccccatccgggggatgcagcggcgggtgttgagaccgaaggactcggcgaaagccagaaagagagggttggggagaggggctcggagacctgctggggacagagtcgcaccgcttggagttcccagcctggccctcacccggcatcttcctgggccagcaacgtcaggccggtttatttaagcaactgtaacgtccgcccgcacacaccctgccccagtctactcctgcctcctgctgggactggagggtgggcgctttcctgcttcagcttctcgctcttgtgtaatcccacaagcgagggatttctaaactgagcagcaggtgcctggctgatgcccagtccccaccagaagccaagcctggtgggccttcagccaaccaccgcacgccacggaccgcccaggagtccctgtcccgagcgcgccgtcagccccgtccagggcctgcaggacggaacccgccctgcgctccacacctgaggccgctcccttcgcctcttctcctcaggtgctgtccttattcccagcccagtcaagagctaccggggctggctagtcatgggggagcccagtagagaggagtataaaatccagtcctttgatgcagagacccagcagctgctgaagacagcactcaaagttgcctgctttgagacagaagatggagaatattccgtttgccagaggagctatagtaattgctctcgcctgatgccttcccgctgtaacacgcagtacagagatccgggtgctgtggacttggagaaagtggccaatgtgattgtggaccattctctgcaggactgtgtgttcagcaaggaagcaggacgcatgtgctacgccatcattcaggcagagagtaaacaagcaggccagagtgtcttccgacgtggactcctcaaccggctgcagcaggagtaccaggctcgggagcagctgcgagcacgctccctgcagggctgggtctgctatgtcacctttatctgcaacatctttgactacctgagggtgaacaacatgcccatgatggccctggtgaaccctgtctatgactgcctcttccggctggcccagccagacagtttgagcaaggaggaggaggtggactgtttggtgctgcagctgcaccgggttggggagcagctggagaaaatgaatgggcagcgcatggatgagctctttgtgctgatccgggatggcttcctgctcccaactggcctcagctccctggcccagctgctgctgctggagatcattgagttccgggcggccggctggaagacaacgccagctgcccacaagtattactacagcgaagtctccgactaggcctccagatcagggcttcctcaccagcactggcctttcttctacccacctctaaagctggcagtggagtctctgcctcacccaaagacttttcccttccagactttgagtgtcttcccttctagactttcccatctcctggtgagatgtttcccacttatgccgtggtcctgccctgagcccctttccccaccacaacccaccacggccaggcagagaagggcaactcccaagagccactgcactgtgtaaccattagtgcaactactaccttggtgcctcagtttacccatctgtaaaatgggtaagcatagccactggtgggatattttgggatgtcaaggggtggaggcagagcacaagtcacaccagaaactgctttttatacattttgtataaggacaactctggaaacaagcctatttcctccagccagtttcactgaatgctgcaccacatgctacaccagttcagcgtgagaattttctaataaatcttttctgatactaaaactgcttcctttatatgtccaaaggtccgccccaacctaagggaagagaaaacagccctgagtttcctggaggaaattcccaagtcaatgtgctccctctttacaaggaaataggggcagagagagcaagttccagcctcaaagaaagaaggattaacggatagtgaatatgctgctacatctttcttacgaggcctgcccacccttacaaaggaactacatccttaacccacaggtagttttcagcgtggcagtagctcacactgtttcttgcggcagagggccctgggctcctcctggagactctaccaccagcggtagtgggccagggcacggttggcctctgccatcttgtgcaagtcatgcttcctcttgatcacggggccctggttatggaaagcctccagcagcttgtgtgacagcttctccggcatcagtgtccgctggtgctttttatcccggcactcagtgatcatccacttcatggctaggaagcggcgacgccg

SEQ ID NO: 291613 - DNA, 2919 bp, Homo sapiens
ccgcctctcccgcccgcgggaccctgggccgtgggctccgcagcccgccctgtgcctccgggaggggcgttccgggcgcggggggaacggccgagggctggagaccctaaaggcgcctcctacggccagaggggagcctccggcgggagccacctctccggggcgcatcatcctgccccccagtaagaggaaggctccagaatggagctcaggaattaggagtctcgagtgcgtagggccgggttactgccactcgggagccgatccgaccagcctgtcccagggagaagctggcacgggtctggggagttcaggctgctcccggcaggggcggcggacagggcgcctgcgtccccacccacgcaggccggccccatccgggggatgcagcggcgggtgttgagaccgaaggactcggcgaaagccagaaagagagggttggggagaggggctcggagacctgctggggacagagtcgcaccgcttggagttcccagcctggccctcacccggcatcttcctgggccagcaacgtcaggccggtttatttaagcaactgtaacgtccgcccgcacacaccctgccccagtctactcctgcctcctgctgggactggagggtgggcgctttcctgcttcagcttctcgctcttgtgtaatcccacaagcgagggatttctaaactgagcagcaggtgcctggctgatgcccagtccccaccagaagccaagcctggtgggccttcagccaaccaccgcacgccacggaccgcccaggagtccctgtcccgagcgcgccgtcagccccgtccagggcctgcaggacggaacccgccctgcgctccacacctgaggccgctcccttcgcctcttctcctcaggtgctgtccttattcccagcccagtcaagagctaccggggctggctagtcatgggggagcccagtagagaggagtataaaatccagtcctttgatgcagagacccagcagctgctgaagacagcactcaaagccccgtctcttgaatgcacagttgcctgctttgagacagaagatggagaatattccgtttgccagaggagctatagtaattgctctcgcctgatgccttcccgctgtaacacgcagtacagagatccgggtgctgtggacttggagaaagtggccaatgtgattgtggaccattctctgcaggactgtgtgttcagcaaggaagcaggacgcatgtgctacgccatcattcaggttgggggttgggagaggaaaggaagctgctttgaggaaggtgcttcaggagtgggcagaaggcctggcctgcaggacagagatgcacagggtctagctcaaagagagagagaggcataggatgggtggggttacaggggcaccgccccccacccttcaccttcctctccctggctcacaggcagagagtaaacaagcaggccagagtgtcttccgacgtggactcctcaaccggctgcagcaggagtaccaggctcgggagcagctgcgagcacgctccctgcagggctgggtctgctatgtcacctttatctgcaacatctttgactacctgagggtgaacaacatgcccatgatggccctggtgaaccctgtctatgactgcctcttccggctggcccagccagacagtttgagcaaggaggaggaggtggactgtttggtgctgcagctgcaccgggttggggagcagctggagaaaatgaatgggcagcgcatggatgagctctttgtgctgatccgggatggcttcctgctcccaactggcctcagctccctggcccagctgctgctgctggagatcattgagttccgggcggccggctggaagacaacgccagctgcccacaagtattactacagcgaagtctccgactaggcctccagatcagggcttcctcaccagcactggcctttcttctacccacctctaaagctggcagtggagtctctgcctcacccaaagacttttcccttccagactttgagtgtcttcccttctagactttcccatctcctggtgagatgtttcccacttatgccgtggtcctgccctgagcccctttccccaccacaacccaccacggccaggcagagaagggcaactcccaagagccactgcactgtgtaaccattagtgcaactactaccttggtgcctcagtttacccatctgtaaaatgggtaagcatagccactggtgggatattttgggatgtcaaggggtggaggcagagcacaagtcacaccagaaactgctttttatacattttgtataaggacaactctggaaacaagcctatttcctccagccagtttcactgaatgctgcaccacatgctacaccagttcagcgtgagaattttctaataaatcttttctgatactaaaactgcttcctttatatgtccaaaggtccgccccaacctaagggaagagaaaacagccctgagtttcctggaggaaattcccaagtcaatgtgctccctctttacaaggaaataggggcagagagagcaagttccagcctcaaagaaagaaggattaacggatagtgaatatgctgctacatctttcttacgaggcctgcccacccttacaaaggaactacatccttaacccacaggtagttttcagcgtggcagtagctcacactgtttcttgcggcagagggccctgggctcctcctggagactctaccaccagcggtagtgggccagggcacggttggcctctgccatcttgtgcaagtcatgcttcctcttgatcacggggccctggttatggaaagcctccagcagcttgtgtgacagcttctccggcatcagtgtccgctggtgctttttatcccggcactcagtgatcatccacttcatggctaggaagcggcgacgccg

SEQ ID NO: 291614 - DNA, 1977 bp, Homo sapiens
gccatgatttcttataagtaccatgcgctaaccaattgcaccactggagccactgtcctctgtatgatttctgatctctttcacttcaagcatatgagtgctctactgtaaatatctcaaattcttagaagcgggtggacacaaatgtgataaagcagcagctctagactcccctcctatctctacccctagatccgggtgctgtggacttggagaaagtggccaatgtgattgtggaccattctctgcaggactgtgtgttcagcaaggaagcaggacgcatgtgctacgccatcattcaggttgggggttgggagaggaaaggaagctgctttgaggaaggtgcttcaggagtgggcagaaggcctggcctgcaggacagagatgcacagggtctagctcaaagagagagagaggcataggatgggtggggttacaggggcaccgccccccacccttcaccttcctctccctggctcacaggcagagagtaaacaagcaggccagagtgtcttccgacgtggactcctcaaccggctgcagcaggagtaccaggctcgggagcagctgcgagcacgctccctgcagggctgggtctgctatgtcacctttatctgcaacatctttgactacctgagggtgaacaacatgcccatgatggccctggtgaaccctgtctatgactgcctcttccggctggcccagccagacagtttgagcaaggaggaggaggtggactgtttggtgctgcagctgcaccgggttggggagcagctggagaaaatgaatgggcagcgcatggatgagctctttgtgctgatccgggatggcttcctgctcccaactggcctcagctccctggcccagctgctgctgctggagatcattgagttccgggcggccggctggaagacaacgccagctgcccacaagtattactacagcgaagtctccgactaggcctccagatcagggcttcctcaccagcactggcctttcttctacccacctctaaagctggcagtggagtctctgcctcacccaaagacttttcccttccagactttgagtgtcttcccttctagactttcccatctcctggtgagatgtttcccacttatgccgtggtcctgccctgagcccctttccccaccacaacccaccacggccaggcagagaagggcaactcccaagagccactgcactgtgtaaccattagtgcaactactaccttggtgcctcagtttacccatctgtaaaatgggtaagcatagccactggtgggatattttgggatgtcaaggggtggaggcagagcacaagtcacaccagaaactgctttttatacattttgtataaggacaactctggaaacaagcctatttcctccagccagtttcactgaatgctgcaccacatgctacaccagttcagcgtgagaattttctaataaatcttttctgatactaaaactgcttcctttatatgtccaaaggtccgccccaacctaagggaagagaaaacagccctgagtttcctggaggaaattcccaagtcaatgtgctccctctttacaaggaaataggggcagagagagcaagttccagcctcaaagaaagaaggattaacggatagtgaatatgctgctacatctttcttacgaggcctgcccacccttacaaaggaactacatccttaacccacaggtagttttcagcgtggcagtagctcacactgtttcttgcggcagagggccctgggctcctcctggagactctaccaccagcggtagtgggccagggcacggttggcctctgccatcttgtgcaagtcatgcttcctcttgatcacggggccctggttatggaaagcctccagcagcttgtgtgacagcttctccggcatcagtgtccgctggtgctttttatcccggcactcagtgatcatccacttcatggctaggaagcggcgacgccg

SEQ ID NO: 291615 - DNA, 2508 bp, Homo sapiens
ccgcctctcccgcccgcgggaccctgggccgtgggctccgcagcccgccctgtgcctccgggaggggcgttccgggcgcggggggaacggccgagggctggagaccctaaaggcgcctcctacggccagaggggagcctccggcgggagccacctctccggggcgcatcatcctgccccccagtaagaggaaggctccagaatggagctcaggaattaggagtctcgagtgcgtagggccgggttactgccactcgggagccgatccgaccagcctgtcccagggagaagctggcacgggtctggggagttcaggctgctcccggcaggggcggcggacagggcgcctgcgtccccacccacgcaggccggccccatccgggggatgcagcggcgggtgttgagaccgaaggactcggcgaaagccagaaagagagggttggggagaggggctcggagacctgctggggacagagtcgcaccgcttggagttcccagcctggccctcacccggcatcttcctgggccagcaacgtcaggccggtttatttaagcaactgtaacgtccgcccgcacacaccctgccccagtctactcctgcctcctgctgggactggagggtgggcgctttcctgcttcagcttctcgctcttgtgtaatcccacaagcgagggatttctaaactgagcagcaggtgcctggctgatgcccagtccccaccagaagccaagcctggtgggccttcagccaaccaccgcacgccacggaccgcccaggagtccctgtcccgagcgcgccgtcagccccgtccagggcctgcaggacggaacccgccctgcgctccacacctgaggccgctcccttcgcctcttctcctcaggtgctgtccttattcccagcccagtcaagagctaccggggctggctagtcatgggggagcccagtagagaggagtataaaatccagtcctttgatgcagagacccagcagctgctgaagacagcactcaaagatccgggtgctgtggacttggagaaagtggccaatgtgattgtggaccattctctgcaggactgtgtgttcagcaaggaagcaggacgcatgtgctacgccatcattcaggcagagagtaaacaagcaggccagagtgtcttccgacgtggactcctcaaccggctgcagcaggagtaccaggctcgggagcagctgcgagcacgctccctgcagggctgggtctgctatgtcacctttatctgcaacatctttgactacctgagggtgaacaacatgcccatgatggccctggtgaaccctgtctatgactgcctcttccggctggcccagccagacagtttgagcaaggaggaggaggtggactgtttggtgctgcagctgcaccgggttggggagcagctggagctgctcccaactggcctcagctccctggcccagctgctgctgctggagatcattgagttccgggcggccggctggaagacaacgccagctgcccacaagtattactacagcgaagtctccgactaggcctccagatcagggcttcctcaccagcactggcctttcttctacccacctctaaagctggcagtggagtctctgcctcacccaaagacttttcccttccagactttgagtgtcttcccttctagactttcccatctcctggtgagatgtttcccacaggcagagaagggcaactcccaagagccactgcactgtgtaaccattagtgcaactactaccttggtgcctcagtttacccatctgtaaaatgggtaagcatagccactggtgggatattttgggatgtcaaggggtggaggcagagcacaagtcacaccagaaactgctttttatacattttgtataaggacaactctggaaacaagcctatttcctccagccagtttcactgaatgctgcaccacatgctacaccagttcagcgtgagaattttctaataaatcttttctgatactaaaactgcttcctttatatgtccaaaggtccgccccaacctaagggaagagaaaacagccctgagtttcctggaggaaattcccaagtcaatgtgctccctctttacaaggaaataggggcagagagagcaagttccagcctcaaagaaagaaggattaacggatagtgaatatgctgctacatctttcttacgaggcctgcccacccttacaaaggaactacatccttaacccacaggtagttttcagcgtggcagtagctcacactgtttcttgcggcagagggccctgggctcctcctggagactctaccaccagcggtagtgggccagggcacggttggcctctgccatcttgtgcaagtcatgcttcctcttgatcacggggccctggttatggaaagcctccagcagcttgtgtgacagcttctccggcatcagtgtccgctggtgctttttatcccggcactcagtgatcatccacttcatggctaggaagcggcgacgccg

SEQ ID NO: 291616 - DNA, 1836 bp, Homo sapiens
cggcgggccccgcagcgccggacgctggttgcgcgctcccaggcgccgagcggccccgggcacgcgcgcgcgccaccggcccggcaggtgctgtccttattcccagcccagtcaagagctaccggggctggctagtcatgggggagcccagtagagaggagtataaaatccagtcctttgatgcagagacccagcagctgctgaagacagcactcaaagatccgggtgctgtggacttggagaaagtggccaatgtgattgtggaccattctctgcaggactgtgtgttcagcaaggaagcaggacgcatgtgctacgccatcattcaggcagagagtaaacaagcaggccagagtgtcttccgacgtggactcctcaaccggctgcagcaggagtaccaggctcgggagcagctgcgagcacgctccctgcagggctgggtctgctatgtcacctttatctgcaacatctttgactacctgagggtgaacaacatgcccatgatggccctggtgaaccctgtctatgactgcctcttccggctggcccagccagacagtttgagcaaggaggaggaggtggactgtttggtgctgcagctgcaccgggttggggagcagctggagaaaatgaatgggcagcgcatggatgagctctttgtgctgatccgggatggcttcctgctcccaactggcctcagctccctggcccagctgctgctgctggagatcattgagttccgggcggccggctggaagacaacgccagctgcccacaagtattactacagcgaagtctccgactaggcctccagatcagggcttcctcaccagcactggcctttcttctacccacctctaaagctggcagtggagtctctgcctcacccaaagacttttcccttccagactttgagtgtcttcccttctagactttcccatctcctggtgagatgtttcccacttatgccgtggtcctgccctgagcccctttccccaccacaacccaccacggccaggcagagaagggcaactcccaagagccactgcactgtgtaaccattagtgcaactactaccttggtgcctcagtttacccatctgtaaaatgggtaagcatagccactggtgggatattttgggatgtcaaggggtggaggcagagcacaagtcacaccagaaactgctttttatacattttgtataaggacaactctggaaacaagcctatttcctccagccagtttcactgaatgctgcaccacatgctacaccagttcagcgtgagaattttctaataaatcttttctgatactaaaaaaaaaaaaaaaaaaaaaaaaaaaaaaaaaaaaaaaaaaaaaaaaaaaaaaaaaaaaagggggggggggcaaaaagaacccccgggggggcccccgacacacaccgcccacgacaagttttgagtagaaaaagagggccccaaaaaagaagcggaagacatgaataacaacgacaaaagaaggggcgcgatatataaaaaaaggtgacgaagggagaaaaaacaggcgaaaagcgagggaacaataggaaagaagagaacacaacaccagcgaggggaagcgtgagacaaaatatatgaggggaggacaaaacacaatacttcacacggaagaaaatctacacaaacaccgcattaggaggggaaaatatataaaaaatcattaaagagaagactattagagcggttgatacaacacaacagaccagcataaattatgtgtcgagggtggagaaagaaaaagattgtgctcacccaaccagaagaatgagtttagtagacgaagcaaaatattatgcgc

SEQ ID NO: 291617 - DNA, 3676 bp, Homo sapiens
cgcgcgcggtgttgccatggggacgagcggctccggctgaaggtttccgtgcttggaaaccgcgcctccgcggaggtagccgttccctgacctagccatggcacagaacactgaaaaccacgaccctgtcggatccatcttaatccagatccatgaagacctttatcagttaaaggagaaattaacaaaattctcacctgaggaaaaaggagagactctagacattcagagtcttgaaacagcaatcaaaaggactgaagtggggttaagaggattttaagtatgatagaacgagggctgattccaccaacagcaaggattacctttcagaatccacccattacacccagagcagctcctctgcatagttttgatgaagcacgtaagattccaactgtagccactttcactatacctcgggaaccacctccatctccagcagaagtgaagttctttcccaagaaacaaagatcaaaggggaaaagcagaaggtcaagaggacatcatgataggaagatttgtgatcctaatccacctgggacagccccagatatgttcctaagaagaaaccagacttaagaataaaagaacacgtgtcaagagaaacctaagaatgacaaaggccatgaaagtcaaaacacctttgagagccctgaaatcactgtgggattatgactttttaatttatgatggtgtcatagacaatacagccccagacttcttagcattcaaggaacattttagcttagcttggggaggtattttttctctcttggaacacgtcgagaagtttctcaggaactatgctataccagaagtcaaaataaaagggaataatttggtggccctccttccagagtttgagctgacgaataaacttaccagatatgaccttctctcagtgttagaggacccagctcatgtccaaatgctgataaatcttccagggcaaaggtacaagggccaagatggaaattcggaggccgccatgaagatccaagccacatggaaatgctacaaagcaagaaaattcttcctcttttatcgccagcagaagtgggcatcaggtgtgattgccattgcttggctgttatattgccataagactcgactaaagaagatactaaaggaatcacgtcagagacacctggagaattttcgcattcgagccaagcatctggcagccaactggaatcgcatcaggacctccaggaggactattatccatatcccatcattagggtattcccagcctgtgagagaacatattgccgatttcaacacacagcagaacatgcagctggggaggctgtgtgacatcttagatgccaatgtgaatgtcatctacatctgctcccatcatatgaatgacgagttagtgctgtattacaaaaaaatcctaagtctacatgcagccgtcaaatctgggaaccttgaggacagaagtgacctgcaggacaggttcaaaattatcacacctgaagctgtaaacatcttccctatgatagagcagctgagtcagctgataactgatcacctgcaaatacagcgctggctctttaaaatggactctgagttccgaggaaatgggactgcattttgtgatattccttcctacctaaagtgctacaaatgggtgctaaaggagagtagcagatatggccttgaagactggagaaagaaatgggcacaagagccagctttggtgaagatctctgaggagctggcgggcattttagcacagcacgcacagccagtcaatgagaaacggttcccgacgtggaggaaattcctccaaacatttctcagtcaagggggtgtgatcgaagcattcccacctgcagacaatgtcaccaacctcacagtggacatgctgatagagcccaacgggaaaatcagcgtgctgtcgacaggggaccagcttcatgctgaaagccccttcatctcctctggtaccaccgtgcctcagacctcagtggatccccaagttctcacttatttgtgcctccaaattggaaaagcctgcagaatgagagatgtggttggttacttttcgatagatctggtgacttttatagatccaagcaccttggaacaacaggtgtgggcaaccggccttaacctcgcatatagtgaccagctggccctgactcaactcaccttatacctgacaaacggccatctggattgcagtttgagcaccctggaagtgccccgctttgttccaaaggaaaggaagaaaaccaaatgcatgagtgcgctgtcaatgccgatgctggcaaccagtcgctatgcagtgatgaccacccagctaagacacagcaatctctcactggttttccactatgtttttctccagatctgtagggcccatggcattggctatgatcttgagaacaatcggcgaggatctccagggggtcctcatgacctttgctcgccatctcttcatcatccatcaagaaatatcagcacctaatatgcaaggcgagaccaattttaagaccaccattgctgatattgaaactattctaagagtaacaaaggaaaacaaaatgagatttgaagaggagcaacagtccaaagatgataaaaacctctctaaacccaagaaatgatcctggaatacagtacataacaatttggatcccagtctggaataaaaagggcaatttttttttctgttagaaataaaagccaggggaaattggtttgctttgtgtgctaggaggtgaatcagaacagattataatgaaatgctctttttaaaacattgtttattaagtgatcttattttatttattaaaccaaaacttatttgtgttttcatttgagagtgttgaacaatcccttcttcttctcaaactcagaaaaaagtaatctgataaaagaagaaagttaaaagtcttactgatatcacctccgcatttacttcctcataggcctcaggattatgtagcttttattttttatgttttataaagttttctcctatttctaatagtccatcgatcttctgcatttataggtttgaataaaggcttaagaattgctatttgtcaaaacacaaatgcctttttttcaaagcttcaaattatattgaaattatatttatatgaatttttaagtgactatcattcatcgtgtttttgttataccaagccactattgtctgctattgttgccatttttcaaaaagtaggataagccagcatctagttaaccaaagcatcagaatgtatctaggtggcagtatctgctcttagtttaagatggagtgtagctcgagctctgtagcttgaataaacatttgtattctctagttctccatttaatacagcagtaggattttttcaagtttagttcaacattatactacctttaaaaaggcagactgttaagattgtagtagtgctgactctaactttcagcattcacttcataattgtccaaaaatatttccacatcagtgagctttactgaagggtgaaataaaagcaaattacaacaccaaaaccattattgttttaaagaatgacctttatgtctataaaaatattttagtgtattggggaaaggaataggatttttacctgtggaatttcaataatttgttaactgtgattcagccacaggctaagagtttctgtaataaaattaacatttgtgtgtgtca

SEQ ID NO: 291618 - DNA, 993 bp, Homo sapiens
cgcgcgcggtgttgccatggggacgagcggctccggctgaaggtttccgtgcttggaaaccgcgcctccgcggaggtagccgttccctgacctagccatggcacagaacactgaaaaccacgaccctgtcggatccatcttaatccagatccatgaagacctttatcagttaaaggagaaattaacaaaattctcacctgaggaaaaaggagagactctagacattcagagtcttgaaacagcaatcaaaaggactgaagtggggttaagaattcacattgagaagtatttaaatgttgtaaaccagaatgtattaacgacttctgttaatgatgagagcttatatactccccaggcttccaaatggttacttccaactgtaattgatcagaaatcatttattttccctcaggaatctgagggtacattttggcaaccccaaagacagcacagttcatctctgcctgtctttccaagagcaaagcgaaagatagggttgaatgtaaaaatcttgcaggatcctgaaaacatccaccacagagctgctgtaaatgcgaactatggaatcagtttgccatatattaatcagagaaaagcatgttaggtcctcaaaggtatgtggaaacaagaagaaatccctggtactgttcatgttccctcactgacatccagttccagttagactttataatacaacacattaagaaatctacagaaaatttgactttgatttattccttttaaataaaaagtgtttcttaaaaggcttgaaacatgtatctgttaacatgaattttaaaagaacaattatgaatgcataacaaaatagccaaaccaaacattgctttgaattgctgcacaaataactgattataactgttatgacctagaaaaaaatcataaaaacatttttctttttggcaagatgtgagttgctgtagaattataccagttctttggttctactttccaaataaatatatatataatgca

SEQ ID NO: 291619 - DNA, 4239 bp, Homo sapiens
cgcgcgcggtgttgccatggggacgagcggctccggctgaaggtttccgtgcttggaaaccgcgcctccgcggaggtagccgttccctgacctagccatggcacagaacactgaaaaccacgaccctgtcggatccatcttaatccagatccatgaagacctttatcagttaaaggagaaattaacaaaattctcacctgaggaaaaaggagagactctagacattcagagtcttgaaacagcaatcaaaaggactgaagtggggttaagaattcacattgagaagtatttaaatgttgtaaaccagaatgtattaacgacttctgttaatgatgagagcttatatactccccaggcttccaaatggttacttccaactgtaattgatcagaaatcatttattttccctcaggaatctgagggtacattttggcaaccccaaagacagcacagttcatctctgcctgtctttccaagagcaaagataaaggtttcgaagttaatcaaagggtctaacatatccagcctcacggttctgccatcttctcattgcacagatccctatttcactcctataccagtcttacaagcagatgcccacaaagggattttaagtatgatagaacgagggctgattccaccaacagcaaggattacctttcagaatccacccattacacccagagcagctcctctgcatagttttgatgaagcacgtaagattccaactgtagccactttcactatacctcgggaaccacctccatctccagcagaagtgaagttctttcccaagaaacaaagatcaaaggggaaaagcagaaggtcaagaggacatcatgataggaaggccatgaaagtcaaaacacctttgagagccctgaaatcactgtgggattatgactttttaatttatgatggtgtcatagacaatacagccccagacttcttagcattcaaggaacattttagcttagcttggggaggtattttttctctcttggaacacgtcgagaagtttctcaggaactatgctataccagaagtcaaaataaaagggaataatttggtggccctccttccagagtttgagctgacgaataaacttaccagatatgaccttctctcagtgttagaggacccagctcatgtccaaatgctgataaatcttccagggcaaaggtacaagggccaagatggaaattcggaggccgccatgaagatccaagccacatggaaatgctacaaagcaagaaaattcttcctcttttatcgccagcagaagtgggcatcaggtgtgattgccattgcttggctgttatattgccataagactcgactaaagaagatactaaaggaatcacgtcagagacacctggagaattttcgcattcgagccaagcatctggcagccaactggaatcgcatcaggacctccaggaggactattatccatatcccatcattagggtattcccagcctgtgagagaacatattgccgatttcaacacacagcagaacatgcagctggggaggctgtgtgacatcttagatgccaatgtgaatgtcatctacatctgctcccatcatatgaatgacgagttagtgctgtattacaaaaaaatcctaagtctacatgcagccgtcaaatctgggaaccttgaggacagaagtgacctgcaggacaggttcaaaattatcacacctgaagctgtaaacatcttccctaagcatcatatgtgcctggccactcacctgatgtacagtcccaaggcaatcaaaagaataaaaaatctcatccgaggaacagaggcctacatcgtcagcgggctcctccacagagatgatttagctgtggccgatatgttagacatacccatcctgggctctgagcctgaactagctcatctttatagtaccaaatctggaggcaaacgtgtctttgacagtgccaatgtggcagttcctcctggaatatatgatatttatagtcagcaacagatgatagagcagctgagtcagctgataactgatcacctgcaaatacagcgctggctctttaaaatggactctgagttccgaggaaatgggactgcattttgtgatattccttcctacctaaagtgctacaaatgggtgctaaaggagagtagcagatatggccttgaagactggagaaagaaatgggcacaagagccagctttggtgaagatctctgaggagctggcgggcattttagcacagcacgcacagccagtcaatgagaaacggttcccgacgtggaggaaattcctccaaacatttctcagtcaagggggtgtgatcgaagcattcccacctgcagacaatgtcaccaacctcacagtggacatgctgatagagcccaacgggaaaatcagcgtgctgtcgacaggggaccagcttcatgctgaaagccccttcatctcctctggtaccaccgtgcctcagacctcagtggatccccaagttctcacttatttgtgcctccaaattggaaaagcctgcagaatgagagatgtggttggttacttttcgatagatctggtgacttttatagatccaagcaccttggaacaacaggtgtgggcaaccggccttaacctcgcatatagtgaccagctggccctgactcaactcaccttatacctgacaaacggccatctggattgcagtttgagcaccctggaagtgccccgctttgttccaaaggaaaggaagaaaaccaaatgcatgagtgcgctgtcaatgccgatgctggcaaccagtcgctatgcagtgatgaccacccagctaagacacagcaatctctcactggttttccactatgtttttctccagatctgtagggcccatggcattggctatgatcttgaggaaaggcaaggaactgtttttatattatatgagcacctgaagagacacaagttgggaatgttaacaatcggcgaggatctccagggggtcctcatgacctttgctcgccatctcttcatcatccatcaagaaatatcagcacctaatatgcaaggcgagaccaattttaagaccaccattgctgatattgaaactattctaagagtaacaaaggaaaacaaaatgagatttgaagaggagcaacagtccaaagatgataaaaacctctctaaacccaagaaatgatcctggaatacagtacataacaatttggatcccagtctggaataaaaagggcaatttttttttctgttagaaataaaagccaggggaaattggtttgctttgtgtgctaggaggtgaatcagaacagattataatgaaatgctctttttaaaacattgtttattaagtgatcttattttatttattaaaccaaaacttatttgtgttttcatttgagagtgttgaacaatcccttcttcttctcaaactcagaaaaaagtaatctgataaaagaagaaagttaaaagtcttactgatatcacctccgcatttacttcctcataggcctcaggattatgtagcttttattttttatgttttataaagttttctcctatttctaatagtccatcgatcttctgcatttataggtttgaataaaggcttaagaattgctatttgtcaaaacacaaatgcctttttttcaaagcttcaaattatattgaaattatatttatatgaatttttaagtgactatcattcatcgtgtttttgttataccaagccactattgtctgctattgttgccatttttcaaaaagtaggataagccagcatctagttaaccaaagcatcagaatgtatctaggtggcagtatctgctcttagtttaagatggagtgtagctcgagctctgtagcttgaataaacatttgtattctctagttctccatttaatacagcagtaggattttttcaagtttagttcaacattatactacctttaaaaaggcagactgttaagattgtagtagtgctgactctaactttcagcattcacttcataattgtccaaaaatatttccacatcagtgagctttactgaagggtgaaataaaagcaaattacaacaccaaaaccattattgttttaaagaatgacctttatgtctataaaaatattttagtgtattggggaaaggaataggatttttacctgtggaatttcaataatttgttaactgtgattcagccacaggctaagagtttctgtaataaaattaacatttgtgtgtgtca

SEQ ID NO: 291620 - DNA, 3905 bp, Homo sapiens
cgcgcgcggtgttgccatggggacgagcggctccggctgaaggtttccgtgcttggaaaccgcgcctccgcggaggtagccgttccctgacctagccatggcacagaacactgaaaaccacgaccctgtcggatccatcttaatccagatccatgaagacctttatcagttaaaggagaaattaacaaaattctcacctgaggaaaaaggagagactctagacattcagagtcttgaaacagcaatcaaaaggactgaagtggggttaagaggattttaagtatgatagaacgagggctgattccaccaacagcaaggattacctttcagaatccacccattacacccagagcagctcctctgcatagttttgatgaagcacgtaagattccaactgtagccactttcactatacctcgggaaccacctccatctccagcagaagtgaagttctttcccaagaaacaaagatcaaaggggaaaagcagaaggtcaagaggacatcatgataggaaggccatgaaagtcaaaacacctttgagagccctgaaatcactgtgggattatgactttttaatttatgatggtgtcatagacaatacagccccagacttcttagcattcaaggaacattttagcttagcttggggaggtattttttctctcttggaacacgtcgagaagtttctcaggaactatgctataccagaagtcaaaataaaagggaataatttggtggccctccttccagagtttgagctgacgaataaacttaccagatatgaccttctctcagtgttagaggacccagctcatgtccaaatgctgataaatcttccagggcaaaggtacaagggccaagatggaaattcggaggccgccatgaagatccaagccacatggaaatgctacaaagcaagaaaattcttcctcttttatcgccagcagaagtgggcatcaggtgtgattgccattgcttggctgttatattgccataagactcgactaaagaagatactaaaggaatcacgtcagagacacctggagaattttcgcattcgagccaagcatctggcagccaactggaatcgcatcaggacctccaggaggactattatccatatcccatcattagggtattcccagcctgtgagagaacatattgccgatttcaacacacagcagaacatgcagctggggaggctgtgtgacatcttagatgccaatgtgaatgtcatctacatctgctcccatcatatgaatgacgagttagtgctgtattacaaaaaaatcctaagtctacatgcagccgtcaaatctgggaaccttgaggacagaagtgacctgcaggacaggttcaaaattatcacacctgaagctgtaaacatcttccctaagcatcatatgtgcctggccactcacctgatgtacagtcccaaggcaatcaaaagaataaaaaatctcatccgaggaacagaggcctacatcgtcagcgggctcctccacagagatgatttagctgtggccgatatgttagacatacccatcctgggctctgagcctgaactagctcatctttatagtaccaaatctggaggcaaacgtgtctttgacagtgccaatgtggcagttcctcctggaatatatgatatttatagtcagcaacagatgatagagcagctgagtcagctgataactgatcacctgcaaatacagcgctggctctttaaaatggactctgagttccgaggaaatgggactgcattttgtgatattccttcctacctaaagtgctacaaatgggtgctaaaggagagtagcagatatggccttgaagactggagaaagaaatgggcacaagagccagctttggtgaagatctctgaggagctggcgggcattttagcacagcacgcacagccagtcaatgagaaacggttcccgacgtggaggaaattcctccaaacatttctcagtcaagggggtgtgatcgaagcattcccacctgcagacaatgtcaccaacctcacagtggacatgctgatagagcccaacgggaaaatcagcgtgctgtcgacaggggaccagcttcatgctgaaagccccttcatctcctctggtaccaccgtgcctcagacctcagtggatccccaagttctcacttatttgtgcctccaaattggaaaagcctgcagaatgagagatgtggttggttacttttcgatagatctggtgacttttatagatccaagcaccttggaacaacaggtgtgggcaaccggccttaacctcgcatatagtgaccagctggccctgactcaactcaccttatacctgacaaacggccatctggattgcagtttgagcaccctggaagtgccccgctttgttccaaaggaaaggaagaaaaccaaatgcatgagtgcgctgtcaatgccgatgctggcaaccagtcgctatgcagtgatgaccacccagctaagacacagcaatctctcactggttttccactatgtttttctccagatctgtagggcccatggcattggctatgatcttgaggaaaggcaaggaactgtttttatattatatgagcacctgaagagacacaagttgggaatgttaacaatcggcgaggatctccagggggtcctcatgacctttgctcgccatctcttcatcatccatcaagaaatatcagcacctaatatgcaaggcgagaccaattttaagaccaccattgctgatattgaaactattctaagagtaacaaaggaaaacaaaatgagatttgaagaggagcaacagtccaaagatgataaaaacctctctaaacccaagaaatgatcctggaatacagtacataacaatttggatcccagtctggaataaaaagggcaatttttttttctgttagaaataaaagccaggggaaattggtttgctttgtgtgctaggaggtgaatcagaacagattataatgaaatgctctttttaaaacattgtttattaagtgatcttattttatttattaaaccaaaacttatttgtgttttcatttgagagtgttgaacaatcccttcttcttctcaaactcagaaaaaagtaatctgataaaagaagaaagttaaaagtcttactgatatcacctccgcatttacttcctcataggcctcaggattatgtagcttttattttttatgttttataaagttttctcctatttctaatagtccatcgatcttctgcatttataggtttgaataaaggcttaagaattgctatttgtcaaaacacaaatgcctttttttcaaagcttcaaattatattgaaattatatttatatgaatttttaagtgactatcattcatcgtgtttttgttataccaagccactattgtctgctattgttgccatttttcaaaaagtaggataagccagcatctagttaaccaaagcatcagaatgtatctaggtggcagtatctgctcttagtttaagatggagtgtagctcgagctctgtagcttgaataaacatttgtattctctagttctccatttaatacagcagtaggattttttcaagtttagttcaacattatactacctttaaaaaggcagactgttaagattgtagtagtgctgactctaactttcagcattcacttcataattgtccaaaaatatttccacatcagtgagctttactgaagggtgaaataaaagcaaattacaacaccaaaaccattattgttttaaagaatgacctttatgtctataaaaatattttagtgtattggggaaaggaataggatttttacctgtggaatttcaataatttgttaactgtgattcagccacaggctaagagtttctgtaataaaattaacatttgtgtgtgtca

SEQ ID NO: 291621 - DNA, 3776 bp, Homo sapiens
cgcgcgcggtgttgccatggggacgagcggctccggctgaaggtttccgtgcttggaaaccgcgcctccgcggaggtagccgttccctgacctagccatggcacagaacactgaaaaccacgaccctgtcggatccatcttaatccagatccatgaagacctttatcagttaaaggagaaattaacaaaattctcacctgaggaaaaaggagagactctagacattcagagtcttgaaacagcaatcaaaaggactgaagtggggttaagaccactttcactatacctcgggaaccacctccatctccagcagaagtgaagttctttcccaagaaacaaagatcaaaggggaaaagcagaaggtcaagaggacatcatgataggaaggccatgaaagtcaaaacacctttgagagccctgaaatcactgtgggattatgactttttaatttatgatggtgtcatagacaatacagccccagacttcttagcattcaaggaacattttagcttagcttggggaggtattttttctctcttggaacacgtcgagaagtttctcaggaactatgctataccagaagtcaaaataaaagggaataatttggtggccctccttccagagtttgagctgacgaataaacttaccagatatgaccttctctcagtgttagaggacccagctcatgtccaaatgctgataaatcttccagggcaaaggtacaagggccaagatggaaattcggaggccgccatgaagatccaagccacatggaaatgctacaaagcaagaaaattcttcctcttttatcgccagcagaagtgggcatcaggtgtgattgccattgcttggctgttatattgccataagactcgactaaagaagatactaaaggaatcacgtcagagacacctggagaattttcgcattcgagccaagcatctggcagccaactggaatcgcatcaggacctccaggaggactattatccatatcccatcattagggtattcccagcctgtgagagaacatattgccgatttcaacacacagcagaacatgcagctggggaggctgtgtgacatcttagatgccaatgtgaatgtcatctacatctgctcccatcatatgaatgacgagttagtgctgtattacaaaaaaatcctaagtctacatgcagccgtcaaatctgggaaccttgaggacagaagtgacctgcaggacaggttcaaaattatcacacctgaagctgtaaacatcttccctaagcatcatatgtgcctggccactcacctgatgtacagtcccaaggcaatcaaaagaataaaaaatctcatccgaggaacagaggcctacatcgtcagcgggctcctccacagagatgatttagctgtggccgatatgttagacatacccatcctgggctctgagcctgaactagctcatctttatagtaccaaatctggaggcaaacgtgtctttgacagtgccaatgtggcagttcctcctggaatatatgatatttatagtcagcaacagatgatagagcagctgagtcagctgataactgatcacctgcaaatacagcgctggctctttaaaatggactctgagttccgaggaaatgggactgcattttgtgatattccttcctacctaaagtgctacaaatgggtgctaaaggagagtagcagatatggccttgaagactggagaaagaaatgggcacaagagccagctttggtgaagatctctgaggagctggcgggcattttagcacagcacgcacagccagtcaatgagaaacggttcccgacgtggaggaaattcctccaaacatttctcagtcaagggggtgtgatcgaagcattcccacctgcagacaatgtcaccaacctcacagtggacatgctgatagagcccaacgggaaaatcagcgtgctgtcgacaggggaccagcttcatgctgaaagccccttcatctcctctggtaccaccgtgcctcagacctcagtggatccccaagttctcacttatttgtgcctccaaattggaaaagcctgcagaatgagagatgtggttggttacttttcgatagatctggtgacttttatagatccaagcaccttggaacaacaggtgtgggcaaccggccttaacctcgcatatagtgaccagctggccctgactcaactcaccttatacctgacaaacggccatctggattgcagtttgagcaccctggaagtgccccgctttgttccaaaggaaaggaagaaaaccaaatgcatgagtgcgctgtcaatgccgatgctggcaaccagtcgctatgcagtgatgaccacccagctaagacacagcaatctctcactggttttccactatgtttttctccagatctgtagggcccatggcattggctatgatcttgaggaaaggcaaggaactgtttttatattatatgagcacctgaagagacacaagttgggaatgttaacaatcggcgaggatctccagggggtcctcatgacctttgctcgccatctcttcatcatccatcaagaaatatcagcacctaatatgcaaggcgagaccaattttaagaccaccattgctgatattgaaactattctaagagtaacaaaggaaaacaaaatgagatttgaagaggagcaacagtccaaagatgataaaaacctctctaaacccaagaaatgatcctggaatacagtacataacaatttggatcccagtctggaataaaaagggcaatttttttttctgttagaaataaaagccaggggaaattggtttgctttgtgtgctaggaggtgaatcagaacagattataatgaaatgctctttttaaaacattgtttattaagtgatcttattttatttattaaaccaaaacttatttgtgttttcatttgagagtgttgaacaatcccttcttcttctcaaactcagaaaaaagtaatctgataaaagaagaaagttaaaagtcttactgatatcacctccgcatttacttcctcataggcctcaggattatgtagcttttattttttatgttttataaagttttctcctatttctaatagtccatcgatcttctgcatttataggtttgaataaaggcttaagaattgctatttgtcaaaacacaaatgcctttttttcaaagcttcaaattatattgaaattatatttatatgaatttttaagtgactatcattcatcgtgtttttgttataccaagccactattgtctgctattgttgccatttttcaaaaagtaggataagccagcatctagttaaccaaagcatcagaatgtatctaggtggcagtatctgctcttagtttaagatggagtgtagctcgagctctgtagcttgaataaacatttgtattctctagttctccatttaatacagcagtaggattttttcaagtttagttcaacattatactacctttaaaaaggcagactgttaagattgtagtagtgctgactctaactttcagcattcacttcataattgtccaaaaatatttccacatcagtgagctttactgaagggtgaaataaaagcaaattacaacaccaaaaccattattgttttaaagaatgacctttatgtctataaaaatattttagtgtattggggaaaggaataggatttttacctgtggaatttcaataatttgttaactgtgattcagccacaggctaagagtttctgtaataaaattaacatttgtgtgtgtca

SEQ ID NO: 291622 - DNA, 2164 bp, Homo sapiens
ctccagtcttcaaggccatatctgctactctcctttagcacccatttgtagcactttaggtaggaaggaatatcacaaaatgcagtcccatttcctcggaactcagagtccattttaaagagccagctttggtgaagatctctgaggagctggcgggcattttagcacagcacgcacagccagtcaatgagaaacggttcccgacgtggaggaaattcctccaaacatttctcagtcaagggggtgtgatcgaagcattcccacctgcagacaatgtcaccaacctcacagtggacatgctgatagagcccaacgggaaaatcagcgtgctgtcgacaggggaccagcttcatgctgaaagccccttcatctcctctggtaccaccgtgcctcagacctcagtggatccccaagttctcacttatttgtgcctccaaattggaaaagcctgcagaatgagagatgtggttggttacttttcgatagatctggtgacttttatagatccaagcaccttggaacaacaggtgtgggcaaccggccttaacctcgcatatagtgaccagctggccctgactcaactcaccttatacctgacaaacggccatctggattgcagtttgagcaccctggaagtgccccgctttgttccaaaggaaaggaagaaaaccaaatgcatgagtgcgctgtcaatgccgatgctggcaaccagtcgctatgcagtgatgaccacccagctaagacacagcaatctctcactggttttccactatgtttttctccagatctgtagggcccatggcattggctatgatcttgaggaaaggcaaggaactgtttttatattatatgagcacctgaagagacacaagttgggaatgttaacaatcggcgaggatctccagggggtcctcatgacctttgctcgccatctcttcatcatccatcaagaaatatcagcacctaatatgcaaggcgagaccaattttaagaccaccattgctgatattgaaactattctaagagtaacaaaggaaaacaaaatgagatttgaagaggagcaacagtccaaagatgataaaaacctctctaaacccaagaaatgatcctggaatacagtacataacaatttggatcccagtctggaataaaaagggcaatttttttttctgttagaaataaaagccaggggaaattggtttgctttgtgtgctaggaggtgaatcagaacagattataatgaaatgctctttttaaaacattgtttattaagtgatcttattttatttattaaaccaaaacttatttgtgttttcatttgagagtgttgaacaatcccttcttcttctcaaactcagaaaaaagtaatctgataaaagaagaaagttaaaagtcttactgatatcacctccgcatttacttcctcataggcctcaggattatgtagcttttattttttatgttttataaagttttctcctatttctaatagtccatcgatcttctgcatttataggtttgaataaaggcttaagaattgctatttgtcaaaacacaaatgcctttttttcaaagcttcaaattatattgaaattatatttatatgaatttttaagtgactatcattcatcgtgtttttgttataccaagccactattgtctgctattgttgccatttttcaaaaagtaggataagccagcatctagttaaccaaagcatcagaatgtatctaggtggcagtatctgctcttagtttaagatggagtgtagctcgagctctgtagcttgaataaacatttgtattctctagttctccatttaatacagcagtaggattttttcaagtttagttcaacattatactacctttaaaaaggcagactgttaagattgtagtagtgctgactctaactttcagcattcacttcataattgtccaaaaatatttccacatcagtgagctttactgaagggtgaaataaaagcaaattacaacaccaaaaccattattgttttaaagaatgacctttatgtctataaaaatattttagtgtattggggaaaggaataggatttttacctgtggaatttcaataatttgttaactgtgattcagccacaggctaagagtttctgtaataaaattaacatttgtgtgtgtca

SEQ ID NO: 291623 - DNA, 1458 bp, Homo sapiens
cgcgcgcggtgttgccatggggacgagcggctccggctgaaggtttccgtgcttggaaaccgcgcctccgcggaggtagccgttccctgacctagccatggcacagaacactgaaaaccacgaccctgtcggatccatcttaatccagatccatgaagacctttatcagttaaaggagaaattaacaaaattctcacctgaggaaaaaggagagactctagacattcagagtcttgaaacagcaatcaaaaggactgaagtggggttaagaggattttaagtatgatagaacgagggctgattccaccaacagcaaggattacctttcagaatccacccattacacccagagcagctcctctgcatagttttgatgaagcacgtaagattccaactgtagccactttcactatacctcgggaaccacctccatctccagcagaagtgaagttctttcccaagaaacaaagatcaaaggggaaaagcagaaggtcaagaggacatcatgataggaaggccatgaaagtcaaaacacctttgagagccctgaaatcactgtgggattatgactttttaatttatgatggtgtcatagacaatacagccccagacttcttagcattcaaggaacattttagcttagcttggggaggtattttttctctcttggaacacgtcgagaagtttctcaggaactatgctataccagaagtcaaaataaaagggaataatttggtggccctccttccagagtttgagctgacgaataaacttaccagatatgaccttctctcagtgttagaggacccagctcatgtccaaatgctgataaatcttccagggcaaaggtacaagggccaagatggaaattcggaggccgccatgaagatccaagccacatggaaatgctacaaagcaagaaaattcttcctcttttatcgccagcagaagtgggcatcaggtgtgattgccattgcttggctgttatattgccataagactcgactaaagaagatactaaaggaatcacgtcagagacacctggagaattttcgcattcgagccaagcatctggcagccaactggaatcgcatcaggacctccaggaggactattatccatatcccatcattaggtataacacttttgcctgcaaatctatcagcaacctctattacccaccacattatggctccttgattgagttcaaggaaggccccttgttttattcaaattggtctcggcaggaaaatgttctcgacatgatgagagtaataacacaggaccctcgcttgaaacggcgtttaatttggggattaagcaaataaagtcattatgtgggggctgctattcagtggagaggtgatttgctgtaattcgctttcatctgtatgaaatgaactaaaaagttgtatttttccccgaaataacagataatgttagagatacgggtgatga

SEQ ID NO: 291624 - DNA, 3229 bp, Homo sapiens
cgcgcgcggtgttgccatggggacgagcggctccggctgaaggtttccgtgcttggaaaccgcgcctccgcggaggtagccgttccctgacctagccatggcacagaacactgaaaaccacgaccctgtcggatccatcttaatccagatccatgaagacctttatcagttaaaggagaaattaacaaaattctcacctgaggaaaaaggagagactctagacattcagagtcttgaaacagcaatcaaaaggactgaagtggggttaagaggattttaagtatgatagaacgagggctgattccaccaacagcaaggattacctttcagaatccacccattacacccagagcagctcctctgcatagttttgatgaagcacgtaagattccaactgtagccactttcactatacctcgggaaccacctccatctccagcagaagtgaagttctttcccaagaaacaaagatcaaaggggaaaagcagaaggtcaagaggacatcatgataggaaggccatgaaagtcaaaacacctttgagagccctgaaatcactgtgggattatgactttttaatttatgatggtgtcatagacaatacagccccagacttcttagcattcaaggaacattttagcttagcttggggaggtattttttctctcttggaacacgtcgagaagtttctcaggaactatgctataccagaagtcaaaataaaagggaataatttggtggccctccttccagagtttgagctgacgaataaacttaccagatatgaccttctctcagtgttagaggacccagctcatgtccaaatgctgataaatcttccagggcaaaggtacaagggccaagatggaaattcggaggccgccatgaagatccaagccacatggaaatgctacaaagcaagaaaattcttcctcttttatcgccagcagaagtgggcatcaggtgtgattgccattgcttggctgttatattgccataagactcgactaaagaagatactaaaggaatcacgtcagagacacctggagaattttcgcattcgagccaagcatctggcagccaactggaatcgcatcaggacctccaggaggactattatccatatcccatcattagggtattcccagcctgtgagagaacatattgccgatttcaacacacagcagaacatgcagctggggaggctgtgtgacatcttagatgccaatgtgaatgtcatctacatctgctcccatcatatgaatgacgagttagtgctgtattacaaaaaaatcctaagtctacatgcagccgtcaaatctgggaaccttgaggacagaagtgacctgcaggacaggttcaaaattatcacacctgaagctgtaaacatcttccctaagcatcatatgtgcctggccactcacctgatgtacagtcccaaggcaatcaaaagaataaaaaatctcatccgaggaacagaggcctacatcgtcagcgggctcctccacagagatgatttagctgtggccgatatgttagacatacccatcctgggctctgagcctgaactagctcatctttatagtaccaaatctggaggcaaacgtgtctttgacagtgccaatgtggcagttcctcctggaatatatgatatttatagtcagcaacagatgatagagcagctgagtcagctgataactgatcacctgcaaatacagcgctggctctttaaaatggactctgagttccgaggaaatgggactgcattttgtgatattccttcctacctaaagtgctacaaatgggtgctaaaggagagtagcagatatggccttgaagactggagaaagaaatgggcacaagagccagctttggtgaagatctctgaggagctggcgggcattttagcacagcacgcacagccagtcaatgagaaacggttcccgacgtggaggaaattcctccaaacatttctcagtcaagggggtgtgatcgaagcattcccacctgcagacaatgtcaccaacctcacagtggacatgctgatagagcccaacgggaaaatcagcgtgctgtcgacaggggaccagcttcatgctgaaagccccttcatctcctctggtaccaccgtgcctcagacctcagtggatccccaagttctcacttatttgtgcctccaaattggaaaagcctgcagaatgagagatgtggttggttacttttcgatagatctggtgacttttatagatccaagcaccttggaacaacaggtgtgggcaaccggccttaacctcgcatatagtgaccagctggccctgactcaactcaccttatacctgacaaacggccatctggattgcagtttgagcaccctggaagtgccccgctttgttccaaaggaaaggaagaaaaccaaatgcatgagtgcgctgtcaatgccgatgctggcaaccagtcgctatgcagtgatgaccacccagctaagacacagcaatctctcactggttttccactatgtttttctccagatctgtagggcccatggcattggctatgatcttgaggaaaggcaaggaactgtttttatattatatgagcacctgaagagacacaagttgggaatgttaacaatcggcgaggatctccagggggtcctcatgacctttgctcgccatctcttcatcatccatcaagaaatatcagcacctaatatgcaaggcgagaccaattttaagaccaccattgctgatattgaaactattctaagagtaacaaaggaaaacaaaatgagatttgaagaggagcaacagtccaaagatgataaaaacctctctaaacccaagaaatgatcctggaatacaatctctctaatccattcgaggggcccattgttcagacacttgacagataggaagtcctacatgcccattagagccgcgcctcgactgaagccagagcaacataaggtccaagagactcattagttcactggcacaatcgtgtcctgagagtaaatgaaaccctctgtctccttatggctctcatctgctctggactttaaaagaaaactgtctccgttttgttcggcacagtagtggatcattcacatggtgagagcccctgcttaacagtacaaaactgttaaatctatcggaaagttttgcatgtgaattttgattagcactcccgaagctcaagctgctggcaatagcgaaacgatttcgccatcct

SEQ ID NO: 291625 - DNA, 1330 bp, Homo sapiens
  misc_feature (44)..(44): n is a, c, g, or t
  misc_feature (47)..(47): n is a, c, g, or t
gaggaagaggagctgggagggaggtttaaacaaggcaacaagcnatngtaacaatcggcgaggatctccagggggtcctcatgacctttgctcgccatctcttcatcatccatcaagaaatatcagcacctaatatgcaaggcgagaccaattttaagaccaccattgctgatattgaaactattctaagagtaacaaaggaaaacaaaatgagatttgaagaggagcaacagtccaaagatgataaaaacctctctaaacccaagaaatgatcctggaatacagtacataacaatttggatcccagtctggaataaaaagggcaatttttttttctgttagaaataaaagccaggggaaattggtttgctttgtgtgctaggaggtgaatcagaacagattataatgaaatgctctttttaaaacattgtttattaagtgatcttattttatttattaaaccaaaacttatttgtgttttcatttgagagtgttgaacaatcccttcttcttctcaaactcagaaaaaagtaatctgataaaagaagaaagttaaaagtcttactgatatcacctccgcatttacttcctcataggcctcaggattatgtagcttttattttttatgttttataaagttttctcctatttctaatagtccatcgatcttctgcatttataggtttgaataaaggcttaagaattgctatttgtcaaaacacaaatgcctttttttcaaagcttcaaattatattgaaattatatttatatgaatttttaagtgactatcattcatcgtgtttttgttataccaagccactattgtctgctattgttgccatttttcaaaaagtaggataagccagcatctagttaaccaaagcatcagaatgtatctaggtggcagtatctgctcttagtttaagatggagtgtagctcgagctctgtagcttgaataaacatttgtattctctagttctccatttaatacagcagtaggattttttcaagtttagttcaacattatactacctttaaaaaggcagactgttaagattgtagtagtgctgactctaactttcagcattcacttcataattgtccaaaaatatttccacatcagtgagctttactgaagggtgaaataaaagcaaattacaacaccaaaaccattattgttttaaagaatgacctttatgtctataaaaatattttagtgtattggggaaaggaataggatttttacctgtggaatttcaataatttgttaactgtgattcagccacaggctaagagtttctgtaataaaattaacatttgtgtgtgtca

SEQ ID NO: 291626 - DNA, 1204 bp, Homo sapiens
cgcgcgcggtgttgccatggggacgagcggctccggctgaaggtttccgtgcttggaaaccgcgcctccgcggaggtagccgttccctgacctagccatggcacagaacactgaaaaccacgaccctgtcggatccatcttaatccagatccatgaagacctttatcagttaaaggagaaattaacaaaattctcacctgaggaaaaaggagagactctagacattcagagtcttgaaacagcaatcaaaaggactgaagtggggttaagaattcacattgagaagtatttaaatgttgtaaaccagaatgtattaacgacttctgttaatgatgagagcttatatactccccaggcttccaaatggttacttccaactgtaattgatcagaaatcatttattttccctcaggaatctgagggtacattttggcaaccccaaagacagcacagttcatctctgcctgtctttccaagagcaaagataaaggtttcgaagttaatcaaagggtctaacatatccagcctcacggttctgccatcttctcattgcacagatccctatttcactcctataccagtcttacaagcagatgcccacaaagggattttaagtatgatagaacgagggctgattccaccaacagcaaggattacctttcagaatccacccattacacccagagcagctcctctgcatagttttgatgaagcacgtaagattccaactgtagccactttcactatacctcgggaaccacctccatctccagcagaagtgaagttctttcccaagaaacaaagatcaaaggggaaaagcagaaggtcaagaggacatcatgataggaaggtctgtaatttgtgtgactagttgaaatttagggtctgtcacctgatgtcccttccttttgctgcagggcaagagtatgggtgactgcttgacagctggagatggcaacaaaagttcgtgcttcctttgtaaaagaaattagatcatggtttcaggaaaaaaaaaaaacatggttcatttaaagtgaaaacccttttttgcctccttttgggactgaattacttctcaggcttcagtccaaacaaatgacttagcgtccttaaaatttggctgaatcacatcaatcttcaaattcaatcaaagattttcatcttttaaaagtacacttaaaaagaaataaaatgtgaaaaataa

SEQ ID NO: 291627 - DNA, 493 bp, Homo sapiens
ctagtatagtttgggaaagaactccttgtgtgtgatcatgtttgtttgcttgtttttctcaaatcttgttgtcttatacctgagaaccacttcgaatctaaaagataaacatatacctagttccttcctgaaataccagaaattgcaagcttgtcaaattgtgattaatgaggatttactggatatcaacatatgagtcttcgatcaccaagaaagcaaagtgtattccatctgcatgacagtttaggctgtgaataccaagaatataatgttatgacctaagaaatctgaggatatcgtccttctgcctgctgaaaatcatggaattaaaaagatatagagtccattctgagaaattcaatttcatcaaatggaaagtgaaagcatctccaattctatatatacactgaagccttcatgccccatttacactacttgtatcgaatcccgtaataggtttctgcctattgagtccaaataaatggtggttatc

SEQ ID NO: 291628 - DNA, 612 bp, Homo sapiens
taggctgaggattacatttcacttggttacagctgactggggattttaatcatttggagccacactgaaaaaaaaatttccccctgcaatctactcttaactgatagtcgctaactttggttatgtgtggtaagtatttgacaatggtaagtatttttcaaaaacatttttcctttcttcttcacatgtaaatagattgctgctgatacctatactgtgtctgtattggttggaatgtccaaacaaactggaatagaatttaaaagtttttttgcggggtgttcatggtcactcatataattgtgctcctctggaagatagatttccccagaagtaagaaacaattcttctgcaattcttttctatgcttacctcacttgtcacattatgtgctttttttctattatggtactaatcagagtagagagcagtcctgtgctggaggaagaaatatatcattattgacttgtgtttccctaggggaagttggttgttataggaaaactgatggatgagcaacatttaatggcaaatgaggaaatgaattagcaaatggatgaattgttttacatgtcttctaaaatacatgtatacatgtagatacttgggaat

SEQ ID NO: 291629 - DNA, 1451 bp, Homo sapiens
taggctgaggattacatttcacttggttacagctgactggggattttaatcatttggagccacactgaaaaaaaaatttccccctgcaatctactcttaactgatagtcgctaactttggttatgtgtgtctattcagaatattacattaattgatttctcaaacaaaggtcctttctgaaatggtatctatgattcagctattcaaaacctaatgaagttggtgactatgacaatgtggagaaatcatgacagaaaatgtggtttgtactggggctgtcaatgctgtaaaggaagtttgggaaaaaagaataaagaaactcaatgaagacctgaagcgagagaaggaatttcaacacaagctagtgcggatctgggaagaacgagtaagcttaaccaagctaagagaaaaggtcaccagggaagatggaagagtcattttgaagatagaaaaagaggaatggaagaccctcccttcttctctgctgaaactgaatcaactacaggaatggcaacttcatagaactggtttgctgaaaattcctgaattcattggaagattccagaacctcatggtgttagatttatctcgaaacacaatttcagagataccaccagggattggactgcttactagacttcaggaactgattctcaggtacaacaaaatcaagactgtccccaaggaactaagtaattgtgccagcttggagaaactagaactggctgttaacagagatatatgtgatcttccacaagagctcagcaatctgctaaaacttactcaccttgatctgagtatgaacgattttactacaatccctcttgctgtgttgaacatgcctgcccttgagtggctggacatgggaagcaacaaacttgaacaacttcctgatactatagaaagaatgcaaaatctacatacgttatggctgcaacgaaatgaaataacatgcttgcctcaaacaatcagcaatatgaaaaatctgggtactcttgttctcagcaacaataaactgcaagatattccagtatgcatggaagaaatggcaaatctgaggtttgtcaacttcagagacaacccactgaaattgaaagtatcacttcctcccagtgaaggcacagatgaagaagaggaacgggaattatttggccttcagtttatgcacacatacatacaagagtcacggagaagagcagatcaccaagtcaacggttcaactactttaccaatctccataaatacggatggataatataattcaagatgcccttctaaagaggattactttggtgaattctctaatgtttggatttctgaagtaaaaagaaaagctattaccaaagtttaatgaggccacagcattttttaaagttcatattatttgctatttaaagtatatatttttttgatataaaaatataattaaaaaattttttttggtggaagac

SEQ ID NO: 291630 - DNA, 1226 bp, Homo sapiens
taggctgaggattacatttcacttggttacagctgactggggattttaatcatttggagccacactgaaaaaaaaatttccccctgcaatctactcttaactgatagtcgctaactttggttatgtgtgtctattcagaatattacattaattgatttctcaaacaaaggtcctttctgaaatggtatctatgattcagctattcaaaacctaatgaagttggtgactatgacaatgtggagaaatcatgacagaaaatgtggtttgtactggggctgtcaatgctgtaaaggaagtttgggaaaaaagaataaagaaactcaatgaagacctgaagcgagagaaggaatttcaacacaagctagtgcggatctgggaagaacgagtaagcttaaccaagctaagagaaaaggtcaccagggaagatggaagagtcattttgaagatagaaaaagaggaatggaagaccctcccttcttctctgctgaaactgaatcaactacaggaatggcaacttcatagaactggtttgctgaaaattcctgaattcattggaagattccagaacctcatggtgttagatttatctcgaaacacaatttcagagataccaccagggattggactgcttactagacttcaggaactgattctcaggtacaacaaaatcaagactgtccccaaggaactaagtaattgtgccagcttggagaaactagaactggctgttaacagagatatatgtgatcttccacaagaggttagaaagacataaatgcctatgattgtattttccatctgcagtagttgaccactcaatgtgtggttgttaacaataataaaactaatgagaaaattctatgtatttcagaaaaaatatttagagaaaaccatttccttaagtataatgcaggttttaactggagaaagatttagtgtaaaagatacttctattattatcacagtactgacatcatttgttaaactgtgatctccttgaaggccagggtgagagttgtattatagtctcagaattgagggcagagcctaggttgtagtgattacttaaatgctttttgaattaataaatggttatcataaagcacagacaatgtagtgatagcaatgggactggaatgcctccaaactttgatttggtatgatgtcttgttattggtcaaaccaaattgatcatataaaaataaagacatttgtattactttttg

SEQ ID NO: 291631 - DNA, 1411 bp, Homo sapiens
taggctgaggattacatttcacttggttacagctgactggggattttaatcatttggagccacactgaaaaaaaaatttccccctgcaatctactcttaactgatagtcgctaactttggttatgtgtggtcctttctgaaatggtatctatgattcagctattcaaaacctaatgaagttggtgactatgacaatgtggagaaatcatgacagaaaatgtggtttgtactggggctgtcaatgctgtaaaggaagtttgggaaaaaagaataaagaaactcaatgaagacctgaagcgagagaaggaatttcaacacaagctagtgcggatctgggaagaacgagtaagcttaaccaagctaagagaaaaggtcaccagggaagatggaagagtcattttgaagatagaaaaagaggaatggaagaccctcccttcttctctgctgaaactgaatcaactacaggaatggcaacttcatagaactggtttgctgaaaattcctgaattcattggaagattccagaacctcatggtgttagatttatctcgaaacacaatttcagagataccaccagggattggactgcttactagacttcaggaactgattctcaggtacaacaaaatcaagactgtccccaaggaactaagtaattgtgccagcttggagaaactagaactggctgttaacagagatatatgtgatcttccacaagagctcagcaatctgctaaaacttactcaccttgatctgagtatgaacgattttactacaatccctcttgctgtgttgaacatgcctgcccttgagtggctggacatgggaagcaacaaacttgaacaacttcctgatactatagaaagaatgcaaaatctacatacgttatggctgcaacgaaatgaaataacatgcttgcctcaaacaatcagcaatatgaaaaatctgggtactcttgttctcagcaacaataaactgcaagatattccagtatgcatggaagaaatggcaaatctgaggtttgtcaacttcagagacaacccactgaaattgaaagtatcacttcctcccagtgaaggcacagatgaagaagaggaacgggaattatttggccttcagtttatgcacacatacatacaagagtcacggagaagagcagatcaccaagtcaacggttcaactactttaccaatctccataaatacggatggataatataattcaagatgcccttctaaagaggattactttggtgaattctctaatgtttggatttctgaagtaaaaagaaaagctattaccaaagtttaatgaggccacagcattttttaaagttcatattatttgctatttaaagtatatatttttttgatataaaaatataattaaaaaattttttttggtggaagac

SEQ ID NO: 291632 - DNA, 1539 bp, Homo sapiens
taggctgaggattacatttcacttggttacagctgactggggattttaatcatttggagccacactgaaaaaaaaatttccccctgcaatctactcttaactgatagtcgctaactttggttatgtgtgtctattcagaatattacattaattgatttctcaaacaaaggtgtgcctctcataaacaacactcaggattttgtcttttctttaactggacaacctttgtatattaacttggaacacttaatcatcaggtcctttctgaaatggtatctatgattcagctattcaaaacctaatgaagttggtgactatgacaatgtggagaaatcatgacagaaaatgtggtttgtactggggctgtcaatgctgtaaaggaagtttgggaaaaaagaataaagaaactcaatgaagacctgaagcgagagaaggaatttcaacacaagctagtgcggatctgggaagaacgagtaagcttaaccaagctaagagaaaaggtcaccagggaagatggaagagtcattttgaagatagaaaaagaggaatggaagaccctcccttcttctctgctgaaactgaatcaactacaggaatggcaacttcatagaactggtttgctgaaaattcctgaattcattggaagattccagaacctcatggtgttagatttatctcgaaacacaatttcagagataccaccagggattggactgcttactagacttcaggaactgattctcaggtacaacaaaatcaagactgtccccaaggaactaagtaattgtgccagcttggagaaactagaactggctgttaacagagatatatgtgatcttccacaagagctcagcaatctgctaaaacttactcaccttgatctgagtatgaacgattttactacaatccctcttgctgtgttgaacatgcctgcccttgagtggctggacatgggaagcaacaaacttgaacaacttcctgatactatagaaagaatgcaaaatctacatacgttatggctgcaacgaaatgaaataacatgcttgcctcaaacaatcagcaatatgaaaaatctgggtactcttgttctcagcaacaataaactgcaagatattccagtatgcatggaagaaatggcaaatctgaggtttgtcaacttcagagacaacccactgaaattgaaagtatcacttcctcccagtgaaggcacagatgaagaagaggaacgggaattatttggccttcagtttatgcacacatacatacaagagtcacggagaagagcagatcaccaagtcaacggttcaactactttaccaatctccataaatacggatggataatataattcaagatgcccttctaaagaggattactttggtgaattctctaatgtttggatttctgaagtaaaaagaaaagctattaccaaagtttaatgaggccacagcattttttaaagttcatattatttgctatttaaagtatatatttttttgatataaaaatataattaaaaaattttttttggtggaagac

SEQ ID NO: 291633 - DNA, 321 bp, Homo sapiens
ataagctttgaaagtaagttgtctaaagctagtgtttttttttctcttaggaaaaaaacataagattcttgagatatatcacatctcaccaagtcgttcagttattgaaaccagttaaaaacgagtaatttagtatattatcatttgacctttctccagggaaataaatgtacacttccatgacacctataaaaatactgttttttgatgaacttctaggtttgtcaacttcagagacaacccactgaaattgaaagtatcacttcctcccagtgaaggcacagatgaagaagaggaacgggaattatttggccttcagtt

SEQ ID NO: 291634 - DNA, 807 bp, Homo sapiens
cagcaggatagaaaagtatagaggaaaaaggaagttccacctccatgatcctttagtcctctagctgttctccccagagaaagcaactctaagtttcttgcagaaaggacctggatacactagtagatgtaccataatttatgtaaacagtctgctattgaaggacattggtttgtttcccaccatcttccactccaaatcatgctgcagtgattatccctgagtgtatgtctctctgcacacagacaagggaatgagaagcagcaagttaaatgcagaacggaaatgaagctgttagaccaaattttcagcttctcacatggcacctctatctgtgaatacgattttctcacttgttagagcctctgtcacataatacacttgccacagaatactgccacagagaagagcaaaggaagacagctggctagccaaatgtccccacaatggaatagtgcctgaaagacccatgggggagctgtccatcagagccacactccccaccagctccttggaaggcacccccaaaagcaggagtggagagtccaaatgtcatctgccctcgaacaccacatgaaatggggagtacccttcactcagagagcagcccacccctcttcctcctttcagggagggttaccacagtggaagtgaagctcctcaacaagccttcagctctgtgatgaaattccctggtcctccacacctatccatccctgacagagtatgatcagtttgcttctatttctagtagaatatatttcacagcataatagttcaaagaaaccttacaaccctatccccaaa

SEQ ID NO: 291635 - DNA, 505 bp, Homo sapiens
cagcaggatagaaaagtatagaggaaaaaggaagttccacctccatgatcctttagtcctctagctgttctccccagagaaagcaactctaagtttcttgcagaaaggacctggatacactagtagatgtaccataatttatgtaaacagtctgctattgaaggacattggtttgtttcccaccatcttccactccaaatcatgctgcagtgattatccctgagtgtatgtctctctgcacacagagatgtggtctatgttgcccagggtggactcgaactcctggactcaagtgaccctcctgcctcagtctcccaagtagctgggactgcagacaagggaatgagaagcagcaagttaaatgcagaacggaaatgaagctgttagaccaaattttcagcttctcacatggtacaattattgtttttaatttctatgtaagcaagttcttaagtcacattgagaagatttttaaaaatccattaacaataatttacatccaaca

SEQ ID NO: 291636 - DNA, 406 bp, Homo sapiens
tcctgcatttttctgaagggcttttgtgactttggttccctgtgagcaagatgatctgcaagtggcgacatgaactgattaccaatcactgacttcaggaggaagcaagttctggaggctgggaagtccaagatcaaggcaggcgccagcagactctgggtctgacaagggaatgagaagcagcaagttaaatgcagaacggaaatgaagctgttagaccaaattttcagcttctcacatgggcacagattaccaaaagtgggactgctggcacaaagcatatgtgtgtattcatcgtgactgttactaccagattcttttccaagaaagttctaggcactaactttttttttaagactgcatgaagtatatctttttctaataatacagtatttcatggactata

SEQ ID NO: 291637 - DNA, 749 bp, Homo sapiens
gaagcagttagttggaatgggagcatctgcagtgatttgcccatggccattccagccccttcaatttgacccagcgcctcgtcgtggtgagcctcatgttacacggcgcaccccagactacttcctataaatttctcctgggaaacctgcctttgtatgtggaagtatacctggctttttaaaatatatgtatttaaaaacaaaaagcaacagtaatctatgtgtttctgtaacaaattgggatctgtcttggcattaaaccacatcatggaccaaatgtgccatactaatgatgagcatttagcacaatttgagactgaaatttagtacactatgttctaggtcagtctaacagtttgcctgctgtatttatagtaaccattttcctttggactgttcaagcaaaaaaggtaactaactgcttcatctccttttgcgcttatttggaaattttagttatagtgtttaactggcatggattaatagagttggagttttatttttaagaaaaattcacaagctaacttccactaatccattatcctttattttattgaaatgtataattaacttaactgaagaaaaggttcttcttgggagtatgttgtcataacatttaaagagatttcccttcatttaaactaaattactgttttatgttgatctgcatatttctgtatatttgtcatgacagtgcttgcatcctatttggtgtactcagcaaataaacttttcattttaaacaaaaa

SEQ ID NO: 291638 - DNA, 760 bp, Homo sapiens
cgggctgcaggaattcggcacgagcatgatagcagcctggaattagatgacactttaaaatattccttccttcaatttgacccagcgcctcgtcgtggtgagcctcatgttacacggcgcaccccagactacttcctataaatttctcctgggaaacctgcctttgtatgtggaagtatacctggctttttaaaatatatgtatttaaaaacaaaaagcaacagtaatctatgtgtttctgtaacaaattgggatctgtcttggcattaaaccacatcatggaccaaatgtgccatactaatgatgagcatttagcacaatttgagactgaaatttagtacactatgttctaggtcagtctaacagtttgcctgctgtatttatagtaaccattttcctttggactgttcaagcaaaaaaggtaactaactgcttcatctccttttgcgcttatttggaaattttagttatagtgtttaactggcatggattaatagagttggagttttatttttaagaaaaattcacaagctaacttccactaatccattatcctttattttattgaaatgtataattaacttaactgaagaaaaggttcttcttgggagtatgttgtcataacatttaaagagatttcccttcatttaaactaaattactgttttatgttgatctgcatatttctgtatatttgtcatgacagtgcttgcatcctatttggtgtactcagcaaataaacttttcattttaaacaaaaa

SEQ ID NO: 291639 - DNA, 670 bp, Homo sapiens
gttgcccattaaagaaatttggttaagttttgcagctcccaccaatgtgagatctcacacacatgcattttttaggcagctgaaccttttaagcattgcaacaccagctgttggtgcatggcttgttcccattgaccaactcaagtcatctttaaacaaattggaaactgagggaaccttgagaatttgtgctgttatgggatgcataatgacaggagcatttagcacaatttgagactgaaatttagtacactatgttctaggtcagtctaacagtttgcctgctgtatttatagtaaccattttcctttggactgttcaagcaaaaaaggtaactaactgcttcatctccttttgcgcttatttggaaattttagttatagtgtttaactggcatggattaatagagttggagttttatttttaagaaaaattcacaagctaacttccactaatccattatcctttattttattgaaatgtataattaacttaactgaagaaaaggttcttcttgggagtatgttgtcataacatttaaagagatttcccttcatttaaactaaattactgttttatgttgatctgcatatttctgtatatttgtcatgacagtgcttgcatcctatttggtgtactcagcaaataaacttttcattttaaacaaaaa

SEQ ID NO: 291640 - DNA, 968 bp, Homo sapiens
cccggcggaaatgcccgagcgatgacggaaacccggagggaggggagagaaagagcgagagaaggggaaagacaagtcgggagaggccggtaggcgtgaggcgggcctgaagcggcagcgggcggccttcgtccggcgagagctaggccgaggacccgcgccgcgctccccggcacctcaccgcgtccttcaccgactcccgcggcgcgcggccgggcggggaagggcgggcgggggtctcctccaggctgcgcgctcggagccgcctgctgggcttgggcggggcgcggggcccgcggccgccctacccggctcagtcctccccctgtgggacctggcgacggcggcggagggagaggggagcggcgcccgggccggggccgggggcgggtggggaggggggagggcggcggccgggctggggctcgggatccgcatcgggatcgggccgccatggacgacaaggcgttcaccaaggagctggaccagtgggtcgagcagctgaacgagtgtaagcagctgaacgagaaccaagtgcggacgctgtgcgagaaggcaaaggaaattttaacaaaagaatcaaatgtgcaagagtaaccattttcctttggactgttcaagcaaaaaaggtaactaactgcttcatctccttttgcgcttatttggaaattttagttatagtgtttaactggcatggattaatagagttggagttttatttttaagaaaaattcacaagctaacttccactaatccattatcctttattttattgaaatgtataattaacttaactgaagaaaaggttcttcttgggagtatgttgtcataacatttaaagagatttcccttcatttaaactaaattactgttttatgttgatctgcatatttctgtatatttgtcatgacagtgcttgcatcctatttggtgtactcagcaaataaacttttcattttaaacaaaaa

SEQ ID NO: 291641 - DNA, 1186 bp, Homo sapiens
agcggggaaaaaaaaaaaaagaaatttaatggtgggtccccaaggatggggataccattgaccagagaaggggtaaagaagaaaaaatgatggacaaaatatgtttaaatgttggcactattgggactgacacttttaaccattatttactcttggttaactgttgggagttagtaaaacaaatacattctctttggttaattcatacatagatattctgcctccatggtggcctctctccatccatagacacactggatcatataagagccctggatcgtttacaggaagttccacatgagggcccaatgtgtgatctgttatggtcagatccagatgatcgtggtggatggggtatttcaccacgtggtgctggctacacatttggacaagacatttctgaaacctttaaccatgccaatggtctcacactggtttctcgtgcccaccagcttgtaatggaggtatgtactttcctgacagaatgatctttatttcagattagtatatacttctgtaataaggcattatgacttaactaagaaacattcctcaccatttattacctaggtgaaaagaggaaaaacttgctggttttagcaagtagggaaagcactagtagaccagagcagaattataactcatttttgaaattgagacttagaaaaaagttacaaaaatagtaccccataattccctgtatgcttcattcagattcctgactgtaaatattttactatatttgctttatcattttgtgtctctcttcctcttcacccctcacactttcttctgaaccatttgaatatctgttgcagacagatactcctttactaccaactttctatgtgtattttgtaaaattaaggacacactgtcacataaccaccgtatagttatcacagttgggaaatttgtgttcatatagtactgttatttaatatgaacactttattcaaattttgctaattgtctcactaatgtctttaatagcaaaatttaattttttgtgcatactgtatgtgcatagtcgaatccaaagattaggttgtattcattctactttgatgtggaaatcctccgattttcattgttttccacattcttgacattttggaagagtaggagcattttatcttacagaaatatccctcagttggggtttgcctgatgttttccttgcagt

SEQ ID NO: 291642 - DNA, 852 bp, Homo sapiens
caggtgcttcctctgtaaagtaagtatcgaaaccttcttccttctctgccagggttgtcgtgtggattaaataagaattgtaaagacgtatcattgactacaaaaaaacaaaacggaaatgctcaatgtgcgttatccagaacgcattacaatattgagaggaaatcacgaaagccgacaaattacccaagtatatggcttttatgatgaatgtctgcgaaagtatgggaatgccaacgtttggaaatattttacagatctctttgattatcttccacttacagctttagtagatggacaggtatgtatatgtgtgcttacatcttgggaggaggtaaatggaagcagagattgactattggtaagctggggtctagattcatatgacctgtgtttctgcatctcctcggccttttcctcctccttcccttatacttaaaatttcaaagcagggaagtggataagtttcacatacatttggaccagcaaattttcctgttgttctcagatatgtatgtaaatcttttaaccaaagaatatgctgtgctttttaagatatcgataaacattataaataaatgtttaagacactgatgtatagtactagcaaagcaagatgttatttaaaactatctctgcatatacatgcagtgtctgctggttaccatgaataacttttcatttctattttcatggtaactgcaaatgttatattgtgtattacaccttccctgagaagtgaatgcttggctgggcacagtggctagtactttgggaggccaaggcaagaggaccgcttgagttcaggggttcaagaccagcctgggcaatgtagtaagaccctgtctctac

SEQ ID NO: 291643 - DNA, 2002 bp, Homo sapiens
cccggcggaaatgcccgagcgatgacggaaacccggagggaggggagagaaagagcgagagaaggggaaagacaagtcgggagaggccggtaggcgtgaggcgggcctgaagcggcagcgggcggccttcgtccggcgagagctaggccgaggacccgcgccgcgctccccggcacctcaccgcgtccttcaccgactcccgcggcgcgcggccgggcggggaagggcgggcgggggtctcctccaggctgcgcgctcggagccgcctgctgggcttgggcggggcgcggggcccgcggccgccctacccggctcagtcctccccctgtgggacctggcgacggcggcggagggagaggggagcggcgcccgggccggggccgggggcgggtggggaggggggagggcggcggccgggctggggctcgggatccgcatcgggatcgggccgccatggacgacaaggcgttcaccaaggagctggaccagtgggtcgagcagctgaacgagtgtaagcagctgaacgagaaccaagtgcggacgctgtgcgagaaggcaaaggaaattttaacaaaagaatcaaatgtgcaagaggttcgttgccctgttactgtctgtggagatgtgcatggtcaatttcatgatcttatggaactctttagaattggtggaaaatcaccggatacaaactacttattcatgggtgactatgtagacagaggatattattcagtggagactgtgactcttcttgtagcattaaaggtgcgttatccagaacgcattacaatattgagaggaaatcacgaaagccgacaaattacccaagtatatggcttttatgatgaatgtctgcgaaagtatgggaatgccaacgtttggaaatattttacagatctctttgattatcttccacttacagctttagtagatggacagatattctgcctccatggtggcctctctccatccatagacacactggatcatataagagccctggatcgtttacaggaagttccacatgagggcccaatgtgtgatctgttatggtcagatccagatgatcgtggtggatggggtatttcaccacgtggtgctggctacacatttggacaagacatttctgaaacctttaaccatgccaatggtctcacactggtttctcgtgcccaccagcttgtaatggagggatacaattggtgtcatgatcggaatgtggttaccattttcagtgcacccaattactgttatcgttgtgggaaccaggctgctatcatggaattagatgacactttaaaatattccttccttcaatttgacccagcgcctcgtcgtggtgagcctcatgttacacggcgcaccccagactacttcctataaatttctcctgggaaacctgcctttgtatgtggaagtatacctggctttttaaaatatatgtatttaaaaacaaaaagcaacagtaatctatgtgtttctgtaacaaattgggatctgtcttggcattaaaccacatcatggaccaaatgtgccatactaatgatgagcatttagcacaatttgagactgaaatttagtacactatgttctaggtcagtctaacagtttgcctgctgtatttatagtaaccattttcctttggactgttcaagcaaaaaaggtaactaactgcttcatctccttttgcgcttatttggaaattttagttatagtgtttaactggcatggattaatagagttggagttttatttttaagaaaaattcacaagctaacttccactaatccattatcctttattttattgaaatgtataattaacttaactgaagaaaaggttcttcttgggagtatgttgtcataacatttaaagagatttcccttcatttaaactaaattactgttttatgttgatctgcatatttctgtatatttgtcatgacagtgcttgcatcctatttggtgtactcagcaaataaacttttcattttaaacaaaaa

SEQ ID NO: 291644 - DNA, 1967 bp, Homo sapiens
cccggcggaaatgcccgagcgatgacggaaacccggagggaggggagagaaagagcgagagaaggggaaagacaagtcgggagaggccggtaggcgtgaggcgggcctgaagcggcagcgggcggccttcgtccggcgagagctaggccgaggacccgcgccgcgctccccggcacctcaccgcgtccttcaccgactcccgcggcgcgcggccgggcggggaagggcgggcgggggtctcctccaggctgcgcgctcggagccgcctgctgggcttgggcggggcgcggggcccgcggccgccctacccggctcagtcctccccctgtgggacccgggccggggccgggggcgggtggggaggggggagggcggcggccgggctggggctcgggatccgcatcgggatcgggccgccatggacgacaaggcgttcaccaaggagctggaccagtgggtcgagcagctgaacgagtgtaagcagctgaacgagaaccaagtgcggacgctgtgcgagaaggcaaaggaaattttaacaaaagaatcaaatgtgcaagaggttcgttgccctgttactgtctgtggagatgtgcatggtcaatttcatgatcttatggaactctttagaattggtggaaaatcaccggatacaaactacttattcatgggtgactatgtagacagaggatattattcagtggagactgtgactcttcttgtagcattaaaggtgcgttatccagaacgcattacaatattgagaggaaatcacgaaagccgacaaattacccaagtatatggcttttatgatgaatgtctgcgaaagtatgggaatgccaacgtttggaaatattttacagatctctttgattatcttccacttacagctttagtagatggacagatattctgcctccatggtggcctctctccatccatagacacactggatcatataagagccctggatcgtttacaggaagttccacatgagggcccaatgtgtgatctgttatggtcagatccagatgatcgtggtggatggggtatttcaccacgtggtgctggctacacatttggacaagacatttctgaaacctttaaccatgccaatggtctcacactggtttctcgtgcccaccagcttgtaatggagggatacaattggtgtcatgatcggaatgtggttaccattttcagtgcacccaattactgttatcgttgtgggaaccaggctgctatcatggaattagatgacactttaaaatattccttccttcaatttgacccagcgcctcgtcgtggtgagcctcatgttacacggcgcaccccagactacttcctataaatttctcctgggaaacctgcctttgtatgtggaagtatacctggctttttaaaatatatgtatttaaaaacaaaaagcaacagtaatctatgtgtttctgtaacaaattgggatctgtcttggcattaaaccacatcatggaccaaatgtgccatactaatgatgagcatttagcacaatttgagactgaaatttagtacactatgttctaggtcagtctaacagtttgcctgctgtatttatagtaaccattttcctttggactgttcaagcaaaaaaggtaactaactgcttcatctccttttgcgcttatttggaaattttagttatagtgtttaactggcatggattaatagagttggagttttatttttaagaaaaattcacaagctaacttccactaatccattatcctttattttattgaaatgtataattaacttaactgaagaaaaggttcttcttgggagtatgttgtcataacatttaaagagatttcccttcatttaaactaaattactgttttatgttgatctgcatatttctgtatatttgtcatgacagtgcttgcatcctatttggtgtactcagcaaataaacttttcattttaaacaaaaa

SEQ ID NO: 291645 - DNA, 1956 bp, Homo sapiens
cccggcggaaatgcccgagcgatgacggaaacccggagggaggggagagaaagagcgagagaaggggaaagacaagtcgggagaggccggtaggcgtgaggcgggcctgaagcggcagcgggcggccttcgtccggcgagagctaggccgaggacccgcgccgcgctccccggcacctcaccgcgtccttcaccgactcccgcggcgcgcggccgggcggggaagggcgggcgggggtctcctccaggctgcgcgctcggagccgcctgctgggcttgggcggggcgcggggcccgcggccgccctacccggctcagtcctccccctgtgggacctggcgacggcggcggagggagaggggagcggcgcccgggccggggccgggggcgggtggggaggggggagggcggcggccgggctggggctcgggatccgcatcgggatcgggccgccatggacgacaaggcgttcaccaaggagctggaccagtgggtcgagcagctgaacgagtgtaagcagctgaacgagaaccaagtgcggacgctgtgcgagaaggcaaaggaaattttaacaaaagaatcaaatgtgcaagaggttcgttgccctgttactgtctgtggagatgtgcatggtcaatttcatgatcttatggaactctttagaattggtggaaaatcacttattcagtggagactgtgactcttcttgtagcattaaaggtgcgttatccagaacgcattacaatattgagaggaaatcacgaaagccgacaaattacccaagtatatggcttttatgatgaatgtctgcgaaagtatgggaatgccaacgtttggaaatattttacagatctctttgattatcttccacttacagctttagtagatggacagatattctgcctccatggtggcctctctccatccatagacacactggatcatataagagccctggatcgtttacaggaagttccacatgagggcccaatgtgtgatctgttatggtcagatccagatgatcgtggtggatggggtatttcaccacgtggtgctggctacacatttggacaagacatttctgaaacctttaaccatgccaatggtctcacactggtttctcgtgcccaccagcttgtaatggagggatacaattggtgtcatgatcggaatgtggttaccattttcagtgcacccaattactgttatcgttgtgggaaccaggctgctatcatggaattagatgacactttaaaatattccttccttcaatttgacccagcgcctcgtcgtggtgagcctcatgttacacggcgcaccccagactacttcctataaatttctcctgggaaacctgcctttgtatgtggaagtatacctggctttttaaaatatatgtatttaaaaacaaaaagcaacagtaatctatgtgtttctgtaacaaattgggatctgtcttggcattaaaccacatcatggaccaaatgtgccatactaatgatgagcatttagcacaatttgagactgaaatttagtacactatgttctaggtcagtctaacagtttgcctgctgtatttatagtaaccattttcctttggactgttcaagcaaaaaaggtaactaactgcttcatctccttttgcgcttatttggaaattttagttatagtgtttaactggcatggattaatagagttggagttttatttttaagaaaaattcacaagctaacttccactaatccattatcctttattttattgaaatgtataattaacttaactgaagaaaaggttcttcttgggagtatgttgtcataacatttaaagagatttcccttcatttaaactaaattactgttttatgttgatctgcatatttctgtatatttgtcatgacagtgcttgcatcctatttggtgtactcagcaaataaacttttcattttaaacaaaaa

SEQ ID NO: 291646 - DNA, 1948 bp, Homo sapiens
cccggcggaaatgcccgagcgatgacggaaacccggagggaggggagagaaagagcgagagaaggggaaagacaagtcgggagaggccggtaggcgtgaggcgggcctgaagcggcagcgggcggccttcgtccggcgagagctaggccgaggacccgcgccgcgctccccggcacctcaccgcgtccttcaccgactcccgcggcgcgcggccgggcggggaagggcgggcgggggtctcctccaggctgcgcgctcggagccgcctgctgggcttgggcggggcgcggggcccgcggccgccctacccggctcagtcctccccctgtgggacctggcgacggcggcggagggagaggggagcggcgcccgggccggggccgggggcgggtggggaggggggagggcggcggccgggctggggctcgggatccgcatcgggatcgggccgccatggacgacaaggcgttcaccaaggagctggaccagtgggtcgagcagctgaacgagtgtaagcagctgaacgagaaccaagtgcggacgctgtgcgagaaggcaaaggaaattttaacaaaagaatcaaatgtgcaagaggttcgttgccctgttactgtctgtggagatgtgcatggtcaatttcatgatcttatggaactctttagaattggtggaaaatcaccggatacaaactacttattcatgggtgactatgtagacagaggatattattcagtggagactgtgactcttcttgtagcattaaaggtgcgttatccagaacgcattacaatattgagaggaaatcacgaaagccgacaaattacccaagtatatggcttttatgatgaatgtctgcgaaagtatgggaatgccaacgtttggaaatattttacagatctctttgattatcttccacttacagctttagtagatggacagatattctgcctccatggtggcctctctccatccatagacacactggatcatataagagccctggatcgtttacaggaagttccacatgagggcccaatgtgtgatctgttatggtcagatccagatgatcgtggtggatggggtatttcaccacgtggtgctggctacacatttggacaagacatttctgaaacctttaaccatgccaatggtctcacactggtttctcgtgcccaccagcttgtaatggagggatacaattggtgtcatgatcggaatgtggttaccattttcagtgcacccaattactgttatcgttgtgggaaccaggctgctatcatggaattagatgacactttaaaatattccttccttcaatttgacccagcgcctcgtcgtggtgagcctcatgttacacggcgcaccccagactacttcctataaatttctcctgggaaacctgcctttgtatgtggaagtatacctggctttttaaaatatatgtatttaaaaacataaaccacatcatggaccaaatgtgccatactaatgatgagcatttagcacaatttgagactgaaatttagtacactatgttctaggtcagtctaacagtttgcctgctgtatttatagtaaccattttcctttggactgttcaagcaaaaaaggtaactaactgcttcatctccttttgcgcttatttggaaattttagttatagtgtttaactggcatggattaatagagttggagttttatttttaagaaaaattcacaagctaacttccactaatccattatcctttattttattgaaatgtataattaacttaactgaagaaaaggttcttcttgggagtatgttgtcataacatttaaagagatttcccttcatttaaactaaattactgttttatgttgatctgcatatttctgtatatttgtcatgacagtgcttgcatcctatttggtgtactcagcaaataaacttttcattttaaacaaaaa

SEQ ID NO: 291647 - DNA, 1059 bp, Homo sapiens
agatttcaagcatagatacggcaaaacaacaattagcgagctgcatttaacagactcctaggcccacgaattgcacagtattctttacaggtacacaaactattaaagatggagaccttatatagtaatatagacgactacatttccacagagagtacctgtagtttttgagtttagttttttttaaatgtgtctgtgtcaaaatcataatattataatgaaataatgaatttgtttttatcctgcagggatacaattggtgtcatgatcggaatgtggttaccattttcagtgcacccaattactgttatcgttgtgggaaccaggctgctatcatggaattagatgacactttaaaatattccttccttcaatttgacccagcgcctcgtcgtggtgagcctcatgttacacggcgcaccccagactacttcctataaatttctcctgggaaacctgcctttgtatgtggaagtatacctggctttttaaaatatatgtatttaaaaacaaaaagcaacagtaatctatgtgtttctgtaacaaattgggatctgtcttggcattaaaccacatcatggaccaaatgtgccatactaatgatgagcatttagcacaatttgagactgaaatttagtacactatgttctaggtcagtctaacagtttgcctgctgtatttatagtaaccattttcctttggactgttcaagcaaaaaaggtaactaactgcttcatctccttttgcgcttatttggaaattttagttatagtgtttaactggcatggattaatagagttggagttttatttttaagaaaaattcacaagctaacttccactaatccattatcctttattttattgaaatgtataattaacttaactgaagaaaaggttcttcttgggagtatgttgtcataacatttaaagagatttcccttcatttaaactaaattactgttttatgttgatctgcatatttctgtatatttgtcatgacagtgcttgcatcctatttggtgtactcagcaaataaacttttcattttaaacaaaaa

SEQ ID NO: 291648 - DNA, 1674 bp, Homo sapiens
cccggcggaaatgcccgagcgatgacggaaacccggagggaggggagagaaagagcgagagaaggggaaagacaagtcgggagaggccggtaggcgtgaggcgggcctgaagcggcagcgggcggccttcgtccggcgagagctaggccgaggacccgcgccgcgctccccggcacctcaccgcgtccttcaccgactcccgcggcgcgcggccgggcggggaagggcgggcgggggtctcctccaggctgcgcgctcggagccgcctgctgggcttgggcggggcgcggggcccgcggccgccctacccggctcagtcctccccctgtgggacctggcgacggcggcggagggagaggggagcggcgcccgggccggggccgggggcgggtggggaggggggagggcggcggccgggctggggctcgggatccgcatcgggatcgggccgccatggacgacaaggcgttcaccaaggagctggaccagtgggtcgagcagctgaacgagtgtaagcagctgaacgagaaccaagtgcggacgctgtgcgagaaggcaaaggaaattttaacaaaagaatcaaatgtgcaagaggttcgttgccctgttactgtctgtggagatgtgcatggtcaatttcatgatcttatggaactctttagaattggtggaaaatcaccggatacaaactacttattcatgggtgactatgtagacagaggatattattcagtggagactgtgactcttcttgtagcattaaaggtgcgttatccagaacgcattacaatattgagaggaaatcacgaaagccgacaaattacccaagtatatggcttttatgatgaatgtctgcgaaagtatgggaatgccaacgtttggaaatattttacagatctctttgattatcttccacttacagctttagtagatggacagatattctgcctccatggtggcctctctccatccatagacacactggatcatataagagccctggatcgtttacaggaagttccacatgagggcccaatgtgtgatctgttatggtcagatccagatgatcgtggtggatggggtatttcaccacgtggtgctggctacacatttggacaagacatttctgaaacctttaaccatgccaatggtctcacactggtttctcgtgcccaccagcttgtaatggagggatacaattggtgtcatgatcggaatgtggttaccattttcagtgcacccaattactgttatcgttgtgggaaccaggctgctatcatggaattagatgacactttaaaatattccttccttcaatttgacccagcgcctcgtcgtggtgagcctcatgttacacggcgcaccccagactacttcctataaatttctcctgggaaacctgcctttgctggagtgcaatggtgtgatctcggctcactgcaacctccacctcccaagttcaaccgattctcctgcctcagcctcccaaatagctgggattacagacgatgatgatgatgattgagacatgatctcactctgtcacccaggctggagcacagaggtgagatcatggctcactgcaacctcaacctgtggggctccagtgatcctcccacctcagtctccagagtagctgagactacaggtgcaggcaatcacgcctggctaatt

SEQ ID NO: 291649 - DNA, 1913 bp, Homo sapiens
cccggcggaaatgcccgagcgatgacggaaacccggagggaggggagagaaagagcgagagaaggggaaagacaagtcgggagaggccggtaggcgtgaggcgggcctgaagcggcagcgggcggccttcgtccggcgagagctaggccgaggacccgcgccgcgctccccggcacctcaccgcgtccttcaccgactcccgcggcgcgcggccgggcggggaagggcgggcgggggtctcctccaggctgcgcgctcggagccgcctgctgggcttgggcggggcgcggggcccgcggccgccctacccggctcagtcctccccctgtgggacctggcgacggcggcggagggagaggggagcggcgcccgggccggggccgggggcgggtggggaggggggagggcggcggccgggctggggctcgggatccgcatcgggatcgggccgccatggacgacaaggcgttcaccaaggagctggaccagtgggtcgagcagctgaacgagtgtaagcagctgaacgagaaccaagtgcggacgctgtgcgagaaggcaaaggaaattttaacaaaagaatcaaatgtgcaagaggttcgttgccctgttactgtctgtggagatgtgcatggtcaatttcatgatcttatggaactctttagaattggtggaaaatcaccggatacaaactacttattcatgggtgactatgtagacagaggatattattcagtggagactgtgactcttcttgtagcattaaaggtgcgttatccagaacgcattacaatattgagaggaaatcacgaaagccgacaaattacccaagtatatggcttttatgatgaatgtctgcgaaagtatgggaatgccaacgtttggaaatattttacagatctctttgattatcttccacttacagctttagtagatggacagatattctgcctccatggtggcctctctccatccatagacacactggatcatataagagccctggatcgtttacaggaagttccacatgagggcccaatgtgtgatctgttatggtcagatccagatgatcgtggtggatggggtatttcaccacgtggtgctggctacacatttggacaagacatttctgaaacctttaaccatgccaatggtctcacactggtttctcgtgcccaccagcttgtaatggaggtatgtactttcctgacagaatgatctttatttcagattagtatatacttctgtaataaggcattatgacttaactaagaaacattcctcaccatttattacctaggtgaaaagaggaaaaacttgctggttttagcaagtagggaaagcactagtagaccagagcagaattataactcatttttgaaattgagacttagaaaaaagttacaaaaatagtaccccataattccctgtatgcttcattcagattcctgactgtaaatattttactatatttgctttatcattttgtgtctctcttcctcttcacccctcacactttcttctgaaccatttgaatatctgttgcagacagatactcctttactaccaactttctatgtgtattttgtaaaattaaggacacactgtcacataaccaccgtatagttatcacagttgggaaatttgtgttcatatagtactgttatttaatatgaacactttattcaaattttgctaattgtctcactaatgtctttaatagcaaaatttaattttttgtgcatactgtatgtgcatagtcgaatccaaagattaggttgtattcattctactttgatgtggaaatcctccgattttcattgttttccacattcttgacattttggaagagtaggagcattttatcttacagaaatatccctcagttggggtttgcctgatgttttccttgcagt

SEQ ID NO: 291650 - DNA, 491 bp, Homo sapiens
ggcaccaaaccagacattctgtcttcttaaattttcaccatagccctatgaagcagttagttggaatgggagcatctgcagtgatttgcccatggccattccagccgtaagtgatgtagtcatggtgggaaagcaggactgctgtttctactacagtgtcttgttctttattcatttgttttctttgcaaagtcagatcctttatttgcttccttttttgccatttacagccttcaatttgacccagcgcctcgtcgtggtgagcctcatgttacacggcgcaccccagactacttcctataaatttctcctgggaaacctgcctttgtatgtggaagtatacctggctttttaaaatatatgtatttaaaaacaaaaagcaacagtaatctatgtgtttctgtaacaaattgggatctgtcttggcattaaaccacatcatggaccaaatgtgccatactaatgatgagcatttagcacaatttgagact

SEQ ID NO: 291651 - DNA, 1455 bp, Homo sapiens
cccggcggaaatgcccgagcgatgacggaaacccggagggaggggagagaaagagcgagagaaggggaaagacaagtcgggagaggccggtaggcgtgaggcgggcctgaagcggcagcgggcggccttcgtccggcgagagctaggccgaggacccgcgccgcgctccccggcacctcaccgcgtccttcaccgactcccgcggcgcgcggccgggcggggaagggcgggcgggggtctcctccaggctgcgcgctcggagccgcctgctgggcttgggcggggcgcggggcccgcggccgccctacccggctcagtcctccccctgtgggacccgggccggggccgggggcgggtggggaggggggagggcggcggccgggctggggctcgggatccgcatcgggatcgggccgccatggacgacaaggcgttcaccaaggagctggaccagtgggtcgagcagctgaacgagtgtaagcagctgaacgagaaccaagtgcggacgctgtgcgagaaggcaaaggaaattttaacaaaagaatcaaatgtgcaagaggttcgttgccctgttactgtctgtggagatgtgcatggtcaatttcatgatcttatggaactctttagaattggtggaaaatcaccggatacaaactacttattcatgggtgactatgtagacagaggatattattcagtggagactgtgactcttcttgtagcattaaaggtgcgttatccagaacgcattacaatattgagaggaaatcacgaaagccgacaaattacccaagtatatggcttttatgatgaatgtctgcgaaagtatgggaatgccaacgtttggaaatattttacagatctctttgattatcttccacttacagctttagtagatggacaggtatgtatatgtgtgcttacatcttgggaggaggtaaatggaagcagagattgactattggtaagctggggtctagattcatatgacctgtgtttctgcatctcctcggccttttcctcctccttcccttatacttaaaatttcaaagcagggaagtggataagtttcacatacatttggaccagcaaattttcctgttgttctcagatatgtatgtaaatcttttaaccaaagaatatgctgtgctttttaagatatcgataaacattataaataaatgtttaagacactgatgtatagtactagcaaagcaagatgttatttaaaactatctctgcatatacatgcagtgtctgctggttaccatgaataacttttcatttctattttcatggtaactgcaaatgttatattgtgtattacaccttccctgagaagtgaatgcttggctgggcacagtggctagtactttgggaggccaaggcaagaggaccgcttgagttcaggggttcaagaccagcctgggcaatgtagtaagaccctgtctctac

SEQ ID NO: 291652 - DNA, 1935 bp, Homo sapiens
cccggcggaaatgcccgagcgatgacggaaacccggagggaggggagagaaagagcgagagaaggggaaagacaagtcgggagaggccggtaggcgtgaggcgggcctgaagcggcagcgggcggccttcgtccggcgagagctaggccgaggacccgcgccgcgctccccggcacctcaccgcgtccttcaccgactcccgcggcgcgcggccgggcggggaagggcgggcgggggtctcctccaggctgcgcgctcggagccgcctgctgggcttgggcggggcgcggggcccgcggccgccctacccggctcagtcctccccctgtgggacctggcgacggcggcggagggagaggggagcggcgcccgggccggggccgggggcgggtggggaggggggagggcggcggccgggctggggctcgggatccgcatcgggatcgggccgccatggacgacaaggcgttcaccaaggagctggaccagtgggtcgagcagctgaacgagtgtaagcagctgaacgagaaccaagtgcggacgctgtgcgagaagatgtgcatggtcaatttcatgatcttatggaactctttagaattggtggaaaatcaccggatacaaactacttattcatgggtgactatgtagacagaggatattattcagtggagactgtgactcttcttgtagcattaaaggtgcgttatccagaacgcattacaatattgagaggaaatcacgaaagccgacaaattacccaagtatatggcttttatgatgaatgtctgcgaaagtatgggaatgccaacgtttggaaatattttacagatctctttgattatcttccacttacagctttagtagatggacagatattctgcctccatggtggcctctctccatccatagacacactggatcatataagagccctggatcgtttacaggaagttccacatgagggcccaatgtgtgatctgttatggtcagatccagatgatcgtggtggatggggtatttcaccacgtggtgctggctacacatttggacaagacatttctgaaacctttaaccatgccaatggtctcacactggtttctcgtgcccaccagcttgtaatggagggatacaattggtgtcatgatcggaatgtggttaccattttcagtgcacccaattactgttatcgttgtgggaaccaggctgctatcatggaattagatgacactttaaaatattccttccttcaatttgacccagcgcctcgtcgtggtgagcctcatgttacacggcgcaccccagactacttcctataaatttctcctgggaaacctgcctttgtatgtggaagtatacctggctttttaaaatatatgtatttaaaaacaaaaagcaacagtaatctatgtgtttctgtaacaaattgggatctgtcttggcattaaaccacatcatggaccaaatgtgccatactaatgatgagcatttagcacaatttgagactgaaatttagtacactatgttctaggtcagtctaacagtttgcctgctgtatttatagtaaccattttcctttggactgttcaagcaaaaaaggtaactaactgcttcatctccttttgcgcttatttggaaattttagttatagtgtttaactggcatggattaatagagttggagttttatttttaagaaaaattcacaagctaacttccactaatccattatcctttattttattgaaatgtataattaacttaactgaagaaaaggttcttcttgggagtatgttgtcataacatttaaagagatttcccttcatttaaactaaattactgttttatgttgatctgcatatttctgtatatttgtcatgacagtgcttgcatcctatttggtgtactcagcaaataaacttttcattttaaacaaaaa

SEQ ID NO: 291653 - DNA, 1961 bp, Homo sapiens
cccggcggaaatgcccgagcgatgacggaaacccggagggaggggagagaaagagcgagagaaggggaaagacaagtcgggagaggccggtaggcgtgaggcgggcctgaagcggcagcgggcggccttcgtccggcgagagctaggccgaggacccgcgccgcgctccccggcacctcaccgcgtccttcaccgactcccgcggcgcgcggccgggcggggaagggcgggcgggggtctcctccaggctgcgcgctcggagccgcctgctgggcttgggcggggcgcggggcccgcggccgccctacccggctcagtcctccccctgtgggacctggcgacggcggcggagggagaggggagcggcgcccgggccggggccgggggcgggtggggaggggggagggcggcggccgggctggggctcgggatccgcatcgggatcgggccgccatggacgacaaggcgttcaccaaggagctggaccagtgggtcgagcagctgaacgagtgtaagcagctgaacgagaaccaagtgcggacgctgtgcgagaaggcaaaggaaattttaacaaaagaatcaaatgtgcaagaggttcgttgccctgttactgtctgtggagatgtgcatggtcaatttcatgatcttatggaactctttagaattggtggaaaatcaccggatacaaactacttattcatgggtgactatgtagacagaggatattattcagtggagactgtgactcttcttgtagcattaaaggtgcgttatccagaacgcattacaatattgagaggaaatcacgaaagccgacaaattacccaagtatatggcttttatgatgaatgtctgcgaaagtatgggaatgccaacgtttggaaatattttacagatctctttgattatcttccacttacagctttagtagatggacagatattctgcctccatggtggcctctctccatccatagacacactggatcatataagagccctggatcgtttacaggaagttccacatgagggcccaatgtgtgatctgttatggtcagatccagatgatcgtggtggatggggtatttcaccacgtggtgctggctacacatttggacaagacatttctgaaacctttaaccatgccaatggtctcacactggtttctcgtgcccaccagcttgtaatggagggatacaattggtgtcatgatcggaatgtggttaccattttcagtgcacccaattactgttatcgttgtgggaaccaggctgctatcatggaattagatgacactttaaaatattccttttacacggcgcaccccagactacttcctataaatttctcctgggaaacctgcctttgtatgtggaagtatacctggctttttaaaatatatgtatttaaaaacaaaaagcaacagtaatctatgtgtttctgtaacaaattgggatctgtcttggcattaaaccacatcatggaccaaatgtgccatactaatgatgagcatttagcacaatttgagactgaaatttagtacactatgttctaggtcagtctaacagtttgcctgctgtatttatagtaaccattttcctttggactgttcaagcaaaaaaggtaactaactgcttcatctccttttgcgcttatttggaaattttagttatagtgtttaactggcatggattaatagagttggagttttatttttaagaaaaattcacaagctaacttccactaatccattatcctttattttattgaaatgtataattaacttaactgaagaaaaggttcttcttgggagtatgttgtcataacatttaaagagatttcccttcatttaaactaaattactgttttatgttgatctgcatatttctgtatatttgtcatgacagtgcttgcatcctatttggtgtactcagcaaataaacttttcattttaaacaaaaa

SEQ ID NO: 291654 - DNA, 1998 bp, Homo sapiens
cccggcggaaatgcccgagcgatgacggaaacccggagggaggggagagaaagagcgagagaaggggaaagacaagtcgggagaggccggtaggcgtgaggcgggcctgaagcggcagcgggcggccttcgtccggcgagagctaggccgaggacccgcgccgcgctccccggcacctcaccgcgtccttcaccgactcccgcggcgcgcggccgggcggggaagggcgggcgggggtctcctccaggctgcgcgctcggagccgcctgctgggcttgggcggggcgcggggcccgcggccgccctacccggctcagtcctccccctgtgggacctggcgacggcggcggagggagaggggagcggcgcccgggccggggccgggggcgggtggggaggggggagggcggcggccgggctggggctcgggatccgcatcgggatcgggccgccatggacgacaaggcgttcaccaaggagctggaccagtgggtcgagcagctgaacgagtgtaagcagctgaacgagaaccaagtgcggacgctgtgcgagaaggcaaaggaaattttaacaaaagaatcaaatgtgcaagaggttcgttgccctgttactgtctgtggagatgtgcatggtcaatttcatgatcttatggaactctttagaattggtggaaaatcaccggatacaaactacttattcatgggtgactatgtagacagaggatattattcagtggagactgtgactcttcttgtagcattaaaggtgcgttatccagaacgcattacaatattgagaggaaatcacgaaagccgacaaattacccaagtatatggcttttatgatgaatgtctgcgaaagtatgggaatgccaacgtttggaaatattttacagatctctttgattatcttccacttacagctttagtagatggacagatattctgcctccatggtggcctctctccatccatagacacactggatcatataagagccctggatcgtttacaggaagttccacatgagggcccaatgtgtgatctgttatggtcagatccagatgatcgtggtggatggggtatttcaccacgtggtgctggctacacatttggacaagacatttctgaaacctttaaccatgccaatggtctcacactggtttctcgtgcccaccagcttgtaatggagggatacaattggtgtcatgatcggaatgtggttaccattttcagtgcacccaattactgttatcgttgtgggaaccaggctgctatcatggaattagatgacactttaaaatattccttccttcaatttgacccagcgcctcgtcgtggtgagcctcatgttacacggcgcaccccagactacttcctataaatttctcctgggaaacctgcctttgtatgtggaagtatacctggctttttaaaatatatgtatttaaaaacaaaaagcaacagtaatctatgtgtttctgtaacaaattgggatctgtcttggcattaaaccacatcatggaccaaatgtgccatactaatgatgagcatttagcacaatttgagactgaaatttagtacactatgttctaggtcagtctaacagtttgcctgctgtatttatagtaaccattttcctttggactgttcaagcaaaaaaggtaactaactgcttcatctccttttgcgcttatttggaaattttagttatagtgtttaactggcatggattaatagagttggagttttatttttaagaaaaattcacaagcttagcgtccagggagagtccagtatccatggacgaatttaatgtgaagagtgtagtgacttagaggttaacctcgaaggacaacagggctgtctgtcattagggagtagtgcttgtgcataagcaatttacagagatgatgttcccggtgccagtataaagctgacaatctatctgttgttatcggttcgatcaatgcatatttaaatcgtagtcaggcgttca

SEQ ID NO: 291655 - DNA, 1490 bp, Homo sapiens
cccggcggaaatgcccgagcgatgacggaaacccggagggaggggagagaaagagcgagagaaggggaaagacaagtcgggagaggccggtaggcgtgaggcgggcctgaagcggcagcgggcggccttcgtccggcgagagctaggccgaggacccgcgccgcgctccccggcacctcaccgcgtccttcaccgactcccgcggcgcgcggccgggcggggaagggcgggcgggggtctcctccaggctgcgcgctcggagccgcctgctgggcttgggcggggcgcggggcccgcggccgccctacccggctcagtcctccccctgtgggacctggcgacggcggcggagggagaggggagcggcgcccgggccggggccgggggcgggtggggaggggggagggcggcggccgggctggggctcgggatccgcatcgggatcgggccgccatggacgacaaggcgttcaccaaggagctggaccagtgggtcgagcagctgaacgagtgtaagcagctgaacgagaaccaagtgcggacgctgtgcgagaaggcaaaggaaattttaacaaaagaatcaaatgtgcaagaggttcgttgccctgttactgtctgtggagatgtgcatggtcaatttcatgatcttatggaactctttagaattggtggaaaatcaccggatacaaactacttattcatgggtgactatgtagacagaggatattattcagtggagactgtgactcttcttgtagcattaaaggtgcgttatccagaacgcattacaatattgagaggaaatcacgaaagccgacaaattacccaagtatatggcttttatgatgaatgtctgcgaaagtatgggaatgccaacgtttggaaatattttacagatctctttgattatcttccacttacagctttagtagatggacaggtatgtatatgtgtgcttacatcttgggaggaggtaaatggaagcagagattgactattggtaagctggggtctagattcatatgacctgtgtttctgcatctcctcggccttttcctcctccttcccttatacttaaaatttcaaagcagggaagtggataagtttcacatacatttggaccagcaaattttcctgttgttctcagatatgtatgtaaatcttttaaccaaagaatatgctgtgctttttaagatatcgataaacattataaataaatgtttaagacactgatgtatagtactagcaaagcaagatgttatttaaaactatctctgcatatacatgcagtgtctgctggttaccatgaataacttttcatttctattttcatggtaactgcaaatgttatattgtgtattacaccttccctgagaagtgaatgcttggctgggcacagtggctagtactttgggaggccaaggcaagaggaccgcttgagttcaggggttcaagaccagcctgggcaatgtagtaagaccctgtctctac

SEQ ID NO: 291656 - DNA, 1434 bp, Homo sapiens
gggccccaggaggcgagtctgagtggaacctggctggggtaggctgaaaggtgacttcgacgctcttctgaggcctcagacgtgtgtgatgactgccctgtagaatcagtgctgtgaccccgagtaacaacgcgcgcttgagttggtataaactcctgaagagtgtagtcctgcaatttacaagaaaaagttaagtgtaaaatagcctcaggcatgtccttcaggagggattccagaggcattgttatagacgatgacagctctgtgtgtgttattgccactgaagaccttccatgggacgcgatgtggagctggaagtcagtgatattgatgatcctgacacagtcctaggataaggatctttaactttattagcagctactgagctacagaatacaaaccaactgaaaacattaaagaaaggcttcctgaaacagctcttcaaacctctgggaaagatcatcaaagtcaatgtcttcagatgctgaggtgctggcaccagcaaatgcagttggtagtgtgtctggcacagatggcaactctggtaggacaaagttgtcatagttatccgcaggtcaggaaggaagctttgcagaggcttctggcttgggtccaggaccaacaatctgtgcagaagagatattcttatcagcattaatgtcatctacagattcatatgatgggggagttgctggtatctgagatggataaatattgggaaaggcctgccacttctgactggagtcgaggagcagcccaggtcaatgtagacacagattcagccagaccagaatctagttccttcatagactggataaggccaaaccgagccagcagcagatcacagtacagctccaggatctccatggcctccacgaagtagtcttcccggataatgtgctccacacggatccgagctcgttcatctttcccagcagccagatagtcagcaatctccttccttgctttctgggccagttctgtttttttttttttcctccaatagttcaaggcgatttatgactaatctcaaattcactcttaagtgctcagctttaaatccagagcccagcatgctgtgctgttcctcctaaccgaatcctgccatgaacacagcagacaccgacttcagaatcagggttcaccatccaccactatcccccaggcgatgatgtcttatcatccaggtctctctcttcagaaagaatcccaacaggtgcgtttagccagaatcctacttatcccagacatttcctcttagtattttgtcatccagtgatccctaacctgctccttgactataaattcctactcgttcatgctgaatttggagttgaacccaatctcttgtacccattgcaaaatctcactgctgtgcttccaatacctatcacgatgatcctgaataaagtcttcctttgcatgctttaacga

SEQ ID NO: 291657 - DNA, 1030 bp, Homo sapiens
gggccccaggaggcgagtctgagtggaacctggctggggtaggctgaaaggtgacttcgacgctcttctgaggcctcagacgtgtgtgatgactgccctgtagaatcagtgctgtgaccccgagtaacaacgcgcgcttgagttggtataaactcctgaagagtgtagtcctgcaatttacaagaaaaagttaagtgtaaaatagcctcaggcatgtccttcaggagggattccagaggcattgttatagacgatgacagctctgtgtgtgttattgccactgaagaccttccatgggacgcgatgtggagctggaagtcagtgatattgatgatcctgacacagtcctaggataaggatctttaactttattagcagctactgagctacagaatacaaaccaactgaaaacattaaagaaaggcttcctgaaacagctcttcaaacctctgggaaagatcatcaaagtcaatgtcttcagatgctgaggtgctggcaccagcaaatgcagttggtagtgtgtctggcacagatggcaactctggtaggacaaagttgtcatagttatccgcaggtcaggaaggaagctttgcagaggcttctggcttgggtccaggaccaacaatctgtgcagaagagatattcttatcagcattaatgtcatctacagattcatatgatgggggagttgctggtatctgagatggataaatattgggaaaggcctggtaagtccccattggcagtccattgaaatctgatggtccctttggcagtggatatgagaaaggagtatttgcagatggcatgggcataggcatgggcattggcaccattccatcaggtccaccaactggtgctgtgaacccaccaccccctcctcttccagggcctcctttcttcacatcatctgtgaatccaacatcaataagatctgtctctaccccagaaggagcttctgccatgaccacagagtcaggttcatagggtacattgtaattcttcgcaattcaatcaggtatctctccac

SEQ ID NO: 291658 - DNA, 656 bp, Homo sapiens
ttgttacaaggagaaattgctcagtctcaactcccagaatatgaaagttgcctggtttaagagacctatattttctttttcagctcttcaaacctctgggaaagatcatcaaagtcaatgtcttcagatgctgaggtgctggcaccagcaaatgcagttggtagtgtgtctggcacagatggcaactctggtaggacaaagttgtcatagttatccgcaggtcaggaaggaagctttgcagaggcttctggcttgggtccaggaccaacaatctgtgcagaagagatattcttatcagcattaatgtcatctacagattcatatgatgggggagttgctggtatctgagatggataaatattgggaaaggcctggtaagtccccattggcagtccattgaaatctgatggtccctttggcagtggatatgagaaaggagtatttgcagatggcatgggcataggcatgggcattggcaccattccatcaggtccaccaactggtgctgtgaacccaccaccccctcctcttccagggcctcctttcttcacatcatctgtgaatccaacatcaataagatctgtctctaccccagaaggagcttctgccatgaccacagagtcaggttcatagggtacattgtaattcttcgcaat

SEQ ID NO: 291659 - DNA, 725 bp, Homo sapiens
acgctaggtcaagggcggtgttcctgtgttcttagggccccaggaggcgagtctgagtggaacctggctggggtaggctgaaaggtgacttcgacgctcttctgaggcctcagacgtgtgtgatgactgccctgtagaatcagtgctgtgaccccgagtaacaacgcgcgcttgagttggtataaactcctgaaggtaggtttataatgtacaattctgtacgcttgtgtaatactttttgtattttgcatggatgggctttgctgcattttaaagcccatagactggagaaacatctttcattggtaatgcctggtcatgagatcccaagacagtgaagataaattgtggccaaacgcccaaaatctgggtagaaggtgctgtcagaagaattgagccaggcgtggtggctcatgcctgtaatgccagcactttgggaggcggaggtgggaggattgcttgagcctgggagttcgccaccagcatgggcaacatagcaagaccctgactctgcaaaaaataaaaaggttcgaacctgtggtcccagctactcaggaggctgaggtgggaggacggcttgagcctgggaagtcgaggctgcagtgccactctaaccttggtgacagagggagaccttgtcttaaaaaaaaaaaaaggaaccaaggttgtgtttatatgtatttatgttcatgaggacattgagcaaatgggaaacatactcatca

SEQ ID NO: 291660 - DNA, 409 bp, Homo sapiens
accactgcactccagcctgggcaacagagcaaggctctgtctcaaaaacaaaaacaaatgcaccctggtgttaggctgcatccatcccattagtggacaggggtagcggggaggtttgttagattcaaacaagtgttttatgggcaagcagccccaccccagccccacacaaaccacactccctatccccattactctggctaatttttcttttcatagtacccatcaccttctaacatattatataatttatttacctaatatatttattgtctgttttccccctagaaaaatgaactcacttctgttctctactacactaaaacaatgcttagcacataaccaggacctggcacctatttgttaaatgaatgaatgaatgaatgactaaataaatgaaaaaaaaaaa

SEQ ID NO: 291661 - DNA, 399 bp, Homo sapiens
ccgcgtgcatgctgggctctcctggctcagctgctttcacacattgccgatcagcagcagcagcagtgaaggagaacttaagtggccgtgcccacctgctgctgcttgggtcctgtgcacaagctgttcccgctgcctccaatactcatcccctcgacttctatggagctgactcttcaccttccagccttggctcaaatgtcaccttcacagtaaaggctacccatggctgggtgtgtggttgtgcaggatctgccccttccaaagggccagaatggaaaaatgaactcacttctgttctctactacactaaaacaatgcttagcacataaccaggacctggcacctatttgttaaatgaatgaatgaatgaatgactaaataaatgaaaaaaaaaaa

SEQ ID NO: 291662 - DNA, 1082 bp, Homo sapiens
agtgcttggcacacggtccccaggagcttcccccgaaggttcccccgaagccagccacagctgctcagctcggcgcgcggagcccgcggtggtaccgagtccgcacaaacccggacccgctccaagtgagccgcgttgtcgtcattcattcgcagtgtccggagcgtccttccagcggggagctgggcttccctagtggcgcctgcggccccgacacggcgcgttaaggcgcggcgacttcgggagctcgagcaggtagagacgggaggggctctggagctccagtcggcgccgcgggagcagcagcgccggagcccagcttggccctgaccgcggggccgaatccgctcgggtggcccttagccctgcctggcgctgagccggatcccgggactgagctataccacttcctcctcctcccgctcccttcctcctcctcttcctcctcctcccgctcctcccgccgccgtgggccgggagccgggctgcagagtgccaggccgggcgtctgcggccgcgggctctcgcggggcggcgacgccgcggggaggatgctgcttgccgcgcccgcgtcctcaccgtcctcccgggccgcctgctggggctttgttgtggcccggacgccgcgggccaccccctgaagtcgcctgccgccgccgccgccgcacctagcggacgggcgggcgggcgcgcgtgtgcccaggagtgcgcgcctgtcgcggtggtgggtgcaggactggacccacgggcccattgtgcgcccgcccgcggcagccaggaccatgtgggtgaacccggaggaggtgttgctggccaacgcgctgtggatcaccgagagggccaacccatacttcatcctgcagcggaggaagggccacgccggcgatggaggcggcggcggcggactggcgggcctgctggtgggtacccttgatgttgtgttggactccagcgcccgggtcgctccttaccgaatcttgtaccagactccagactccctggtctactggaccatcgcctgtgggtggttccaggaaagaaatcactgaacactggggaatgggttgagcaaaatctcttgc

SEQ ID NO: 291663 - DNA, 454 bp, Homo sapiens
  misc_feature (88)..(88): n is a, c, g, or t
ggaccacctgtcagaacaaggggccgatgacagcaagcctgagacagacagggttccaggtgacggtggccaaaaggaacacctaccnagcattgatttctcaaggggaagataaaatgactaagaggaagaagctgcggacctcagctcccctgatgaggaaacaggatctccctgccggctcctccgtcaaccagaaaaggagccagctccccttcctccttcccagaactcattcgggaggtttgttccccagtttgcaaaatccaggaagctggccacctctgagcagggcccatcctgtccggatttgcaaattttagggtcctgagccaagtatggatggttcagaatttgtttctttcctggaggagaagagagctccctttgttttctttctccccatttccattttatttcttctgggaagacccataataaatgattctgtaga

SEQ ID NO: 291664 - DNA, 2594 bp, Homo sapiens
gcgcctctgcccgggggtcccgggggtcctttcctcttgtgcatcttcaaggctggatgcccggaccacctgcccccaagcccggccttgccctgcctccttccccgggctctgtcgccgcgcactcgcccttcctgagtcctgcactcctcgtcggcgccccgcggccgtcgatcccgagccctcgcttccctgcttggccgtcccacttccgcctcgggcctcgggcgccgccgcaccggagcgcggccactgggctcgccgggtctgccgagccgaaactacaactcccggcagatttctcaaggggaagataaaatgactaagaggaagaagctgcggacctcagctcccctgatgaggaaacaggatctccctgccggctcctccgtcaaccagaaaaggagccagctccccttcctccttcccagaactcattcgggaggtttgttccccagtttgcaaaatccaggaagacagtgacaagaaaagaagagatgaaggatgaggaccgtgggagtggggcctttagcctggaaacaatcgcagagtccagcgcccagagtccaggatgccagctgctagtggagaccctgggggtccccctccaggaggccacggagctgggggacccaacgcaggcagacagtgcccgccctgagcagagcagccagagccctgtgcaggcggtgcccggcagtggggattctcagcctgatgaccctccagacagggggacggggttgtccgcctcacagagggccagccaagaccacctgtcagaacaaggggccgatgacagcaagcctgagacagacagggttccaggtgacggtggccaaaaggaacacctaccaagcattgattctgaaggggagaagccagacagaggagccccccaggagggaggggcccaaaggacagcaggggctggcctgcctggagggccccaggaggagggagacggtgtcccctgtaccccagcatcagctcctacctcaggccctgctccaggactgggccctgcctcttggtgcctggaacccgggtctgtggcccagggctcccctgacccccagcagacccccagcaggatgggtagggaaggggaagggactcatagcagcctgggatgctcctccctcgggatggttgtcatcgcagacctgagcacagaccccactgagctggaagagagggctctggaggtggctgggcccgatgggcaggccagtgccatatcacctgcctctcccaggaggaaggccgctgatggaggccacaggagggccttgccaggctgcacctcgctcactggggaaaccacaggagaaagtggggaggcagggcaggatggcaagccccccggcgatgtcctagtgggccctacagcctccctggctctggcacctgggagcggagagtccatgatgggtgctggagattccggtcatgcatccccggacacaggtccatgtgtcaatcagaagcaggagccaggtcctgctcaagaggaagccgagttaggtggccagaacctcgaacgagacctcgaggggttccgtgtgtccccgcaagcctctgttgtgctggaacacagagaaatagcagacgaccctctccaggagcccggggctcagcagggcattccagacaccacctcagagctggcagggcagcgagaccacctgcctcattctgcagaccagggcacctgggcagactctttagctgtggaactcgacttcctgctggacagccagatacaggatgccctggacgcctctgacttcgaagccccacctgagcagctctttccttcggggaacaagccgggcccttgctggccgggccccagctcacatgccaatggagaccctgttgcagtggccaaggcccagccgaggaccttcgtggggatccaggcctctgaggcctccaggatggaggatgccaccaacgtcgtgcgtggcctcatcgttgagctctccaacctgaaccggctgatcatgggcacccaccgggacctggaagctttcaagcgccttaactaccggaagacaaagctgggaggcaaagcccccctgccttacccttccaaggggcctgggaatatccctcgaggggacccaccctggagggagttgtaggccactttgaggtctgtgtttcctttgccacccagcccccatgtccgcagacctcctccaagatgctccagggggtcctagtggaccctacaaacctcccttcagttgcccggaagttggtcttccatggacaacacaaaggaggccgtgaggtcctggcctcacctggccagggtcaaggtcatttgccacccttggcttcagggagggaaactgtgtctcccacagccccagtgacttcaagcgggcctgggctccaggaagctggccacctctgagcagggcccatcctgtccggatttgcaaattttagggtcctgagccaagtatggatggttcagaatttgtttctttcctggaggagaagagagctccctttgttttctttctccccatttccattttatttcttctgggaagacccataataaatgattctgtaga

SEQ ID NO: 291665 - DNA, 3150 bp, Homo sapiens
gcgcctctgcccgggggtcccgggggtcctttcctcttgtgcatcttcaaggctggatgcccggaccacctgcccccaagcccggccttgccctgcctccttccccgggctctgtcgccgcgcactcgcccttcctgagtcctgcactcctcgtcggcgccccgcggccgtcgatcccgagccctcgcttccctgcttggccgtcccacttccgcctcgggcctcgggcgccgccgcaccggagcgcggccactgggctcgccgggtctgccgagccgaaactacaactcccggcaggtagtgcgtgggcgcgcaggcgcctggctggggcggtgctgactgtcgcgggctgcgagggcggtgtttgcgtcgctcatgcgcggggcgggacctcgcggggcgcgggaaagaggcagagcgcgcgcaggtgtgaggggcggcgacatctgtggggttcagagcgtctgtcagtcaccgacgggctccggcttcacgtgggctctcggcctgtggagtcctcacttctcggtggtcggcgtagtgtcagtgtggggcttgtcaccgggagcggggtctacagcgcccaccctcaggcctttccatctttcacctccggactcgaggcctccagcgttctgtgagggccaatttggccatttattttttccaaaaagagtaacgcggataattcaagcgacttattcccaactgatccaggcagagctcgtttctgataaggacagagggtcctcaacgacttctgtggcccagatttctcaaggggaagataaaatgactaagaggaagaagctgcggacctcaggagagggactctgtcctccaaaacccctaaagaacccaaggctaggagacttctatggggacccccagagttccatgttgggctgtttacatcaccctgaggagccagagggcaaattgggacctgttccctctacacagcagcacggggaggaaccaggaaaggccgtctccagctcccctgatgaggaaacaggatctccctgccggctcctccgtcaaccagaaaaggagccagctccccttcctccttcccagaactcattcgggaggtttgttccccagtttgcaaaatccaggaagacagtgacaagaaaagaagagatgaaggatgaggaccgtgggagtggggcctttagcctggaaacaatcgcagagtccagcgcccagagtccaggatgccagctgctagtggagaccctgggggtccccctccaggaggccacggagctgggggacccaacgcaggcagacagtgcccgccctgagcagagcagccagagccctgtgcaggcggtgcccggcagtggggattctcagcctgatgaccctccagacagggggacggggttgtccgcctcacagagggccagccaagaccacctgtcagaacaaggggccgatgacagcaagcctgagacagacagggttccaggtgacggtggccaaaaggaacacctaccaagcattgattctgaaggggagaagccagacagaggagccccccaggagggaggggcccaaaggacagcaggggctggcctgcctggagggccccaggaggagggagacggtgtcccctgtaccccagcatcagctcctacctcaggccctgctccaggactgggccctgcctcttggtgcctggaacccgggtctgtggcccagggctcccctgacccccagcagacccccagcaggatgggtagggaaggggaagggactcatagcagcctgggatgctcctccctcgggatggttgtcatcgcagacctgagcacagaccccactgagctggaagagagggctctggaggtggctgggcccgatgggcaggccagtgccatatcacctgcctctcccaggaggaaggccgctgatggaggccacaggagggccttgccaggctgcacctcgctcactggggaaaccacaggagaaagtggggaggcagggcaggatggcaagccccccggcgatgtcctagtgggccctacagcctccctggctctggcacctgggagcggagagtccatgatgggtgctggagattccggtcatgcatccccggacacaggtccatgtgtcaatcagaagcaggagccaggtcctgctcaagaggaagccgagttaggtggccagaacctcgaacgagacctcgaggggttccgtgtgtccccgcaagcctctgttgtgctggaacacagagaaatagcagacgaccctctccaggagcccggggctcagcagggcattccagacaccacctcagagctggcagggcagcgagaccacctgcctcattctgcagaccagggcacctgggcagactctttagctgtggaactcgacttcctgctggacagccagatacaggatgccctggacgcctctgacttcgaagccccacctgagcagctctttccttcggggaacaagccgggcccttgctggccgggccccagctcacatgccaatggagaccctgttgcagtggccaaggcccagccgagccggctgatcatgggcacccaccgggacctggaagctttcaagcgccttaactaccggaagacaaagctgggaggcaaagcccccctgccttacccttccaaggggcctgggaatatccctcgaggggacccaccctggagggagttgtaggccactttgaggtctgtgtttcctttgccacccagcccccatgtccgcagacctcctccaagatgctccagggggtcctagtggaccctacaaacctcccttcagttgcccggaagttggtcttccatggacaacacaaaggaggccgtgaggtcctggcctcacctggccagggtcaaggtcatttgccacccttggcttcagggagggaaactgtgtctcccacagccccagtgacttcaagcgggcctgggctccaggaagctggccacctctgagcagggcccatcctgtccggatttgcaaattttagggtcctgagccaagtatggatggttcagaatttgtttctttcctggaggagaagagagctccctttgttttctttctccccatttccattttatttcttctgggaagacccataataaatgattctgtaga

SEQ ID NO: 291666 - DNA, 2673 bp, Homo sapiens
gcgcctctgcccgggggtcccgggggtcctttcctcttgtgcatcttcaaggctggatgcccggaccacctgcccccaagcccggccttgccctgcctccttccccgggctctgtcgccgcgcactcgcccttcctgagtcctgcactcctcgtcggcgccccgcggccgtcgatcccgagccctcgcttccctgcttggccgtcccacttccgcctcgggcctcgggcgccgccgcaccggagcgcggccactgggctcgccgggtctgccgagccgaaactacaactcccggcaggtagtgcgtgggcgcgcaggcgcctggctggggcggtgctgactgtcgcgggctgcgagggcggtgtttgcgtcgctcatgcgcggggcgggacctcgcggggcgcgggaaagaggcagagcgcgcgcaggtgtgaggggcggcgacatctgtggggttcagagcgtctgtcagtcaccgacgggctccggcttcacgtgggctctcggcctgtggagtcctcacttctcggtggtcggcgtagtgtcagtgtggggcttgtcaccgggagcggggtctacagcgcccaccctcaggcctttccatctttcacctccggactcgaggcctccagcgttctgtgagggccaatttggccatttattttttccaaaaagagtaacgcggataattcaagcgacttattcccaactgatccaggcagagctcgtttctgataaggacagagggtcctcaacgacttctgtggcccagatttctcaaggggaagataaaatgactaagaggaagaagctgcggacctcaggagagggactctgtcctccaaaacccctaaagaacccaaggctaggagacttctatggggacccccagagttccatgttgggctgtttacatcaccctgaggagccagagggcaaattgggacctgttccctctacacagcagcacggggaggaaccaggaaaggccgtctccagctcccctgatgaggaaacaggatctccctgccggctcctccgtcaaccagaaaaggagccagctccccttcctccttcccagaactcattcgggaggtttgttccccagtttgcaaaatccaggaagacagtgacaagaaaagaagagatgaaggatgaggaccgtgggagtggggcctttagcctggaaacaatcgcagagtccagcgcccagagtccaggatgccagctgctagtggagaccctgggggtccccctccaggaggccacggagctgggggacccaacgcaggcagacagtgcccgccctgagcagagcagccagagccctgtgcaggcggtgcccggcagtggggattctcagcctgatgaccctccagacagggggacggggttgtccgcctcacagagggccagccaagaccacctgtcagaacaaggggccgatgacagcaagcctgagacagacagggttccaggtgacggtggccaaaaggaacacctaccaagcattgattctgaaggggagaagccagacagaggagccccccaggagggaggggcccaaaggacagcaggggctggcctgcctggagggccccaggaggagggagacggtgtcccctgtaccccagcatcagctcctacctcaggccctgctccaggactgggccctgcctcttggtgcctggaacccgggtctgtggcccagggctcccctgacccccagcagacccccagcaggatgggtagggaaggggaagggactcatagcagcctgggatgctcctccctcgggatggttgtcatcgcagacctgagcacagaccccactgagctggaagagagggctctggaggtggctgggcccgatgggcaggccagtgccatatcacctgcctctcccaggaggaaggccgctgatggaggccacaggagggccttgccaggctgcacctcgctcactggggaaaccacaggagaaagtggggaggcagggcaggatggcaagccccccggcgatgtcctagtgggccctacagcctccctggctctggcacctgggagcggagagtccatgatgggtgctggagattccggtcatgcatccccggacacaggtccatgtgtcaatcagaagcaggagccaggtcctgctcaagaggaagccgagttaggtggccagaacctcgaacgagacctcgaggggttccgtgtgtccccgcaagcctctgttgtgctggaacacagagaaatagcagacgaccctctccaggagcccggggctcagcagggcattccagacaccacctcagagctggcagggcagcgagaccacctgcctcattctgcagaccagggcacctgggcagactctttagctgtggaactcgacttcctgctggacagccagatacaggatgccctggacgcctctgacttcgaagccccacctgagcagctctttccttcggggaacaagccgggcccttgctggccgggccccagctcacatgccaatggagaccctgttgcagtggccaaggcccagccgaggccaccagtgagccgtcctccagcctgctgtgtgtgaggagggcaccctctcccccgcaccatgcccggggtctccgcagcctgtcccctcctcccgtgccctcccacagccctcctc

SEQ ID NO: 291667 - DNA, 457 bp, Homo sapiens
gtacggggtgggcttggactcacggcacagggtctgcgggaggccagtggggactcagaggagcagggagggactgaagtgtgaagcccctaggtgggcagcgagggtcaggcacctcactgctgctgggtcctcaccgtggcccccctcccccgtcctttgcagaacacaggctctgaagaaaggctgcaacaggcccagcctgtgctacaacaggccctttctggttatgtgcacgtgtgtgagccgtgtgtgtgcacctgagtcattggtgaccatgtggctgtgaggcgcggccccctctgtcacctggtgaccactgagccccacacgcatgcctgtgtttcccccacagccggctgatcatgggcacccaccgggacctggaagctttcaagcgccttaactaccggaagacaaagctgggaggcaaagcccccctgccttacccttccaa

SEQ ID NO: 291668 - DNA, 3243 bp, Homo sapiens
gcgcctctgcccgggggtcccgggggtcctttcctcttgtgcatcttcaaggctggatgcccggaccacctgcccccaagcccggccttgccctgcctccttccccgggctctgtcgccgcgcactcgcccttcctgagtcctgcactcctcgtcggcgccccgcggccgtcgatcccgagccctcgcttccctgcttggccgtcccacttccgcctcgggcctcgggcgccgccgcaccggagcgcggccactgggctcgccgggtctgccgagccgaaactacaactcccggcaggtagtgcgtgggcgcgcaggcgcctggctggggcggtgctgactgtcgcgggctgcgagggcggtgtttgcgtcgctcatgcgcggggcgggacctcgcggggcgcgggaaagaggcagagcgcgcgcaggtgtgaggggcggcgacatctgtggggttcagagcgtctgtcagtcaccgacgggctccggcttcacgtgggctctcggcctgtggagtcctcacttctcggtggtcggcgtagtgtcagtgtggggcttgtcaccgggagcggggtctacagcgcccaccctcaggcctttccatctttcacctccggactcgaggcctccagcgttctgtgagggccaatttggccatttattttttccaaaaagagtaacgcggataattcaagcgacttattcccaactgatccaggcagagctcgtttctgataaggacagagggtcctcaacgacttctgtggcccagatttctcaaggggaagataaaatgactaagaggaagaagctgcggacctcaggagagggactctgtcctccaaaacccctaaagaacccaaggctaggagacttctatggggacccccagagttccatgttgggctgtttacatcaccctgaggagccagagggcaaattgggacctgttccctctacacagcagcacggggaggaaccaggaaaggccgtctccagctcccctgatgaggaaacaggatctccctgccggctcctccgtcaaccagaaaaggagccagctccccttcctccttcccagaactcattcgggaggtttgttccccagtttgcaaaatccaggaagacagtgacaagaaaagaagagatgaaggatgaggaccgtgggagtggggcctttagcctggaaacaatcgcagagtccagcgcccagagtccaggatgccagctgctagtggagaccctgggggtccccctccaggaggccacggagctgggggacccaacgcaggcagacagtgcccgccctgagcagagcagccagagccctgtgcaggcggtgcccggcagtggggattctcagcctgatgaccctccagacagggggacggggttgtccgcctcacagagggccagccaagaccacctgtcagaacaaggggccgatgacagcaagcctgagacagacagggttccaggtgacggtggccaaaaggaacacctaccaagcattgattctgaaggggagaagccagacagaggagccccccaggagggaggggcccaaaggacagcaggggctggcctgcctggagggccccaggaggagggagacggtgtcccctgtaccccagcatcagctcctacctcaggccctgctccaggactgggccctgcctcttggtgcctggaacccgggtctgtggcccagggctcccctgacccccagcagacccccagcaggatgggtagggaaggggaagggactcatagcagcctgggatgctcctccctcgggatggttgtcatcgcagacctgagcacagaccccactgagctggaagagagggctctggaggtggctgggcccgatgggcaggccagtgccatatcacctgcctctcccaggaggaaggccgctgatggaggccacaggagggccttgccaggctgcacctcgctcactggggaaaccacaggagaaagtggggaggcagggcaggatggcaagccccccggcgatgtcctagtgggccctacagcctccctggctctggcacctgggagcggagagtccatgatgggtgctggagattccggtcatgcatccccggacacaggtccatgtgtcaatcagaagcaggagccaggtcctgctcaagaggaagccgagttaggtggccagaacctcgaacgagacctcgaggggttccgtgtgtccccgcaagcctctgttgtgctggaacacagagaaatagcagacgaccctctccaggagcccggggctcagcagggcattccagacaccacctcagagctggcagggcagcgagaccacctgcctcattctgcagaccagggcacctgggcagactctttagctgtggaactcgacttcctgctggacagccagatacaggatgccctggacgcctctgacttcgaagccccacctgagcagctctttccttcggggaacaagccgggcccttgctggccgggccccagctcacatgccaatggagaccctgttgcagtggccaaggcccagccgaggaccttcgtggggatccaggcctctgaggcctccaggatggaggatgccaccaacgtcgtgcgtggcctcatcgttgagctctccaacctgaaccggctgatcatgggcacccaccgggacctggaagctttcaagcgccttaactaccggaagacaaagctgggaggcaaagcccccctgccttacccttccaaggggcctgggaatatccctcgaggggacccaccctggagggagttgtaggccactttgaggtctgtgtttcctttgccacccagcccccatgtccgcagacctcctccaagatgctccagggggtcctagtggaccctacaaacctcccttcagttgcccggaagttggtcttccatggacaacacaaaggaggccgtgaggtcctggcctcacctggccagggtcaaggtcatttgccacccttggcttcagggagggaaactgtgtctcccacagccccagtgacttcaagcgggcctgggctccaggaagctggccacctctgagcagggcccatcctgtccggatttgcaaattttagggtcctgagccaagtatggatggttcagaatttgtttctttcctggaggagaagagagctccctttgttttctttctccccatttccattttatttcttctgggaagacccataataaatgattctgtaga

SEQ ID NO: 291669 - DNA, 2899 bp, Homo sapiens
gcgcctctgcccgggggtcccgggggtcctttcctcttgtgcatcttcaaggctggatgcccggaccacctgcccccaagcccggccttgccctgcctccttccccgggctctgtcgccgcgcactcgcccttcctgagtcctgcactcctcgtcggcgccccgcggccgtcgatcccgagccctcgcttccctgcttggccgtcccacttccgcctcgggcctcgggcgccgccgcaccggagcgcggccactgggctcgccgggtctgccgagccgaaactacaactcccggcaggtagtgcgtgggcgcgcaggcgcctggctggggcggtgctgactgtcgcgggctgcgagggcggtgtttgcgtcgctcatgcgcggggcgggacctcgcggggcgcgggaaagaggcagagcgcgcgcagatttctcaaggggaagataaaatgactaagaggaagaagctgcggacctcaggagagggactctgtcctccaaaacccctaaagaacccaaggctaggagacttctatggggacccccagagttccatgttgggctgtttacatcaccctgaggagccagagggcaaattgggacctgttccctctacacagcagcacggggaggaaccaggaaaggccgtctccagctcccctgatgaggaaacaggatctccctgccggctcctccgtcaaccagaaaaggagccagctccccttcctccttcccagaactcattcgggaggtttgttccccagtttgcaaaatccaggaagacagtgacaagaaaagaagagatgaaggatgaggaccgtgggagtggggcctttagcctggaaacaatcgcagagtccagcgcccagagtccaggatgccagctgctagtggagaccctgggggtccccctccaggaggccacggagctgggggacccaacgcaggcagacagtgcccgccctgagcagagcagccagagccctgtgcaggcggtgcccggcagtggggattctcagcctgatgaccctccagacagggggacggggttgtccgcctcacagagggccagccaagaccacctgtcagaacaaggggccgatgacagcaagcctgagacagacagggttccaggtgacggtggccaaaaggaacacctaccaagcattgattctgaaggggagaagccagacagaggagccccccaggagggaggggcccaaaggacagcaggggctggcctgcctggagggccccaggaggagggagacggtgtcccctgtaccccagcatcagctcctacctcaggccctgctccaggactgggccctgcctcttggtgcctggaacccgggtctgtggcccagggctcccctgacccccagcagacccccagcaggatgggtagggaaggggaagggactcatagcagcctgggatgctcctccctcgggatggttgtcatcgcagacctgagcacagaccccactgagctggaagagagggctctggaggtggctgggcccgatgggcaggccagtgccatatcacctgcctctcccaggaggaaggccgctgatggaggccacaggagggccttgccaggctgcacctcgctcactggggaaaccacaggagaaagtggggaggcagggcaggatggcaagccccccggcgatgtcctagtgggccctacagcctccctggctctggcacctgggagcggagagtccatgatgggtgctggagattccggtcatgcatccccggacacaggtccatgtgtcaatcagaagcaggagccaggtcctgctcaagaggaagccgagttaggtggccagaacctcgaacgagacctcgaggggttccgtgtgtccccgcaagcctctgttgtgctggaacacagagaaatagcagacgaccctctccaggagcccggggctcagcagggcattccagacaccacctcagagctggcagggcagcgagaccacctgcctcattctgcagaccagggcacctgggcagactctttagctgtggaactcgacttcctgctggacagccagatacaggatgccctggacgcctctgacttcgaagccccacctgagcagctctttccttcggggaacaagccgggcccttgctggccgggccccagctcacatgccaatggagaccctgttgcagtggccaaggcccagccgaggaccttcgtggggatccaggcctctgaggcctccaggatggaggatgccaccaacgtcgtgcgtggcctcatcgttgagctctccaacctgaaccggctgatcatgggcacccaccgggacctggaagctttcaagcgccttaactaccggaagacaaagctgggaggcaaagcccccctgccttacccttccaaggggcctgggaatatccctcgaggggacccaccctggagggagttgtaggccactttgaggtctgtgtttcctttgccacccagcccccatgtccgcagacctcctccaagatgctccagggggtcctagtggaccctacaaacctcccttcagttgcccggaagttggtcttccatggacaacacaaaggaggccgtgaggtcctggcctcacctggccagggtcaaggtcatttgccacccttggcttcagggagggaaactgtgtctcccacagccccagtgacttcaagcgggcctgggctccaggaagctggccacctctgagcagggcccatcctgtccggatttgcaaattttagggtcctgagccaagtatggatggttcagaatttgtttctttcctggaggagaagagagctccctttgttttctttctccccatttccattttatttcttctgggaagacccataataaatgattctgtaga

SEQ ID NO: 291670 - DNA, 1968 bp, Homo sapiens
gcgcctctgcccgggggtcccgggggtcctttcctcttgtgcatcttcaaggctggatgcccggaccacctgcccccaagcccggccttgccctgcctccttccccgggctctgtcgccgcgcactcgcccttcctgagtcctgcactcctcgtcggcgccccgcggccgtcgatcccgagccctcgcttccctgcttggccgtcccacttccgcctcgggcctcgggcgccgccgcaccggagcgcggccactgggctcgccgggtctgccgagccgaaactacaactcccggcaggtagtgcgtgggcgcgcaggcgcctggctggggcggtgctgactgtcgcgggctgcgagggcggtgtttgcgtcgctcatgcgcggggcgggacctcgcggggcgcgggaaagaggcagagcgcgcgcaggtgtgaggggcggcgacatctgtggggttcagagcgtctgtcagtcaccgacgggctccggcttcacgtgggctctcggcctgtggagtcctcacttctcggtggtcggcgtagtgtcagtgtggggcttgtcaccgggagcggggtctacagcgcccaccctcaggcctttccatctttcacctccggactcgaggcctccagcgttctgtgagggccaatttggccatttattttttccaaaaagagtaacgcggataattcaagcgacttattcccaactgatccaggcagagctcgtttctgataaggacagagggtcctcaacgacttctgtggcccagatttctcaaggggaagataaaatgactaagaggaagaagctgcggacctcaggagagggactctgtcctccaaaacccctaaagaacccaaggctaggagacttctatggggacccccagagttccatgttgggctgtttacatcaccctgaggagccagagggcaaattgggacctgttccctctacacagcagcacggggaggaaccaggaaaggccgtctccagctcccctgatgaggaaacaggatctccctgccggctcctccgtcaaccagaaaaggagccagctccccttcctccttcccagaactcattcgggaggtttgttccccagtttgcaaaatccaggaagacagtgacaagaaaagaagagatgaaggatgaggaccgtgggagtggggcctttagcctgctctttccttcggggaacaagccgggcccttgctggccgggccccagctcacatgccaatggagaccctgttgcagtggccaaggcccagccgaggaccttcgtggggatccaggcctctgaggcctccaggatggaggatgccaccaacgtcgtgcgtggcctcatcgttgagctctccaacctgaaccggctgatcatgggcacccaccgggacctggaagctttcaagcgccttaactaccggaagacaaagctgggaggcaaagcccccctgccttacccttccaaggggcctgggaatatccctcgaggggacccaccctggagggagttgtaggccactttgaggtctgtgtttcctttgccacccagcccccatgtccgcagacctcctccaagatgctccagggggtcctagtggaccctacaaacctcccttcagttgcccggaagttggtcttccatggacaacacaaaggaggccgtgaggtcctggcctcacctggccagggtcaaggtcatttgccacccttggcttcagggagggaaactgtgtctcccacagccccagtgacttcaagcgggcctgggctccaggaagctggccacctctgagcagggcccatcctgtccggatttgcaaattttagggtcctgagccaagtatggatggttcagaatttgtttctttcctggaggagaagagagctccctttgttttctttctccccatttccattttatttcttctgggaagacccataataaatgattctgtaga

SEQ ID NO: 291671 - DNA, 633 bp, Homo sapiens
tcttcggagaacttggttatcaaaggccccggggctgagtctttttctgtccacaggaaacaatcgcagagtccagcgcccagagtccaggatgccagctgctagtggagaccctgggggtccccctccaggaggccacggagctgggggacccaacgcaggcagacagtgcccgccctgagcagagcagccagagccctgtgcaggcggtgcccggcagtggggattctcagcctgatgaccctccagacagggggacggggttgtccgcctcacagagggccagccaagaccacctgtcagaacaaggggccgatgacagcaagcctgagacagacagggttccaggtgacggtggccaaaaggaacacctaccaagcattgattctgaaggggagaagccagacagaggagccccccaggagggaggggcccaaaggacagcaggggctggcctgcctggagggccccaggaggagggagacggtgtcccctgtaccccagcatcagctcctacctcaggccctgctccaggactgggccctgcctcttggtgcctggaacccgggtctgtggcccagggctcccctgacccccagcagacccccagcaggatgggtagggaaggggaag

SEQ ID NO: 291672 - DNA, 2701 bp, Homo sapiens
cggcggcggggaggggagaggctctgagaggcgaggccgggtgaggcggcgagggcggcccgacgggcgcgggacgggacggggcagcgagggcgccgggagccgcggcccggaatcggggcgcttcgccccgggccccccagcatgaagaccccggcggacacagggtttgccttcccggattgggcctacaagccagagtcgtcccctggctcaaggcagatccagctgtggcactttatcctggagctgctgcggaaggaggagtaccagggcgtcattgcctggcagggggactacggggaattcgtcatcaaagaccctgatgaggtggcccggctgtggggcgttcgcaagtgcaagccccagatgaattacgacaagctgagccgggccctgcgctattactataacaagcgcattctgcacaagaccaaggggaaacggttcacctacaagttcaatttcaacaaactggtgctggtcaattacccattcattgatgtggggttggctgggggtgcagtgccccagagtgccccgccagtgccgtcgggtggtagccacttccgcttccctccctcaacgccctccgaggtgctgtcccccaccgaggacccccgctcaccaccagcctgctcttcatcttcatcttccctcttctcggctgtggtggcccgccgcctgggccgaggctcagtcagtgactgtagtgatggcacgtcagagctggaggaaccgctgggagaggatccccgcgcccgaccacccggccctccggatctgggtgccttccgagggcccccgctggcccgcctgccccatgaccctggtgtcttccgagtctatccccggcctcggggtggccctgaacccctcagccccttccctgtgtcgcctctggccggtcctggatccctgctgccccctcagctctccccggctctgcccatgacgcccacccacctggcctacactccctcgcccacgctgagcccgatgtaccccagtggtggcggggggcccagcggctcagggggaggctcccacttctccttcagccctgaggacatgaaacggtacctgcaggcccacacccaaagcgtctacaactaccacctcagcccccgcgccttcctgcactaccctgggctggtggtgccccagccccagcgccctgacaagtgcccgctgccgcccatggcacccgagaccccaccggtcccctcctcggcctcgtcatcctcttcttcttcttcctccccattcaagtttaagctccagccgcccccactcggacgccggcagcgggcagctggggagaaggccgtagccggtgctgacaagagcggtggcagtgcaggcgggctggctgagggggcaggggcgctagccccaccgcccccgccaccacagatcaaggtggagcccatctcggaaggcgagtcggaggaggtagaggtgactgacatcagtgatgaggatgaggaagacggggaggtgttcaagacgccccgtgccccacctgcaccccctaagcctgagcccggcgaggcacccggggcatcccagtgcatgcccctcaagctacgctttaagcggcgctggagtgaagactgtcgcctcgaagggggtgggggccccgctgggggctttgaggatgagggtgaggacaagaaggtgcgtggggaggggcctggggaggctggggggcccctcaccccaaggcgggtgagctctgacctccagcatgccacggcccagctctccctggagcaccgagactcctgagggctgtgggcaggggacctgtgtgccccgcaccccccatgcttcttttgctgccttaagccccctatgccctggaggtgagggcagctctcttgtctcttccctgcctcctcccttttccctccccacattttgtataaaactttaatttcttttttttaaaaatggtgggggtgggtgggtgcccagggctaggggctattccctgtctctgtgggtttctaagctctgggcaaagtggtggtagggggagggagggggaagttaagggggtcacctccattctggggaatttatatttgaattgaggctttggccttaacacccaggaacttttctattacaatcgcttaggaagtaaagccttgtctccctccctgttctctgcctcttgtacccctctgacccacccgctctgccccactcccagccctcctcagccccagccctgcctgccctgcccctccagggggccatgagtgcctaggtttctcataccccacaaggtcacagcaggggagggagggacaattttataatgaaccaaaaattccatgtgttggggggtggggggcggaggagggtgaggggtgccgcccatgggccacaaatctctacaagtgcctgctatccctctcccactccccaccccagcaccggtccaaccccttcatccccagctgctcctaggactggcccatgggcaggcgggtggggggatgggaagggggtgccctgaaaccaaactggaagccccctctgcctcccagctggggcctctggggtggggtggggggctgtggtcaagccttattctgtattggggactgagggtggggggagtagaggggccgctggagaatgtattcaaaacaataaaactttggacctttggatgcagtgatcaatg

SEQ ID NO: 291673 - DNA, 2593 bp, Homo sapiens
gtttccttcccccggcggcggcggcggcggcggcggcggctcgggctcctgtgtgcggggtttgccttcccggattgggcctacaagccagagtcgtcccctggctcaaggcagatccagctgtggcactttatcctggagctgctgcggaaggaggagtaccagggcgtcattgcctggcagggggactacggggaattcgtcatcaaagaccctgatgaggtggcccggctgtggggcgttcgcaagtgcaagccccagatgaattacgacaagctgagccgggccctgcgctattactataacaagcgcattctgcacaagaccaaggggaaacggttcacctacaagttcaatttcaacaaactggtgctggtcaattacccattcattgatgtggggttggctgggggtgcagtgccccagagtgccccgccagtgccgtcgggtggtagccacttccgcttccctccctcaacgccctccgaggtgctgtcccccaccgaggacccccgctcaccaccagcctgctcttcatcttcatcttccctcttctcggctgtggtggcccgccgcctgggccgaggctcagtcagtgactgtagtgatggcacgtcagagctggaggaaccgctgggagaggatccccgcgcccgaccacccggccctccggatctgggtgccttccgagggcccccgctggcccgcctgccccatgaccctggtgtcttccgagtctatccccggcctcggggtggccctgaacccctcagccccttccctgtgtcgcctctggccggtcctggatccctgctgccccctcagctctccccggctctgcccatgacgcccacccacctggcctacactccctcgcccacgctgagcccgatgtaccccagtggtggcggggggcccagcggctcagggggaggctcccacttctccttcagccctgaggacatgaaacggtacctgcaggcccacacccaaagcgtctacaactaccacctcagcccccgcgccttcctgcactaccctgggctggtggtgccccagccccagcgccctgacaagtgcccgctgccgcccatggcacccgagaccccaccggtcccctcctcggcctcgtcatcctcttcttcttcttcctccccattcaagtttaagctccagccgcccccactcggacgccggcagcgggcagctggggagaaggccgtagccggtgctgacaagagcggtggcagtgcaggcgggctggctgagggggcaggggcgctagccccaccgcccccgccaccacagatcaaggtggagcccatctcggaaggcgagtcggaggaggtagaggtgactgacatcagtgatgaggatgaggaagacggggaggtgttcaagacgccccgtgccccacctgcaccccctaagcctgagcccggcgaggcacccggggcatcccagtgcatgcccctcaagctacgctttaagcggcgctggagtgaagactgtcgcctcgaagggggtgggggccccgctgggggctttgaggatgagggtgaggacaagaaggtgcgtggggaggggcctggggaggctggggggcccctcaccccaaggcgggtgagctctgacctccagcatgccacggcccagctctccctggagcaccgagactcctgagggctgtgggcaggggacctgtgtgccccgcaccccccatgcttcttttgctgccttaagccccctatgccctggaggtgagggcagctctcttgtctcttccctgcctcctcccttttccctccccacattttgtataaaactttaatttcttttttttaaaaatggtgggggtgggtgggtgcccagggctaggggctattccctgtctctgtgggtttctaagctctgggcaaagtggtggtagggggagggagggggaagttaagggggtcacctccattctggggaatttatatttgaattgaggctttggccttaacacccaggaacttttctattacaatcgcttaggaagtaaagccttgtctccctccctgttctctgcctcttgtacccctctgacccacccgctctgccccactcccagccctcctcagccccagccctgcctgccctgcccctccagggggccatgagtgcctaggtttctcataccccacaaggtcacagcaggggagggagggacaattttataatgaaccaaaaattccatgtgttggggggtggggggcggaggagggtgaggggtgccgcccatgggccacaaatctctacaagtgcctgctatccctctcccactccccaccccagcaccggtccaaccccttcatccccagctgctcctaggactggcccatgggcaggcgggtggggggatgggaagggggtgccctgaaaccaaactggaagccccctctgcctcccagctggggcctctggggtggggtggggggctgtggtcaagccttattctgtattggggactgagggtggggggagtagaggggccgctggagaatgtattcaaaacaataaaactttggacctttggatgcagtgatcaatg

SEQ ID NO: 291674 - DNA, 2348 bp, Homo sapiens
tacccggctggttacgggggaagggagtcttccactggccgttgaagtagagggcattcaccagcaccagccgtgtcagctggtccacggctcctttcccaagcaagttgctgatcataccttttgtgtgtgtcttcacccagtcattgatgatgggttggctgggggtgcagtgccccagagtgccccgccagtgccgtcgggtggtagccacttccgcttccctccctcaacgccctccgaggtgctgtcccccaccgaggacccccgctcaccaccagcctgctcttcatcttcatcttccctcttctcggctgtggtggcccgccgcctgggccgaggctcagtcagtgactgtagtgatggcacgtcagagctggaggaaccgctgggagaggatccccgcgcccgaccacccggccctccggatctgggtgccttccgagggcccccgctggcccgcctgccccatgaccctggtgtcttccgagtctatccccggcctcggggtggccctgaacccctcagccccttccctgtgtcgcctctggccggtcctggatccctgctgccccctcagctctccccggctctgcccatgacgcccacccacctggcctacactccctcgcccacgctgagcccgatgtaccccagtggtggcggggggcccagcggctcagggggaggctcccacttctccttcagccctgaggacatgaaacggtacctgcaggcccacacccaaagcgtctacaactaccacctcagcccccgcgccttcctgcactaccctgggctggtggtgccccagccccagcgccctgacaagtgcccgctgccgcccatggcacccgagaccccaccggtcccctcctcggcctcgtcatcctcttcttcttcttcctccccattcaagtttaagctccagccgcccccactcggacgccggcagcgggcagctggggagaaggccgtagccggtgctgacaagagcggtggcagtgcaggcgggctggctgagggggcaggggcgctagccccaccgcccccgccaccacagatcaaggtggagcccatctcggaaggcgagtcggaggaggtagaggtgactgacatcagtgatgaggatgaggaagacggggaggtgttcaagacgccccgtgccccacctgcaccccctaagcctgagcccggcgaggcacccggggcatcccagtgcatgcccctcaagctacgctttaagcggcgctggagtgaagactgtcgcctcgaagggggtgggggccccgctgggggctttgaggatgagggtgaggacaagaaggtgcgtggggaggggcctggggaggctggggggcccctcaccccaaggcgggtgagctctgacctccagcatgccacggcccagctctccctggagcaccgagactcctgagggctgtgggcaggggacctgtgtgccccgcaccccccatgcttcttttgctgccttaagccccctatgccctggaggtgagggcagctctcttgtctcttccctgcctcctcccttttccctccccacattttgtataaaactttaatttcttttttttaaaaatggtgggggtgggtgggtgcccagggctaggggctattccctgtctctgtgggtttctaagctctgggcaaagtggtggtagggggagggagggggaagttaagggggtcacctccattctggggaatttatatttgaattgaggctttggccttaacacccaggaacttttctattacaatcgcttaggaagtaaagccttgtctccctccctgttctctgcctcttgtacccctctgacccacccgctctgccccactcccagccctcctcagccccagccctgcctgccctgcccctccagggggccatgagtgcctaggtttctcataccccacaaggtcacagcaggggagggagggacaattttataatgaaccaaaaattccatgtgttggggggtggggggcggaggagggtgaggggtgccgcccatgggccacaaatctctacaagtgcctgctatccctctcccactccccaccccagcaccggtccaaccccttcatccccagctgctcctaggactggcccatgggcaggcgggtggggggatgggaagggggtgccctgaaaccaaactggaagccccctctgcctcccagctggggcctctggggtggggtggggggctgtggtcaagccttattctgtattggggactgagggtggggggagtagaggggccgctggagaatgtattcaaaacaataaaactttggacctttggatgcagtgatcaatg

SEQ ID NO: 291675 - DNA, 1960 bp, Homo sapiens
cggcggcggggaggggagaggctctgagagggccctccggatctgggtgccttccgagggcccccgctggcccgcctgccccatgaccctggtgtcttccgagtctatccccggcctcggggtggccctgaacccctcagccccttccctgtgtcgcctctggccggtcctggatccctgctgccccctcagctctccccggctctgcccatgacgcccacccacctggcctacactccctcgcccacgctgagcccgatgtaccccagtggtggcggggggcccagcggctcagggggaggctcccacttctccttcagccctgaggacatgaaacggtacctgcaggcccacacccaaagcgtctacaactaccacctcagcccccgcgccttcctgcactaccctgggctggtggtgccccagccccagcgccctgacaagtgcccgctgccgcccatggcacccgagaccccaccggtcccctcctcggcctcgtcatcctcttcttcttcttcctccccattcaagtttaagctccagccgcccccactcggacgccggcagcgggcagctggggagaaggccgtagccggtgctgacaagagcggtggcagtgcaggcgggctggctgagggggcaggggcgctagccccaccgcccccgccaccacagatcaaggtggagcccatctcggaaggcgagtcggaggaggtagaggtgactgacatcagtgatgaggatgaggaagacggggaggtgttcaagacgccccgtgccccacctgcaccccctaagcctgagcccggcgaggcacccggggcatcccagtgcatgcccctcaagctacgctttaagcggcgctggagtgaagactgtcgcctcgaagggggtgggggccccgctgggggctttgaggatgagggtgaggacaagaaggtgcgtggggaggggcctggggaggctggggggcccctcaccccaaggcgggtgagctctgacctccagcatgccacggcccagctctccctggagcaccgagactcctgagggctgtgggcaggggacctgtgtgccccgcaccccccatgcttcttttgctgccttaagccccctatgccctggaggtgagggcagctctcttgtctcttccctgcctcctcccttttccctccccacattttgtataaaactttaatttcttttttttaaaaatggtgggggtgggtgggtgcccagggctaggggctattccctgtctctgtgggtttctaagctctgggcaaagtggtggtagggggagggagggggaagttaagggggtcacctccattctggggaatttatatttgaattgaggctttggccttaacacccaggaacttttctattacaatcgcttaggaagtaaagccttgtctccctccctgttctctgcctcttgtacccctctgacccacccgctctgccccactcccagccctcctcagccccagccctgcctgccctgcccctccagggggccatgagtgcctaggtttctcataccccacaaggtcacagcaggggagggagggacaattttataatgaaccaaaaattccatgtgttggggggtggggggcggaggagggtgaggggtgccgcccatgggccacaaatctctacaagtgcctgctatccctctcccactccccaccccagcaccggtccaaccccttcatccccagctgctcctaggactggcccatgggcaggcgggtggggggatgggaagggggtgccctgaaaccaaactggaagccccctctgcctcccagctggggcctctggggtggggtggggggctgtggtcaagccttattctgtattggggactgagggtggggggagtagaggggccgctggagaatgtattcaaaacaataaaactttggacctttggatgcagtgatcaatg

SEQ ID NO: 291676 - DNA, 2571 bp, Homo sapiens
cggcggcggggaggggagaggctctgagaggcgaggccgggtgaggcggcgagggcggcccgacgggcgcgggacgggacggggcagcgagggcgccgggagccgcggcccggaatcggggcgcttcgccccgggccccccagcatgaagaccccggcggacacagggtttgccttcccggattgggcctacaagccagagtcgtcccctggctcaaggcagatccagctgtggcactttatcctggagctgctgcggaaggaggagtaccagggcgtcattgcctggcagggggactacggggaattcgtcatcaaagaccctgatgaggtggcccggctgtggggcgttcgcaagtgcaagccccagatgaattacgacaagctgagccgggccctgcgctattactataacaagcgcattctgcacaagaccaaggggaaacggttcacctacaagttcaatttcaacaaactggtgctggtcaattacccattcattgatgtggggttggctgggggtgcagtgccccagagtgccccgccagtgccgtcgggtggtagccacttccgcttccctccctcaacgccctccgaggtgctgtcccccaccgaggacccccgctcaccaccagcctgctcttcatcttcatcttccctcttctcggctgtggtggcccgccgcctgggccgaggctcagtcagtgactgtagtgatggcacgtcagagctggaggaaccgctgggagaggatccccgcgcccgaccacccggccctccggatctgggtgccttccgagggcccccgctggcccgcctgccccatgaccctggtgtcttccgagtctatccccggcctcggggtggccctgaacccctcagccccttccctgtgtcgcctctggccggtcctggatccctgctgccccctcagctctccccggctctgcccatgacgcccacccacctggcctacactccctcgcccacgctgagcccgatgtaccccagtggtggcggggggcccagcggctcagggggaggctcccacttctccttcagccctgaggacatgaaacggtacctgcaggcccacacccaaagcgtctacaactaccacctcagcccccgcgccttcctgcactaccctgggctggtggtgccccagccccagcgccctgacaagtgcccgctgccgcccatggcacccgagaccccaccggtcccctcctcggcctcgtcatcctcttcttcttcttcctccccattcaagtttaagctccagccgcccccactcggacgccggcagcgggcagctggggagaaggccgtagccggtgctgacaagagcggtggcagtgcaggcgggctggctgagggggcaggggcgctagccccaccgcccccgccaccacagatcaaggtggagcccatctcggaaggcgagtcggaggaggtagaggtgactgacatcagtgatgaggatgaggaagacggggaggtgttcaagacgccccgtgccccacctgcaccccctaagcctgagcccggcgaggcacccggggcatcccagtgcatgcccctcaagctacgctttaagcggcgctggagtgaagactgtcgcctcgaagggggtgggggccccgctgggggctttgaggatgagggtgaggacaagaaggtgcgtggggaggggcctggggaggctggggggcccctcaccccaaggcgggtgagctctgacctccagcatgccacggcccagctctccctggagcaccgagactcctgagggctgtgggcaggggacctgtgtgccccgcaccccccatgcttcttttgctgccttaagccccctatgccctggaggtgagggcagctctcttgtctcttccctgcctcctcccttttccctccccacattttgtataaaactttaatttcttttttttaaaaatggtgggggtgggtgggtgcccagggctaggggctattccctgtctctgtgggtttctaagctctgggcaaagtggtggtagggggagggagggggaagttaagggggtcacctccattctggggaatttatatttgaattgaggctttggccttaacacccaggaacttttctattacaatcgcttaggaagtaaagccttgtctccctccctgttctctgcctcttgtacccctctgacccacccgctctgccccactcccagccctcctcagccccagccctgcctgccctgcccctccagggggccatgagtgcctaggtttctcataccccacaaggtcacagcaggggagggagggacaattttataatgaaccaaaaattccatgtgttggggggtggggggcggaggagggtgaggggtgccgcccatgggccacaaatctctacaagtgcctgctatccctctcccactccccaccccagcaccggtggggggctgtggtcaagccttattctgtattggggactgagggtggggggagtagaggggccgctggagaatgtattcaaaacaataaaactttggacctttggatgcagtgatcaatg

SEQ ID NO: 291677 - DNA, 2503 bp, Homo sapiens
cggcggcggggaggggagaggctctgagaggcgaggccgggtgaggcggcgagggcggcccgacgggcgcgggacgggacggggcagcgagggcgccgggagccgcggcccggaatcggggcgcttcgccccgggccccccagcatgaagaccccggcggacacagggtttgccttcccggattgggcctacaagccagagtcgtcccctggctcaaggcagatccagctgtggcactttatcctggagctgctgcggaaggaggagtaccagggcgtcattgcctggcagggggactacggggaattcgtcatcaaagaccctgatgaggtggcccggctgtggggcgttcgcaagtgcaagccccagatgaattacgacaagctgagccgggccctgcgctattactataacaagcgcattctgcacaagaccaaggggaaacggttcacctacaagttcaatttcaacaaactggtgctggtcaattacccattcattgatgtggggttggctgggggtgcagtgccccagagtgccccgccagtgccgtcgggtggtagccacttccgcttccctccctcaacgccctccgaggtgctgtcccccaccgaggacccccgctcaccaccagcctgctcttcatcttcatcttccctcttctcggctgtggtggcccgccgcctgggccgaggctcagtcagtgactgtagtgatggcacgtcagagctggaggaaccgctgggagaggatccccgcgcccgaccacccggccctccggatctgggtgccttccgagggcccccgctggcccgcctgccccatgaccctggtgtcttccgagtctatccccggcctcggggtggccctgaacccctcagccccttccctgtgtcgcctctggccggtcctggatccctgctgccccctcagctctccccggctctgcccatgacgcccacccacctggcctacactccctcgcccacgctgagcccgatgtaccccagtggtggcggggggcccagcggctcagggggaggctcccacttctccttcagccctgaggacatgaaacggtacctgcaggcccacacccaaagcgtctacaactaccacctcagcccccgcgccttcctgcactaccctgggctggtggtgccccagccccagcgccctgacaagtgcccgctgccgcccatggcacccgagaccccaccggtcccctcctcggcctcgtcatcctcttcttcttcttcctccccattcaagtttaagctccagccgcccccactcggacgccggcagcgggcagctggggagaaggccgtagccggtgctgacaagagcggtggcagtgcaggcgggctggctgagggggcaggggcgctagccccaccgcccccgccaccacagatcaaggtggagcccatctcggaaggcgagtcggaggaggtagaggtgactgacatcagtgatgaggatgaggaagacggggaggtgttcaagacgccccgtgccccacctgcaccccctaagcctgagcccggcgaggcacccggggcatcccagtgcatgcccctcaagctacgctttaagcggcgctggagtgaagactgtcgcctcgaagggggtgggggccccgctgggggctttgaggatgagggtgaggacaagaaggtgcgtggggaggggcctggggaggctggggggcccctcaccccaaggcgggtgagctctgacctccagcatgccacggcccagctctccctggagcaccgagactcctgagggctgtgggcaggggacctgtgtgccccgcaccccccatgcttcttttgctgccttaagccccctatgccctggaggtgagggcagctctcttgtctcttccctgcctcctcccttttccctccccacattttgtataaaactttaatttcttttttttaaaaatggtgggggtgggtgggtgcccagggctaggggctattccctgtctctgtgggtttctaagctctgggcaaagtggtggtagggggagggagggggaagttaagggggtcacctccattctggggaatttatatttgaattgaggctttggccttaacacccaggaacttttctattacaatcgcttaggaagtaaagccttgtctccctccctgttctctgcctcttgtacccctctgacccacccgctctgccccactcccagccctcctcagccccagccctgcctgccctgcccctccagggggccatgagtgcctaggtttctcataccccacaaggtcacagcaggggagggagggacaattttataatgaaccaaactggaagccccctctgcctcccagctggggcctctggggtggggtggggggctgtggtcaagccttattctgtattggggactgagggtggggggagtagaggggccgctggagaatgtattcaaaacaataaaactttggacctttggatgcagtgatcaatg

SEQ ID NO: 291678 - DNA, 2407 bp, Homo sapiens
  misc_feature (2407)..(2407): n is a, c, g, or t
cggcggcggggaggggagaggctctgagaggcgaggccgggtgaggcggcgagggcggcccgacgggcgcgggacgggacggggcagcgagggcgccgggagccgcggcccggaatcggggcgcttcgccccgggccccccagcatgaagaccccggcggacacagggtttgccttcccggattgggcctacaagccagagtcgtcccctggctcaaggcagatccagctgtggcactttatcctggagctgctgcggaaggaggagtaccagggcgtcattgcctggcagggggactacggggaattcgtcatcaaagaccctgatgaggtggcccggctgtggggcgttcgcaagtgcaagccccagatgaattacgacaagctgagccgggccctgcgctattactataacaagcgcattctgcacaagaccaaggggaaacggttcacctacaagttcaatttcaacaaactggtgctggtcaattacccattcattgatgtggggttggctgggggtgcagtgccccagagtgccccgccagtgccgtcgggtggtagccacttccgcttccctccctcaacgccctccgaggtgctgtcccccaccgaggacccccgctcaccaccagcctgctcttcatcttcatcttccctcttctcggctgtggtggcccgccgcctgggccgaggctcagtcagtgactgtagtgatggcacgtcagagctggaggaaccgctgggagaggatccccgcgcccgaccacccggccctccggatctgggtgccttccgagggcccccgctggcccgcctgccccatgaccctggtgtcttccgagtctatccccggcctcggggtggccctgaacccctcagccccttccctgtgtcgcctctggccggtcctggatccctgctgccccctcagctctccccggctctgcccatgacgcccacccacctggcctacactccctcgcccacgctgagcccgatgtaccccagtggtggcggggggcccagcggctcagggggaggctcccacttctccttcagccctgaggacatgaaacggtacctgcaggcccacacccaaagcgtctacaactaccacctcagcccccgcgccttcctgcactaccctgggctggtggtgccccagccccagcgccctgacaagtgcccgctgccgcccatggcacccgagaccccaccggtcccctcctcggcctcgtcatcctcttcttcttcttcctccccattcaagtttaagctccagccgcccccactcggacgccggcagcgggcagctggggagaaggccgtagccggtgctgacaagagcggtggcagtgcaggcgggctggctgagggggcaggggcgctagccccaccgcccccgccaccacagatcaaggtggagcccatctcggaaggcgagtcggaggaggtagaggtgactgacatcagtgatgaggatgaggaagacggggaggtgttcaagacgccccgtgccccacctgcaccccctaagcctgagcccggcgaggcacccggggcatcccagtgcatgcccctcaagctacgctttaagcggcgctggagtgaagactgtcgcctcgaagggggtgggggccccgctgggggctttgaggatgagggtgaggacaagaaggtgcgtggggaggggcctggggaggctggggggcccctcaccccaaggcgggtgagctctgacctccagcatgccacggcccagctctccctggagcaccgagactcctgagggctgtgggcaggggacctgtgtgccccgcaccccccatgcttcttttgctgccttaagccccctatgcccttccctgtgtcgcctctggccggtcctggatccctgctgccccctcagctctccccggctctgcccatgacgcccacagttattgtataacacactcttaactaacataaaagattaaacaatggtcgggcggctggagctagggtgcccacgggactaggcggcatatttccccatcgtactcgtgtagagcgatctctctacagcctgcttggcgacaaacagttggatgcgctagacggacggacagagggcagagtgcggaagaggctttcacagcgcgcgttctccccctcgcgaattccatgcggccggaccatcccatacttgcgcgccatttgcaggccattctggggagcttttaaggaacgcccgatgggaaagcttttctgctaagttaacagaatccgggattacgggaacggttaagaggacctactgtcgcttccccatcaccctgtggttacagtcatggcgcttctcttgtaacggcccctcatggaacgccaacccgggatcactggccccagacgcacctcggacn

SEQ ID NO: 291679 - DNA, 1503 bp, Homo sapiens
cggcggcggggaggggagaggctctgagaggcgaggccgggtgaggcggcgagggcggcccgacgggcgcgggacgggacggggcagcgagggcgccgggagccgcggcccggaatcggggcgcttcgccccgggccccccagcatgaagaccccggcggacacagggtttgccttcccggattgggcctacaagccagagtcgtcccctggctcaaggcagatccagctgtggcactttatcctggagctgctgcggaaggaggagtaccagggcgtcattgcctggcagggggactacggggaattcgtcatcaaagaccctgatgaggtggcccggctgtggggcgttcgcaagtgcaagccccagatgaattacgacaagctgagccgggccctgcgctattactataacaagcgcattctgcacaagaccaaggggaaacggttcacctacaagttcaatttcaacaaactggtgctggtcaattacccattcattgatgtggggttggctgggggtgcagtgccccagagtgccccgccagtgccgtcgggtggtagccacttccgcttccctccctcaacgccctccgaggtgctgtcccccaccgaggacccccgctcaccaccagcctgctcttcatcttcatcttccctcttctcggctgtggtggcccgccgcctgggccgaggctcagtcagtgactgtagtgatggcacgtcagagctggaggaaccgctgggagaggatccccgcgcccgaccacccggccctccggatctgggtgccttccgagggcccccgctggcccgcctgccccatgaccctggtgtcttccgagtctatccccggcctcggggtggccctgaacccctcagccccttccctgtgtcgcctctggccggtcctggatccctgctgccccctcagctctccccggctctgcccatgacgcccacccacctggcctacactccctcgcccacgctgagcccgatgtaccccagtggtggcggggggcccagcggctcagggggaggctcccacttctccttcagccctgaggacatgaaacggtacctgcaggcccacacccaaagcgtctacaactaccacctcagcccccgcgccttcctgcactaccctgggctggtggtgccccagccccagcgccctgacaagtgcccgctgccgcccatggcacccgagaccccaccggtcccctcctcggcctcgtcatcctcttcttcttcttcctccccattcaagtttaagctccagccgcccccatgggcaggcgggtggggggatgggaagggggtgccctgaaaccaaactggaagccccctctgcctcccagctggggcctctggggtggggtggggggctgtggtcaagccttattctgtattggggactgagggtggggggagtagaggggccgctggagaatgtattcaaaacaataaaactttggacctttggatgcagtgatcaatg

SEQ ID NO: 291680 - DNA, 602 bp, Homo sapiens
gccgggacatcagtcttctcctgcctttggactctggacttacaccatcagctctactggttctcaggcctttggactcgaactggaactacaccattggctctcctgggtctccagcttggcaactgcaggtcttgggacttgtcagcctccacaatgatgtgtgtttcggcagatgagaccacaggcgctggccatgctgtacttccacctgtgccctggctgcaccatgtggcatgatgaggctgcggagggcgttttccggcagctgggtgtgaggccccgatgctggaattctacagccatgatgacccctcaacaatgctgcctggctgcaggagttgctgagtggcttgcagtaggtgaagcctgggagacctcctgacatggggcccacctgcaccagcacacccccaccccacccccagtacctcaacaccctcaaaccttcctggggaggcagggcctggtgccataccccccagcccaactctgatggggctccagccacccaatggacagggcatacagacaggatagtggaggcgttgagacctgcttgatttattccaagtatttaatacacaatgacgcaactgtga

SEQ ID NO: 291681 - DNA, 2564 bp, Homo sapiens
gaattcgggccggagccagcagtggcaacccgctggggtccctttccacactgtggaagctttgttctttcgctctttgcaataaatcttgctacttctcactctttgggtccacactgcttttaccagctgtaacactcaccgcaaacgtctgcagcttcactcctgaagccagcgagaccacgagcccaccgggaggaacgaacaactccagacgcgccgccttaagccttaagagctgtaacactcaccacgaaggtctgcagcttcactcctgagccagcgagaccacgaacccgccagaaggaagaaactccgaacacatccgaacatcagaaggaacaaactctagacgcgccaccttaagagctgtaacactcaccacaagggtccgcggcttcattcttgaagtcagtgagaccaagaacccaccaattccggacacagttggaaatgcagaagggcacttgagtttccctgcagtctcccacacggacaccttctggaggaagatgagccctaaacgcgatgggttggggacaggtgatggtctgcactcacaggttttacaggagcaggtctccacaggagacaatctccatgaatgtgactcccagggaccaagtaaagacactttggttcgtgaggggaagacctacaaatgcaaggaatgtgggagcgtgtttaacaaaaacagcctccttgttcgacatcagcagattcacactggggtgaagccttatgaatgccaggagtgtggaaaagcctttcctgaaaaggtcgacttcgttcgacacatgaggattcacacaggggagaagccctgtaagtgcgtggagtgcgggaaggtcttcaaccgcaggtcgcacctcctgtgctaccgccagattcacactggagagaagccctatgagtgcagcgagtgtggaaagaccttcagctatcactctgtcttcatccagcatcgtgtgacccacactggagaaaaactctttgggtgcaaagaatgtggaaaaaccttttactacaactcttccttaacccggcacatgaagattcacactggagagaagccctgcaagtgcagtgagtgcgggaagaccttcacctaccgctctgttttcttccgacatagtatgacccacactgcaggaaagccctacgagtgcaaagaatgtgggaaaggtttttactacagctattccctcactcgacatacaaggagtcacactggagagaaaccttatgagtgccttgaacatagaaaggactttggctaccactctgcttttgcccaacagagtaagatccactctggaggaaaaaacctttgagtgcaaatgatgtgggaatttgtgggttttctttttttttttttctttgatacatagagagccacactgaggagaagcactctgaattcagtggcagtaggaaagctgtgacctgcagctcatcctcacttggcattgaagaattccttccagagataaactctatgagatatgtgggaaggccttttgcaagtgggcccacatcagtcaacgtcagagaacttaaactgcgaaaagacattttgacaaaaactagtgaagaaaatcttttggccacaggaaatatcttcctcagcatctgagaatttttccaggagggagacctgttggttattgtgcacttaaaagaaccacccacacctctctccatagtttatatcactaagccacttcaggattttttttttttaagtaagaagggaactgtaaaagagaaaaaaagaaattcatgcatagcttctgtcagacttctctgaaagaaatgcctatcaaaatttgaattcagttcttcattttgcagatggctgaaagggacgagagaatgatggtgaagctgtgttgctttcccaggtgagccttgattatttcctctgtgctttctcagcttctttggccttctgtaagaggggcttctccaagagcatgtcactagttttctagaagttaaacaagagctaagacaaacaaaacaaaacacagcttatctaatctaatgagaaactcagaaaaaaatgttttgatgaatacaatgtattaaaatataaaacatgtagatcctttgacatgttaattcaattctagaaatcctcagaaatgtttttatattatgcagagatgtgcgtgcaaagaataatcgctgcagttttgtttttatgtgtgaaacgttgagaacaatctaaatgtttatcagttggaagtaagttatggtacatctgttctatgaaatactgtgaaacaataaggtatctctgtatgtactgatatcaaaacatctctaagatacagtatttagtaaaagagaaagtttcaggaaataaaactacatctagaagtataagcataaaactgttaatagtggttttctgcaggaaatgggatggaccagggttatatgcaatgttcagtttttacttttatacttaagtattgtttatgtttgaaaaataaaaagcatttattgtttttgcaataaatgtttaaaatatttcaataaagatagcatgttagaat

SEQ ID NO: 291682 - DNA, 458 bp, Homo sapiens
atcccagagtttcactcctgttgcccaggctggaatgcaatggcacaatctgggctcgctgcaacctccacctcctgggttccagtgattgtcctgccagcctccagagtagctgggattacaggcgtgggcaaccacagtcagcctttttactttcttgatactgttgctggatgtacaaaagtttttaaatttgatgaagtctagtttatctttttcttttgttgtccttgcttttgatgtcatacttaaaacattgccagatgcagcatcatgaagattttcccatatgttttcttctaggagttttatagctttagctcataagtttgtctttgatccactttgagttgatttttatatatgatgtaaggtaagggtttgatttcattcttttgcatatagctgtctattttttgcagactgtcctttcctctagtgaatgatccggccctttt

SEQ ID NO: 291683 - DNA, 1391 bp, Homo sapiens
  misc_feature (12)..(12): n is a, c, g, or t
  misc_feature (300)..(300): n is a, c, g, or t
atggatttaccngtgaacctaacctccttttccctctccaccccctcccctttggagaccaaccacagcctcggcaaagacgacctgcgccccagctcgcccctgctctcggtcttcggagtgcttattctcaccttgctgggctttctggtggcggcgacgttcgcctggaacctgctggtgctggcgaccatcctccgtgtacgcaccttccaccgcgtgccccacaacctggtggcatccatggccgtctcggatgtcctggtggccgcgctggtcatgccgctgagcctggtgcangagctgtccgggcgccgctggcagctaggtcggaggctgtgccagctttggatcgcgtgcgacgtgctttgctgcacggccagcatctggaacgtgacggccatagccctggaccgctactggtccatcacgcgccacatggaatacacgctccgcacccgcaagtgcgtctccaacgtcatgatcgcgctcacctgggcactctccgctgtcatctctctggccccgctgctttttggctggggagagacgtactctgagggcagcgaggagtgccaggtaagccgcgagccttcctacgccgtgttctccaccgtaggcgccttctacctgccgctctgtgtggtgctcttcgtgtactggaagatctacaaggctgccaagttccgcgtgggctccaggaagaccaatagcgtctcacccatatccgaagctgtggaggtgaaggactctgccaaacagccccagatggtgttcacggtccgccacgccaccgtcaccttccagccagaaggggacacgtggcgggagcagaaggagcagcgggccgccctcatggtgggcatcctcattggcgtgttcgtgctctgctggatccccttctttctcaccgagctcatcagtcccctctgctcctgtgacatccccgccatctggaaaagcatcttcctgtggcttggctactccaactccttctttaaccccctgatctatacggctttcaacaagaactacaacagcgccttcaagaacttcttttctaggcaacactgagggagaggaccaggattgaaaaaagtttcttcccataattcagtggaattcccagttcatccatttcccatccccacccaacagccatgtggacgggatgaatcctcaccattctccagggtcatcttcagaactgcactggcctcttttccacctcctcagtaggaatatgactcctcatagagttacggtgacatgatgtatctaacttatctactatccctttctctgtgctgacagtcatggtctttgcccgcaaagtgtcctttcctccccaaattcactctggcatggtgatcgacattgtcttaaagaag

SEQ ID NO: 291684 - DNA, 948 bp, Homo sapiens
  misc_feature (136)..(136): n is a, c, g, or t
ggtcgtaggctcttgttcgtgtctgtctttgtgcgctgtgatctatgttgcctctgtgtcaagtgttgctacacatgagcgagcaagacacgagcagtaaatacgccctctcctaccacggcataagtgggcttcnctgtgtgcagccgtatcctttgtaaacttggatcttaaagttctagtactatggtctccctcgacgccttctagtatatcccgccccccactgttccgaccactcacctgtcgaattcggccaggctcccgattcaacaccatctacaggttcagactgcaacagccaattcaagcatttccctcccgttcagaatcccttgccctaaagcagcctgaacccggattgctcacacttgcttctcgccaaatatgagagtgttggataaatgggatcatgcagcatgcaagattttgaaactgccggccagacgcgatggctcacgcctgtaatcccagcactttgggaggctgagacaggcggatcacgaggactaaaggaccacacaagaattccttacagtagaagccaggcctgggagcattacacaaagcaccccctaagaccagatgaaacagtgatggctgctgcccttgcactcaatgagatggaccaatatgtcatttgtagggccacaattgtgaggccattcattaggagaagctcaccagtttgatgcctgagaggacctccaacagagagatcaggttatggccatcccgcagatcttcataaagatcattgatgtgcttgcggacctgtgaatgagagtgaaacagacagatttttatttgatattgaattattatactatccacataaaaatctctggttctaggtaaacacaaattaaagaatttaaaagtggaagcaacaattaaataataaaattcaggaagtttcagattggaataaaatacatgtgaaatgat

SEQ ID NO: 291685 - DNA, 723 bp, Homo sapiens
atcagtattcatgtggaacattggcctgtagttttcttattttgatgtctctgtctgattttggtatcagggtaatactggcctcacagaatgaaatgctttgatgtcttaaatggtacatccaaacttaagtgaaatagagctgtgaggacattttggggagaagtgacctagataagcactgactgttgcattcatctctcttcttgctgattgtgatgatttcctgtgccatagccattcaaagtctgccaaaaagagatgggattttgccatgttgcctaggctggtctcaaactcctgagctcaagtgatctgtccaccttggccttcctgtgattacaggtgtgagccactgtgcccaccaactgaccattacatctttatggttttcttccaaaagcaatctgaagaattttgggattacagcttttattgttattaaggtatagcttatgcattaaataatttcttctttcaaaacaccacaccaagcgacacccacacacaagacacattgtgcggccgcaccgggccctcagaaaaatttcgaaaaccacttcgtggggccgacgccgccccaggggtcacggtcaatcgggcacaggcggtcccaagaagaccgcgcagcacaaggccgggatccccccaaaaaaccgcccgggagccgcgtcgcaccacacagagggtcgaggacacggtctcacaggccaaggcgataac

SEQ ID NO: 291686 - DNA, 1294 bp, Homo sapiens
agagaggcgctatgcctccctgccggcgacacgatacagcgctgcagaaccgaccccgacgcagccgccatcgctgatgccactgccagtcatgcggttccgcccctgcgttgccgcgcggggccgcgcacgcaaatacgcaggcacgcgcgggagcacgcccgggagcgcgcatgcgcagcgctgctggcccgctctctgaggagctttcaatactttggggtcaagtttgaggcagttgtaactgtactgagtttagttttgctaataatggtattctacgtgtgtcagcctcgtgtggacttctgtaatgactaatggatatgtttatatcctgagcatttgctgtaggaattttaaatgcaatcccaaaactcaagattaccttatttggagaaatattcgtgttactatgtttaaaatttaatagaaccatattttacctttcactttgggactcgcacaggatgtttgcagctcttgatatacaggaactagaacgtgtcttttaagagcatgcggttttataattacgtggaagtatgctacgcaagggaaaaaagcctcttgctagtgttaagggtcttcataaacagaaaccgcaaggaacctgggatctgacagctgttggaggaatgcctgtgaggaaggaggaggaacagaagaatgctttgatgtcttaaatggtacatccaaacttaagtgaaatagagctgtgaggacattttggggagaagtgacctagataagcactgactgttgcattcatctctcttcttgctgattgtgatgatttcctgtgccatagccattcaaagtctgccaaaaagagatgggattttgccatgttgcctaggctggtctcaaactcctgagctcaagtgatctgtccaccttggccttcctgtgattacaggtgtgagccactgtgcccaccaactgaccattacatctttatggttttcttccaaaagcaatctgaagaattttgggattacagcttttattgttattaaggtatagcttatgcattaaataatttcttctttcaaaacaccacaccaagcgacacccacacacaagacacattgtgcggccgcaccgggccctcagaaaaatttcgaaaaccacttcgtggggccgacgccgccccaggggtcacggtcaatcgggcacaggcggtcccaagaagaccgcgcagcacaaggccgggatccccccaaaaaaccgcccgggagccgcgtcgcaccacacagagggtcgaggacacggtctcacaggccaaggcgataac

SEQ ID NO: 291687 - DNA, 1880 bp, Homo sapiens
  misc_feature (1565)..(1565): n is a, c, g, or t
acaaaattactttatcaaaaacaaattagctagaaaaaaaattacatcttatgttttcttatatagataaagagaggcctgtccagtctttgaaaacatcaagagatacttcaccctcaagtggttcagcagtttcttcatcaaaggtgttagacaaacccagtaggctaactgaaaaggaacttgctgaggctgcaagcaagtgggctgctgaaaagctagagaaatcagatgaaagtaacttgcctgaaatttctgagtatgaggcgggatccacagcaccattgtttactgaccagccagaggaacctgagtcaaacacaacacatgggatagaattatttgaagatagtcagctaaccactcgctctaaagcaatagcatcaaaaaccaaagagattgaacaggtgagagtctagttgtcttcatgtacataatttttgtttgtgttgctttgcacatgtaaacatttattgaataaatatgcttcatttctttttccacctgtaactctaaaactacaacttaaaaaattataaaaattgtttgagttgacttcacagtcagtttgatcagtatggtcccccacctggattgtttatttttaaataaaaaacagacttcttttttacagaatattaatattctagttagtatgaagcaattaaaaattattaaagttaatagggatgggatggaagaaatgttcaatgtagcaaaatgttagcaaatgttatttttgaatattgggattacagatgtttcttatgttttttcattatactttaaggtagtttccaaatattaaaggaaaaataaaggatactatttaagtctagttttttagtgaagtcattctgaaaagcaggactttgtttttaatgtgcaactattatggggttattttcattttatgaggattaaatgaagtaaatgtgaaagggttttataaaatgtaacattttgtacaggtgcttattgatgttgttactctctagtgcgttgaataaatgtaattacattgataataatattctaaaacctattggaaattaagaacaaagtgaaaacttttctctaggtgctgtccgatttctacatcaattaaatccgtttccttttgttggatagggaatggtctcaaatcctagatgtgaccgtgtagcttatgttaatgtcacactaatgtgaaaagataagaaccagaataggaaatttgtcatgcaaaccattggagtttcaaaatgaaggtggtgagcagtatcagatgcttagaggaatataaggaaaatggagactgagaaaattctgtttaatttggtgattgggaggcagttggtacctttcaagataccaattaaatgagagcataagtaaaaggtttgctcagtatatctatctttaacacaaagatgaatgtctttattttatataaaattactgtccttttttttcttgacatgtttttatttccttttctccccttaccataatggatgctctgtgaaaacaagggctttgttttatcttgttttatttactgctacatctgccatcaccgagancagtatgtgtagcaggcttacaagaaatacttgtggccgggcgcggtggctcacgcctgtaatcccagcactttgggaggccgaggcgggcggatcacgaggtcaggagatcgagaccatcccggctaaaacggtgaaaccccgtctctactaaaaatacaaaaaattagccgggcgtagtggcgggcacctgtagtcccagctacttgggaggctgaggcaggagaatggcgtgaacccgggaggcggagcttgcagtgagccgagatcccgccactgcactccagcctgggcgacagagcgagactccgtctc

SEQ ID NO: 291688 - DNA, 391 bp, Homo sapiens
  misc_feature (7)..(7): n is a, c, g, or t
  misc_feature (16)..(16): n is a, c, g, or t
acaaatnaatataatnggggaaaatttttttttgtgatgcagagaaatactttatgatagttgacaacatttcagtattaaataaacatctaaaatagtctgtttaaaatgtttgattcaaatttttgtattttttgtagagatggggttcaccatgttggccaggctagtctctaactcctggcctcaagtgatctgcctgcctcagcctctcaaagtgttgagattacaggcgtgagccaccgctccctgcccaacacatataccatctgaaaatgttagaattctgagttgtgattttattgacttgttgcttgctttttcttaggctttgtaacttgtaatatgttaaagtgtactatcctaataaactgaatactttggtatctta

SEQ ID NO: 291689 - DNA, 335 bp, Homo sapiens
caattctcctgcctcagcctcccaagtagctgggactacaggtgtgtgccaccacacccggctaattgttgtatttttagtagagacagggtttcaccatgttggccaggctagtctctaactcctggcctcaagtgatctgcctgcctcagcctctcaaagtgttgagattacaggcgtgagccaccgctccctgcccaacacatataccatctgaaaatgttagaattctgagttgtgattttattgacttgttgcttgctttttcttaggctttgtaacttgtaatatgttaaagtgtactatcctaataaactgaatactttggtatctta

SEQ ID NO: 291690 - DNA, 1532 bp, Homo sapiens
tgcgcgcgccggaagtacctacctgggataacggcggcgagcggacggctgcatttacggggtctcccggagggccagagtcggaaattgttgaaaacgttaaatttgattcctaaaaggactcaatggcttacagaagagacgaaatgtggtctgagggacgatatgaatatgaaagaattccgagagaacgagcacctcctcgaagtcatcccagtgatgaatctggttatagatggacaagagacgatcattctgcaagcaggcaacctgaatacagggacatgagagatggctttagaagaaaaagtttctactcttcccattatgcgagagagcggtctccttataaaagggacaatacttttttcagagaatcacctgttggccgaaaggattctccacacagcagatctggttccagtgtcagtagcagaagctactctccagaaaggagcaaatcatactctttccatcagtctcaacatagaaagtccgtgcgtcctggtgcctcctacaaacggcagaatgaaggaaatcctgaaagagataaagagaggcctgtccagtctttgaaaacatcaagagatacttcaccctcaagtggttcagcagtttcttcatcaaaggtgttagacaaacccagtaggctaactgaaaaggaacttgctgaggctgcaagcaagtgggctgctgaaaagctagagaaatcagatgaaagtaacttgcctgaaatttctgagtatgaggcgggatccacagcaccattgtttactgaccagccagaggaacctgagtcaaacacaacacatgggatagaattatttgaagatagtcagctaaccactcgctctaaagcaatagcatcaaaaaccaaagagattgaacaggtttaccgacaagactgtgaaactttcgggatggtggtgaaaatgctgattgaaaaagatccttcattagaaaagtctatacagtttgcattgaggcagaatttacatgaaataggtgagcggtgtgttgaagaactcaagcatttcattgcagagtatgatacttccactcaagattttggagagcctttttagatttttctgctcaggctaaaaaaaaaaaaaaacagtttctaaaaattttttttcctggattgtgtaaatccttaatatatggaatttttgtgatgcagagaaatactttatgatagttgacaacatttcagtattaaataaacatctaaaatagtctgtttaaaatgtttgattcaaatttttgtattttttgtagagatggggttcaccatgttggccaggctagtctctaactcctggcctcaagtgatctgcctgcctcagcctctcaaagtgttgagattacaggcgtgagccaccgctccctgcccaacacatataccatctgaaaatgttagaattctgagttgtgattttattgacttgttgcttgctttttcttaggctttgtaacttgtaatatgttaaagtgtactatcctaataaactgaatactttggtatctta

SEQ ID NO: 291691 - DNA, 1489 bp, Homo sapiens
tgcgcgcgccggaagtacctacctgggataacggcggcgagcggacggctgcatttacggggtctcccggagggccagagtcgtggcttacagaagagacgaaatgtggtctgagggacgatatgaatatgaaagaattccgagagaacgagcacctcctcgaagtcatcccagtgatgaatctggttatagatggacaagagacgatcattctgcaagcaggcaacctgaatacagggacatgagagatggctttagaagaaaaagtttctactcttcccattatgcgagagagcggtctccttataaaagggacaatacttttttcagagaatcacctgttggccgaaaggattctccacacagcagatctggttccagtgtcagtagcagaagctactctccagaaaggagcaaatcatactctttccatcagtctcaacatagaaagtccgtgcgtcctggtgcctcctacaaacggcagaatgaaggaaatcctgaaagagataaagagaggcctgtccagtctttgaaaacatcaagagatacttcaccctcaagtggttcagcagtttcttcatcaaaggtgttagacaaacccagtaggctaactgaaaaggaacttgctgaggctgcaagcaagtgggctgctgaaaagctagagaaatcagatgaaagtaacttgcctgaaatttctgagtatgaggcgggatccacagcaccattgtttactgaccagccagaggaacctgagtcaaacacaacacatgggatagaattatttgaagatagtcagctaaccactcgctctaaagcaatagcatcaaaaaccaaagagattgaacaggtttaccgacaagactgtgaaactttcgggatggtggtgaaaatgctgattgaaaaagatccttcattagaaaagtctatacagtttgcattgaggcagaatttacatgaaataggtgagcggtgtgttgaagaactcaagcatttcattgcagagtatgatacttccactcaagattttggagagcctttttagatttttctgctcaggctaaaaaaaaaaaaaaacagtttctaaaaattttttttcctggattgtgtaaatccttaatatatggaatttttgtgatgcagagaaatactttatgatagttgacaacatttcagtattaaataaacatctaaaatagtctgtttaaaatgtttgattcaaatttttgtattttttgtagagatggggttcaccatgttggccaggctagtctctaactcctggcctcaagtgatctgcctgcctcagcctctcaaagtgttgagattacaggcgtgagccaccgctccctgcccaacacatataccatctgaaaatgttagaattctgagttgtgattttattgacttgttgcttgctttttcttaggctttgtaacttgtaatatgttaaagtgtactatcctaataaactgaatactttggtatctta

SEQ ID NO: 291692 - DNA, 1601 bp, Homo sapiens
  misc_feature (22)..(22): n is a, c, g, or t
gggctgctctagaggtccccgnacatgtcgtggcttacagaagagacgaaatgtggtctgagggacgatatgaatatgaaagaattccgagagaacgagcacctcctcgaagtcatcccagtgatggctacaatagactagttaatattgtgccaaagaaaccaccactgctagacagacctggtgaaggaagctacaatagatattacagtcatgttgattaccgagactatgacgagggccgcagtttttctcatgatcgaagaagtggtccacctcacagaggagatgaatctggttatagatggacaagagacgatcattctgcaagcaggcaacctgaatacagggacatgagagatggctttagaagaaaaagtttctactcttcccattatgcgagagagcggtctccttataaaagggacaatacttttttcagagaatcacctgttggccgaaaggattctccacacagcagatctggttccagtgtcagtagcagaagctactctccagaaaggagcaaatcatactctttccatcagtctcaacatagaaagtccgtgcgtcctggtgcctcctacaaacggcagaatgaaggaaatcctgaaagagataaagagaggcctgtccagtctttgaaaacatcaagagatacttcaccctcaagtggttcagcagtttcttcatcaaaggtgttagacaaacccagtaggctaactgaaaaggaacttgctgaggctgcaagcaagtgggctgctgaaaagctagagaaatcagatgaaagtaacttgcctgaaatttctgagtatgaggcgggatccacagcaccattgtttactgaccagccagaggaacctgagtcaaacacaacacatgggatagaattatttgaagatagtcagctaaccactcgctctaaagcaatagcatcaaaaaccaaagagattgaacaggtttaccgacaagactgtgaaactttcgggatggtggtgaaaatgctgattgaaaaagatccttcattagaaaagtctatacagtttgcattgaggcagaatttacatgaaataggtgagcggtgtgttgaagaactcaagcatttcattgcagagtatgatacttccactcaagattttggagagcctttttagatttttctgctcaggctaaaaaaaaaaaaaaacagtttctaaaaattttttttcctggattgtgtaaatccttaatatatggaatttttgtgatgcagagaaatactttatgatagttgacaacatttcagtattaaataaacatctaaaatagtctgtttaaaatgtttgattcaaatttttgtattttttgtagagatggggttcaccatgttggccaggctagtctctaactcctggcctcaagtgatctgcctgcctcagcctctcaaagtgttgagattacaggcgtgagccaccgctccctgcccaacacatataccatctgaaaatgttagaattctgagttgtgattttattgacttgttgcttgctttttcttaggctttgtaacttgtaatatgttaaagtgtactatcctaataaactgaatactttggtatctta

SEQ ID NO: 291693 - DNA, 1435 bp, Homo sapiens
tgcgcgcgccggaagtacctacctgggataacggcggcgagcggacggctgcatttacggggtctcccggagggccagagtcgtggcttacagaagagacgaaatgtggtctgagggacgatatgaatatgaaagaattccgagagaacgagcacctcctcgaagtcatcccagtgatgaatctggttatagatggacaagagacgatcattctgcaagcaggcaacctgaatacagggacatgagagatggctttagaagaaaaagtttctactcttcccattatgcgagagagcggtctccttataacagcagatctggttccagtgtcagtagcagaagctactctccagaaaggagcaaatcatactctttccatcagtctcaacatagaaagtccgtgcgtcctggtgcctcctacaaacggcagaatgaaggaaatcctgaaagagataaagagaggcctgtccagtctttgaaaacatcaagagatacttcaccctcaagtggttcagcagtttcttcatcaaaggtgttagacaaacccagtaggctaactgaaaaggaacttgctgaggctgcaagcaagtgggctgctgaaaagctagagaaatcagatgaaagtaacttgcctgaaatttctgagtatgaggcgggatccacagcaccattgtttactgaccagccagaggaacctgagtcaaacacaacacatgggatagaattatttgaagatagtcagctaaccactcgctctaaagcaatagcatcaaaaaccaaagagattgaacaggtttaccgacaagactgtgaaactttcgggatggtggtgaaaatgctgattgaaaaagatccttcattagaaaagtctatacagtttgcattgaggcagaatttacatgaaataggtgagcggtgtgttgaagaactcaagcatttcattgcagagtatgatacttccactcaagattttggagagcctttttagatttttctgctcaggctaaaaaaaaaaaaaaacagtttctaaaaattttttttcctggattgtgtaaatccttaatatatggaatttttgtgatgcagagaaatactttatgatagttgacaacatttcagtattaaataaacatctaaaatagtctgtttaaaatgtttgattcaaatttttgtattttttgtagagatggggttcaccatgttggccaggctagtctctaactcctggcctcaagtgatctgcctgcctcagcctctcaaagtgttgagattacaggcgtgagccaccgctccctgcccaacacatataccatctgaaaatgttagaattctgagttgtgattttattgacttgttgcttgctttttcttaggctttgtaacttgtaatatgttaaagtgtactatcctaataaactgaatactttggtatctta

SEQ ID NO: 291694 - DNA, 1432 bp, Homo sapiens
tgcgcgcgccggaagtacctacctgggataacggcggcgagcggacggctgcatttacggggtctcccggagggccagagtcgtggcttacagaagagacgaaatgtggtctgagggacgatatgaatatgaaagaattccgagagaacgagcacctcctcgaagtcatcccagtgatgaatctggttatagatggacaagagacgatcattctgcaagcaggcaacctgaatacagggacatgagagatggctttagaagaaaaagtttctactcttcccattatgcgagagagcggtctccttataaaagggacaatacttttttcagagaatcacctgttggccgaaaggattctccacacagcagatctggttccagtgtcagtagcagaagctactctccagaaaggagcaaatcatactctttccatcagtctcaacatagaaataaagagaggcctgtccagtctttgaaaacatcaagagatacttcaccctcaagtggttcagcagtttcttcatcaaaggtgttagacaaacccagtaggctaactgaaaaggaacttgctgaggctgcaagcaagtgggctgctgaaaagctagagaaatcagatgaaagtaacttgcctgaaatttctgagtatgaggcgggatccacagcaccattgtttactgaccagccagaggaacctgagtcaaacacaacacatgggatagaattatttgaagatagtcagctaaccactcgctctaaagcaatagcatcaaaaaccaaagagattgaacaggtttaccgacaagactgtgaaactttcgggatggtggtgaaaatgctgattgaaaaagatccttcattagaaaagtctatacagtttgcattgaggcagaatttacatgaaataggtgagcggtgtgttgaagaactcaagcatttcattgcagagtatgatacttccactcaagattttggagagcctttttagatttttctgctcaggctaaaaaaaaaaaaaaacagtttctaaaaattttttttcctggattgtgtaaatccttaatatatggaatttttgtgatgcagagaaatactttatgatagttgacaacatttcagtattaaataaacatctaaaatagtctgtttaaaatgtttgattcaaatttttgtattttttgtagagatggggttcaccatgttggccaggctagtctctaactcctggcctcaagtgatctgcctgcctcagcctctcaaagtgttgagattacaggcgtgagccaccgctccctgcccaacacatataccatctgaaaatgttagaattctgagttgtgattttattgacttgttgcttgctttttcttaggctttgtaacttgtaatatgttaaagtgtactatcctaataaactgaatactttggtatctta

SEQ ID NO: 291695 - DNA, 1640 bp, Homo sapiens
tgcgcgcgccggaagtacctacctgggataacggcggcgagcggacggctgcatttacggggtctcccggagggccagagtcggaaattgttgaaaacgttaaatttgattcctaaaaggactcaatggcttacagaagagacgaaatgtggtctgagggacgatatgaatatgaaagaattccgagagaacgagcacctcctcgaagtcatcccagtgatggctacaatagactagttaatattgtgccaaagaaaccaccactgctagacagacctggtgaaggaagctacaatagatattacagtcatgttgattaccgagactatgacgagggccgcagtttttctcatgatcgaagaagtggtccacctcacagaggagatgaatctggttatagatggacaagagacgatcattctgcaagcaggcaacctgaatacagggacatgagagatggctttagaagaaaaagtttctactcttcccattatgcgagagagcggtctccttataaaagggacaatacttttttcagagaatcacctgttggccgaaaggattctccacacagcagatctggttccagtgtcagtagcagaagctactctccagaaaggagcaaatcatactctttccatcagtctcaacatagaaataaagagaggcctgtccagtctttgaaaacatcaagagatacttcaccctcaagtggttcagcagtttcttcatcaaaggtgttagacaaacccagtaggctaactgaaaaggaacttgctgaggctgcaagcaagtgggctgctgaaaagctagagaaatcagatgaaagtaacttgcctgaaatttctgagtatgaggcgggatccacagcaccattgtttactgaccagccagaggaacctgagtcaaacacaacacatgggatagaattatttgaagatagtcagctaaccactcgctctaaagcaatagcatcaaaaaccaaagagattgaacaggtttaccgacaagactgtgaaactttcgggatggtggtgaaaatgctgattgaaaaagatccttcattagaaaagtctatacagtttgcattgaggcagaatttacatgaaataggtgagcggtgtgttgaagaactcaagcatttcattgcagagtatgatacttccactcaagattttggagagcctttttagatttttctgctcaggctaaaaaaaaaaaaaaacagtttctaaaaattttttttcctggattgtgtaaatccttaatatatggaatttttgtgatgcagagaaatactttatgatagttgacaacatttcagtattaaataaacatctaaaatagtctgtttaaaatgtttgattcaaatttttgtattttttgtagagatggggttcaccatgttggccaggctagtctctaactcctggcctcaagtgatctgcctgcctcagcctctcaaagtgttgagattacaggcgtgagccaccgctccctgcccaacacatataccatctgaaaatgttagaattctgagttgtgattttattgacttgttgcttgctttttcttaggctttgtaacttgtaatatgttaaagtgtactatcctaataaactgaatactttggtatctta

SEQ ID NO: 291696 - DNA, 3417 bp, Homo sapiens
tgcgcgcgccggaagtacctacctgggataacggcggcgagcggacggctgcatttacggggtctcccggagggccagagtcgtggcttacagaagagacgaaatgtggtctgagggacgatatgaatatgaaagaattccgagagaacgagcacctcctcgaagtcatcccagtgatgaatctggttatagatggacaagagacgatcattctgcaagcaggcaacctgaatacagggacatgagagatggctttagaagaaaaagtttctactcttcccattatgcgagagagcggtctccttataaaagggacaatacttttttcagagaatcacctgttggccgaaaggattctccacacagcagatctggttccagtgtcagtagcagaagctactctccagaaaggagcaaatcatactctttccatcagtctcaacatagaaagtccgtgcgtcctggtgcctcctacaaacggcagaatgaaggaaatcctgaaagagataaagagaggcctgtccagtctttgaaaacatcaagagatacttcaccctcaagtggttcagcagtttcttcatcaaaggtgttagacaaacccagtaggctaactgaaaaggaacttgctgaggctgcaagcaagtgggctgctgaaaagctagagaaatcagatgaaagtaacttgcctgaaatttctgagtatgaggcgggatccacagcaccattgtttactgaccagccagaggaacctgagtcaaacacaacacatgggatagaattatttgaagatagtcagctaaccactcgctctaaagcaatagcatcaaaaaccaaagagattgaacaggtttaccgacaagactgtgaaactttcgggatggtggtgaaaatgctgattgaaaaagatccttcattagaaaagtctatacagtttgcattgaggcagaatttacatgaaatagagtctgcaggacagacttggcagcaggtaccccctgtgaggaacactgaaatggatcacgacggaacccccgaaaacgaaggcgaagagactgcgcagtcagccctctttggattccagcacgacgcatcaaaccataccatagtggggctaggacccaacccagtaccagaaatgaaggaaacgaccctgcaggccccgcagcccccgcaggccccgcagcccctgcagccccggaagaaacgggttcgtcggacgacacagcttcgtcggacgacaggagccccagacattacctgggggatgctgaagaagacaactcaggaggctgagaggatcctgctccgaacacagacaccattcactccagaaaatttgttccttgctatgctctctgttgtacattgcaactcacgcaaggatgtaaagccagaaaacaagcagtaactgctatgcctgacaaaactgttgctgcacacatctgtactcgtcaatcaacaaaacctgatgcaaaaaacagaaaaggggtgatgtaggagatggtcaggttggtaggagaagctataaggaaagacgcaattggaaggtcgggaggttttccaaagcttcaggagagaataaagctgaaggcagctttattaattaattctcttaccctgaggctgagggcgaacagtaggtagcaagggagtgtaaaggaatttatctagataagtttgtttacttatgccctccggaaatcatgcaagactgctccctgcaaaggggggcgacaatgttcattactcacaaattgtgttggcttcaggcctttggtattctgtctctactgaataaatacaaatggttccagcctatcaggactgcactctcttctcggctgcactaaagctggcactcccccagccgttctcatgcaaaatacctgtgtcagaatactcctttcatccatcactcagccagagtcttcaggacagactcggcatgggacttgtccaaaaaaattctaatcaaaagaggaaaattttggaatatgccaggaatagtggaattttattttttaaatttttttataggcccatatgctctatctcaagaaacaagatgattgtaacatgtccatgattaaactattggcagattattgctgtgttaatctctgtagtctaatgagttctttgttctgttctgctgccttttacgttttcttgtcctttcaaaagtgttcttgaaagaaacaaagcgaataggcagttagcacagcacagctaccccttaccaagcagtctatggaaacaacccctcatccaaatcatgggttagttaagaatctaactggggcaattaagatgaattccactcacttcctggtcacttcagcagcccagcggcattgagccaaaatatacaattctgtgttattagtgaggaaactttaaaactcatgtttgttattacttactacccaatttcattatcctcccttcctctttccatttctattctctctcacttgaattctggcattatttttagtggcctctactgataatacctaccctagagtacataaaaattatattaaaagaggaagtagcagtatgcataattttaacagattctataatgggtgcctcaaaatatgtattgtgccattccgcaaatttaaaagctaattgaggacaatttttttttaatttcctaaatgagaccaccttggatttttatttttgccatttagatgtttatacttatttagcttttataaaacataagccaagtaatcccacataacaactctggtattcttccctcatatgagcagtgattttatttgttacccaccttagatagactaagaaagttctagtcttgtttctccttctccccgcttccctgggggtttttccttaccataagtattctggtccgagggttcagttcctttagtcaagatgtcacaagtttaaaaacaaaacttgagaaactaccaaaggctcaggagttgtccactttgttgaaatccattaaattagagaagtctcactaacagatgtatttaaatataggtacaacaaataatttctttttctccccttccccaaattacagtcagcatttaaagctgtttatggcttgccatcagcattattctggtaggcttgttagtgttaaaatctatttgattttttttttttttttttgcctcttaaagtctaattttaggatggatgaattcagatgtttaccagagtgtgtattttacataatgttcttgattaaaaagacttgtttgtaaattatccgttgtttttgcatatgcccagttgatgtgataaaattttcattgtcttgccatataaagccttggttatcaacaggtggaatgtagatattgtaaagctttttgtgaattaaaagtgcaaaataaagcaaccacatttaaaaaaaaaaaa

SEQ ID NO: 291697 - DNA, 1220 bp, Homo sapiens
tgcgcgcgccggaagtacctacctgggataacggcggcgagcggacggctgcatttacggggtctcccggagggccagagtcgtggcttacagaagagacgaaatgtggtctgagggacgatatgaatatgaaagaattccgagagaacgagcacctcctcgaagtcatcccagtgatgaatctggttatagatggacaagagacgatcattctgcaagcaggcaacctgaatacagataaagagaggcctgtccagtctttgaaaacatcaagagatacttcaccctcaagtggttcagcagtttcttcatcaaaggtgttagacaaacccagtaggctaactgaaaaggaacttgctgaggctgcaagcaagtgggctgctgaaaagctagagaaatcagatgaaagtaacttgcctgaaatttctgagtatgaggcgggatccacagcaccattgtttactgaccagccagaggaacctgagtcaaacacaacacatgggatagaattatttgaagatagtcagctaaccactcgctctaaagcaatagcatcaaaaaccaaagagattgaacaggtttaccgacaagactgtgaaactttcgggatggtggtgaaaatgctgattgaaaaagatccttcattagaaaagtctatacagtttgcattgaggcagaatttacatgaaataggtgagcggtgtgttgaagaactcaagcatttcattgcagagtatgatacttccactcaagattttggagagcctttttagatttttctgctcaggctaaaaaaaaaaaaaaacagtttctaaaaattttttttcctggattgtgtaaatccttaatatatggaatttttgtgatgcagagaaatactttatgatagttgacaacatttcagtattaaataaacatctaaaatagtctgtttaaaatgtttgattcaaatttttgtattttttgtagagatggggttcaccatgttggccaggctagtctctaactcctggcctcaagtgatctgcctgcctcagcctctcaaagtgttgagattacaggcgtgagccaccgctccctgcccaacacatataccatctgaaaatgttagaattctgagttgtgattttattgacttgttgcttgctttttcttaggctttgtaacttgtaatatgttaaagtgtactatcctaataaactgaatactttggtatctta

SEQ ID NO: 291698 - DNA, 2780 bp, Homo sapiens
tgcgcgcgccggaagtacctacctgggataacggcggcgagcggacggctgcatttacggggtctcccggagggccagagtcgtggcttacagaagagacgaaatgtggtctgagggacgatatgaatatgaaagaattccgagagaacgagcacctcctcgaagtcatcccagtgatgaatctggttatagatggacaagagacgatcattctgcaagcaggcaacctgaatacagggacatgagagatggctttagaagaaaaagtttctactcttcccattatgcgagagagcggtctccttataaaagggacaatacttttttcagagaatcacctgttggccgaaaggattctccacacagcagatctggttccagtgtcagtagcagaagctactctccagaaaggagcaaatcatactctttccatcagtctcaacatagaaagtccgtgcgtcctggtgcctcctacaaacggcagaatgaaggaaatcctgaaagagataaagagaggcctgtccagtctttgaaaacatcaagagatacttcaccctcaagtggttcagcagtttcttcatcaaaggtgttagacaaacccagtaggctaactgaaaaggaacttgctgaggctgcaagcaagtgggctgctgaaaagctagagaaatcagatgaaagtaacttgcctgaaatttctgagtatgaggcgggatccacagcaccattgtttactgaccagccagaggaacctgagtcaaacacaacacatgggatagaattatttgaagatagtcagctaaccactcgctctaaagcaatagcatcaaaaaccaaagagattgaacaggtttaccgacaagactgtgaaactttcgggatggtggtgaaaatgctgattgaaaaagatccttcattagaaaagtctatacagtttgcattgaggcagaatttacatgaaatagagtctgcaggacagacttggcagcaggtaccccctgtgaggaacactgaaatggatcacgacggaacccccgaaaacgaaggcgaagagactgcgcagtcagccctctttggattccagcacgacgcatcaaaccataccatagtggggctaggacccaacccagtaccagaaatgaaggaaacgaccctgcaggccccgcagcccccgcaggccccgcagcccctgcagccccggaagaaacgggttcgtcggacgacacagcttcgtcggacgacaggagccccagacattacctgggggatgctgaagaagacaactcaggaggctgagaggatcctgctccgaacacagacaccattcactccagaaaatttgttccttgctatgctctctgttgtacattgcaactcacgcaaggatgtaaagccagaaaacaagcagtaactgctatgcctgacaaaactgttgctgcacacatctgtactcgtcaatcaacaaaacctgatgcaaaaaacagaaaaggggtgatgtaggagatggtcaggttggtaggagaagctataaggaaagacgcaattggaaggtcgggaggttttccaaagcttcaggagagaataaagctgaaggcagctttattaattaattctcttaccctgaggctgagggcgaacagtaggtagcaagggagtgtaaaggaatttatctagataagtttgtttacttatgccctccggaaatcatgcaagactgctccctgcaaaggggggcgacaatgttcattactcacaaattgtgttggcttcaggcctttggtattctgtctctactgaataaatacaaatggttccagcctatcaggactgcactctcttctcggctgcactaaagctggcactcccccagccgttctcatgcaaaatacctgtgtcagaatactcctttcatccatcactcagccagagtcttcaggacagactcggcatgggacttgtccaaaaaaattctaatcaaaagaggaaaattttggaatatgccaggaatagtggaattttattttttaaatttttttataggcccatatgctctatctcaagaaacaagatgattgtaacatgtccatgattaaactattggcagattattgctgtgttaatctctgtagtctaatgagttctttgttctgttctgctgccttttacgttttcttgtcctttcaaaagtgttcttgaaagaaacaaagcgaataggcagttagcacagcacagctaccccttaccaagcagtctatggaaacaacccctcatccaaatcatgggttagttaagaatctaactggggcaattaagatgaattccactcacttcctggtcacttcagcagcccagcggcattgagccaaaatatacaattctgtgttattagtgaggaaactttaaaactcatgtttgttattacttactacccaatttcattatcctcccttcctctttccatttctattctctctcacttgaattctggcattatttttagtggcctctactgataatacctaccctagagtacataaaaattatattaaaagaggaagtagcagtatgcataattttaacagattctataatgggtgcctcaaaatatgtattgtgccattccgcaaatttaaaagctaattgaggacaatttttttttaatttcctaaatgagaccaccttggatttttatttttgccatttagatgtttatacttatttagcttttataaaacataacgcgagtcaatgtgcagtcgtttatcctctagaagcagctatga

SEQ ID NO: 291699 - DNA, 1056 bp, Homo sapiens
tgcgcgcgccggaagtacctacctgggataacggcggcgagcggacggctgcatttacggggtctcccggagggccagagtcgtggcttacagaagagacgaaatgtggtctgagggacgatatgaatatgaaagaattccgagagaacgagcacctcctcgaagtcatcccagtgatgaatctggttatagatggacaagagacgatcattctgcaagcaggcaacctgaatacagggacatgagagatggctttagaagaaaaagtttctactcttcccattatgcgagagagcggtctccttataaaagggacaatacttttttcagagaatcacctgttggccgaaaggattctccacacagcagatctggttccagtgtcagtagcagaagctactctccagaaaggagcaaatcatactctttccatcagtctcaacatagaaagtccgtgcgtcctggtgcctcctacaaacggcagaatgaaggaaatcctgaaagagataaagagaggcctgtccagtctttgaaaacatcaagagatacttcaccctcaagtggttcagcagtttcttcatcaaaggtgttagacaaacccagtaggctaactgaaaaggaacttgctgaggctgcaagcaagtgggctgctgaaaagctagagaaatcagatgaaagtaacttgcctgaaatttctgagtatgaggcgggatccacagcaccattgtttactgaccagccagaggaacctgagtcaaacacaacacatgggatagaattatttgaagatagtcagctaaccactcgctctaaagcaatagcatcaaaaaccaaagagattgaacaggtttaccgacaagactgtgaaactttcgggatggtggtgaaaatgctgattgaaaaagatccttcattagaaaagtctatacagtttgcattgaggcagaatttacatgaaataggtgagcggtgtgttgaagaactcaagcatttcattgcagagtatgatacttccactcaagattttgggcgacatgttcgggggatcctctaggg

SEQ ID NO: 291700 - DNA, 988 bp, Homo sapiens
  misc_feature (39)..(39): n is a, c, g, or t
  misc_feature (48)..(48): n is a, c, g, or t
  misc_feature (72)..(72): n is a, c, g, or t
gagaggaacctgaagggtaagggagcctgtccgtcgaancctcagggntcttccccctcagtggttcagcantttcttcatcaaggtgttagacaaacccagtaggctaactgaaaaggaacttgctgaggctgcaagcaagtgggctgctgaaaagctagagaaatcagatgaaagtaacttgcctgaaatttctgagtatgaggcgggatccacagcaccattgtttactgaccagccagaggaacctgagtcaaacacaacacatgggatagaattatttgaagatagtcagctaaccactcgctctaaagcaatagcatcaaaaaccaaagagattgaacaggtttaccgacaagactgtgaaactttcgggatggtggtgaaaatgctgattgaaaaagatccttcattagaaaagtctatacagtttgcattgaggcagaatttacatgaaataggtgagcggtgtgttgaagaactcaagcatttcattgcagagtatgatacttccactcaagattttggagagcctttttagatttttctgctcaggctaaaaaaaaaaaaaaacagtttctaaaaattttttttcctggattgtgtaaatccttaatatatggaatttttgtgatgcagagaaatactttatgatagttgacaacatttcagtattaaataaacatctaaaatagtctgtttaaaatgtttgattcaaatttttgtattttttgtagagatggggttcaccatgttggccaggctagtctctaactcctggcctcaagtgatctgcctgcctcagcctctcaaagtgttgagattacaggcgtgagccaccgctccctgcccaacacatataccatctgaaaatgttagaattctgagttgtgattttattgacttgttgcttgctttttcttaggctttgtaacttgtaatatgttaaagtgtactatcctaataaactgaatactttggtatctta

SEQ ID NO: 291701 - DNA, 1435 bp, Homo sapiens
tgcgcgcgccggaagtacctacctgggataacggcggcgagcggacggctgcatttacggggtctcccggagggccagagtcgtggcttacagaagagacgaaatgtggtctgagggacgatatgaatatgaaagaattccgagagaacgagcacctcctcgaagtcatcccagtgatgaatctggttatagatggacaagagacgatcattctgcaagcaggcaacctgaatacagggacatgagagatggctttagaagaaaaagtttctactcttcccattatgcgagagagcggtctccttataaaagggacaatacttttttcagagaatcacctgttggccgaaaggattctccacacagcagatctggttccagtgtcagtagcagaagctactctccagaaaggagcaaatcatactctttccatcagtctcaacatagaaagtccgtgcgtcctggtgcctcctacaaacggcagaatgaaggaaatcctgaaagagataaagagaggcctgtccagtctttgaaaacatcaagagatacttcaccctcaagtggttcagcagtttcttcatcaaaggtgttagacaaacccagtaggctaactgaaaaggaacttgctgaggctgcaagcaagtgggctgctgcgggatccacagcaccattgtttactgaccagccagaggaacctgagtcaaacacaacacatgggatagaattatttgaagatagtcagctaaccactcgctctaaagcaatagcatcaaaaaccaaagagattgaacaggtttaccgacaagactgtgaaactttcgggatggtggtgaaaatgctgattgaaaaagatccttcattagaaaagtctatacagtttgcattgaggcagaatttacatgaaataggtgagcggtgtgttgaagaactcaagcatttcattgcagagtatgatacttccactcaagattttggagagcctttttagatttttctgctcaggctaaaaaaaaaaaaaaacagtttctaaaaattttttttcctggattgtgtaaatccttaatatatggaatttttgtgatgcagagaaatactttatgatagttgacaacatttcagtattaaataaacatctaaaatagtctgtttaaaatgtttgattcaaatttttgtattttttgtagagatggggttcaccatgttggccaggctagtctctaactcctggcctcaagtgatctgcctgcctcagcctctcaaagtgttgagattacaggcgtgagccaccgctccctgcccaacacatataccatctgaaaatgttagaattctgagttgtgattttattgacttgttgcttgctttttcttaggctttgtaacttgtaatatgttaaagtgtactatcctaataaactgaatactttggtatctta

SEQ ID NO: 291702 - DNA, 973 bp, Homo sapiens
tgcgcgcgccggaagtacctacctgggataacggcggcgagcggacggctgcatttacggggtctcccggagggccagagtcgtggcttacagaagagacgaaatgtggtctgagggacgatatgaatatgaaagaattccgagagaacgagcacctcctcgaagtcatcccagtgatgaatctggttatagatggacaagagacgatcattctgcaagcaggcaacctgaatacagggacatgagagatggctttagaagaaaaagtttctactcttcccattatgcgagagagcggtctccttataaaagggacaatacttttttcagagaatcacctgttggccgaaaggattctccacacagcagatctggttccagtgtcagtagcagaagctactctccagaaaggagcaaatcatactctttccatcagtctcaacatagaaagtccgtgcgtcctggtgcctcctacaaacggcagaatgaaggaaatcctgaaagagataaagagaggcctgtccagtctttgaaaacatcaagagatacttcaccctcaagtggttcagcagtttcttcatcaaaggtgttagacaaacccagtaggctaactgaaaaggaacttgctgaggctgcaagcaagtgggctgctgaaaagctagagaaatcagatgaaagtaacttgcctgaaatttctgagtatgaggcgggatccacagcaccattgtttactgaccagccagaggaacctgagtcaaacacaacacatgggatagaattatttgaagatagtcagctaaccactcgctctaaagcaatagcatcaaaaaccaaagagattgaacaggacattagagatggcgtttagaagaaaaagtttctactcttcccattatgcgagagagcgtctccttataaaagggacaatactttttcagagatcacctgtgccgaaagattccatagcgggccg

SEQ ID NO: 291703 - DNA, 1005 bp, Homo sapiens
tccaacaaataaatgaacaaagtcattgatatgtcttccctagcctttgttcttattctcatctctagtctgatgtcctttgagtagactgccttacactgacaaatgccatgccaaacttctatattcagtaatgtagtttgttaatgttttccttctcattcaggtattgtcagcagatctcatggatagaggtttaaatggcctctggtaatagtgacaatgcaagggcgagaaaggttccgctttcttttttgtgtctctcttttagatgtcagcatcataattctgccaactcagttagctaagtatttggctagttattttcattctcagctaaccagaatgtgttttaccttttaggtttaccgacaagactgtgaaactttcgggatggtggtgaaaatgctgattgaaaaagatccttcattagaaaagtctatacagtttgcattgaggcagaatttacatgaaataggtgagcggtgtgttgaagaactcaagcatttcattgcagagtatgatacttccactcaagattttggagagcctttttagatttttctgctcaggctaaaaaaaaaaaaaaacagtttctaaaaattttttttcctggattgtgtaaatccttaatatatggaatttttgtgatgcagagaaatactttatgatagttgacaacatttcagtattaaataaacatctaaaatagtctgtttaaaatgtttgattcaaatttttgtattttttgtagagatggggttcaccatgttggccaggctagtctctaactcctggcctcaagtgatctgcctgcctcagcctctcaaagtgttgagattacaggcgtgagccaccgctccctgcccaacacatataccatctgaaaatgttagaattctgagttgtgattttattgacttgttgcttgctttttcttaggctttgtaacttgtaatatgttaaagtgtactatcctaataaactgaatactttggtatctta

SEQ ID NO: 291704 - DNA, 817 bp, Homo sapiens
tgcgcgcgccggaagtacctacctgggataacggcggcgagcggacggctgcatttacggggtctcccggagggccagagtcgtggcttacagaagagacgaaatgtggtctgagggacgatatgaatatgaaagaattccgagagaacgagcacctcctcgaagtcatcccagtgtttaccgacaagactgtgaaactttcgggatggtggtgaaaatgctgattgaaaaagatccttcattagaaaagtctatacagtttgcattgaggcagaatttacatgaaataggtgagcggtgtgttgaagaactcaagcatttcattgcagagtatgatacttccactcaagattttggagagcctttttagatttttctgctcaggctaaaaaaaaaaaaaaacagtttctaaaaattttttttcctggattgtgtaaatccttaatatatggaatttttgtgatgcagagaaatactttatgatagttgacaacatttcagtattaaataaacatctaaaatagtctgtttaaaatgtttgattcaaatttttgtattttttgtagagatggggttcaccatgttggccaggctagtctctaactcctggcctcaagtgatctgcctgcctcagcctctcaaagtgttgagattacaggcgtgagccaccgctccctgcccaacacatataccatctgaaaatgttagaattctgagttgtgattttattgacttgttgcttgctttttcttaggctttgtaacttgtaatatgttaaagtgtactatcctaataaactgaatactttggtatctta

SEQ ID NO: 291705 - DNA, 1813 bp, Homo sapiens
acccctttggataggcacttgagaacccctcacggggtagcaagggagtgtaaaggaatttatctagataagtttgtttacttatgccctccggaaatcatgcaagactgctccctgcaaaggggggcgacaatgttcattactcacaaattgtgttggcttcaggcctttggtattctgtctctactgaataaatacaaatggttccagcctatcaggactgcactctcttctcggctgcactaaagctggcactcccccagccgttctcatgcaaaatacctgtgtcagaatactcctttcatccatcactcagccagagtcttcaggacagactcggcatgggacttgtccaaaaaaattctaatcaaaagaggaaaattttggaatatgccaggaatagtggaattttattttttaaatttttttataggcccatatgctctatctcaagaaacaagatgattgtaacatgtccatgattaaactattggcagattattgctgtgttaatctctgtagtctaatgagttctttgttctgttctgctgccttttacgttttcttgtcctttcaaaagtgttcttgaaagaaacaaagcgaataggcagttagcacagcacagctaccccttaccaagcagtctatggaaacaacccctcatccaaatcatgggttagttaagaatctaactggggcaattaagatgaattccactcacttcctggtcacttcagcagcccagcggcattgagccaaaatatacaattctgtgttattagtgaggaaactttaaaactcatgtttgttattacttactacccaatttcattatcctcccttcctctttccatttctattctctctcacttgaattctggcattatttttagtggcctctactgataatacctaccctagagtacataaaaattatattaaaagaggaagtagcagtatgcataattttaacagattctataatgggtgcctcaaaatatgtattgtgccattccgcaaatttaaaagctaattgaggacaatttttttttaatttcctaaatgagaccaccttggatttttatttttgccatttagatgtttatacttatttagcttttataaaacataagccaagtaatcccacataacaactctggtattcttccctcatatgagcagtgattttatttgttacccaccttagatagactaagaaagttctagtcttgtttctccttctccccgcttccctgggggtttttccttaccataagtattctggtccgagggttcagttcctttagtcaagatgtcacaagtttaaaaacaaaacttgagaaactaccaaaggctcaggagttgtccactttgttgaaatccattaaattagagaagtctcactaacagatgtatttaaatataggtacaacaaataatttctttttctccccttccccaaattacagtcagcatttaaagctgtttatggcttgccatcagcattattctggtaggcttgttagtgttaaaatctatttgattttttttttttttttttgcctcttaaagtctaattttaggatggatgaattcagatgtttaccagagtgtgtattttacataatgttcttgattaaaaagacttgtttgtaaattatccgttgtttttgcatatgcccagttgatgtgataaaattttcattgtcttgccatataaagccttggttatcaacaggtggaatgtagatattgtaaagctttttgtgaattaaaagtgcaaaataaagcaaccacatttaaaaaaaaaaaa

SEQ ID NO: 291706 - DNA, 507 bp, Homo sapiens
tgcgcgcgccggaagtacctacctgggataacggcggcgagcggacggctgcatttacggggtctcccggagggccagagtcgtggcttacagaagagacgaaatgtggtctgagggacgatatgaatatgaaagaattccgagagaacgagcacctcctcgaagtcatcccagtgatggctacaatagactagttaatattgtgccaaagaaaccaccactgctagacagacctggtgaaggaagctacaatagatattacagtcatgttgattaccgagactatgacgagggccgcagtttttctcatgatcgaagaagtggtccacctcacagaggagatgaatctggttatagatggacaagagacgatcattctgcaagcaggcaacctgaatacagtagagatggggtttcgccgtgttagccaggatggtctccatctcctgacctcgtgatctgcccgtctcggcctcccaaagtgctgggattacaggcgtgagtcac

SEQ ID NO: 291707 - DNA, 337 bp, Homo sapiens
  misc_feature (22)..(22): n is a, c, g, or t
gggctgctctagaggtccccgnacatgtcgtggcttacagaagagacgaaatgtggtctgagggacgatatgaatatgaaagaattccgagagaacgagcacctcctcgaagtcatcccagtgatggctacaatagactagttaatattgtgccaaagaaaccccgtctctactaaaaatacaacaaattagccaggcgtggtggcgcatgcctgtaatcccagctactcgggaggctgaggtgagagaatggcatgaacccaggaggcggagcttgcagtgagctgagatggtgccactgcactccagcctgggcgacagagcgagactccatctc

SEQ ID NO: 291708 - DNA, 376 bp, Homo sapiens
tgattggttttcgcattgctgcatgtcattttgaacacctggctttcttcgttgaacaacttgatttcctttaatccatgtgaagaccttagtattagttatatttatgttatttcattaacgcttttgtttatacatttagctcattcgattaagggtaagaactcctgtgctttttaaaaacctttccaaaaccaaatagagaaattagtcatttgtatatatttctttttgtctgttttaggatggctacaatagactagttaatattgtgccaaagaaaccaccactgctagacagacctggtgaaggaagctacaatagatattacagtcatgttgattaccgagactatgacgagggccgcagtttttct

SEQ ID NO: 291709 - DNA, 440 bp, Homo sapiens
tttttaaagaaaatctcaaaattgtttggaagaaacattctttcttttggtcactttcattttttttttttctcttaagatctctggaaaatatttgtgttggaaagtaatcatttactccttccttaccttttctgttacttcctagtataaaatccataattcttttttttttctttagtggcttacagaagagacgaaatgtggtctgagggacgatatgaatatgaaagaattccgagagaacgagcacctcctcgaagtcatcccagtgtaagttactcctacatattgaatgattcaaaaacctggtgtctgaattaatttgatacaccaaagctaggcctattaacaaaatcttcaagtgtcagaaatttaccagtgtagtttacaaaagagatcaagcttatcttttaaaagttaaaagttcaaaaataaaa

SEQ ID NO: 291710 - DNA, 1567 bp, Homo sapiens
tgcgcgcgccggaagtacctacctgggataacggcggcgagcggacggctgcatttacggggtctcccggagggccagagtcggaaattgttgaaaacgttaaatttgattcctaaaaggactcaatggcttacagaagagacgaaatgtggtctgagggacgatatgaatatgaaagaattccgagagaacgagcacctcctcgaagtcatcccagtgatgaatctggttatagatggacaagagacgatcattctgcaagcaggcaacctgaatacagggacatgagagatggctttagaagaaaaagtttctactcttcccattatgcgagagagcggtctccttataaaagggacaatacttttttcagagaatcacctgttggccgaaaggattctccacacagcagatctggttccagtgtcagtagcagaagctactctccagaaaggagcaaatcatactctttccatcagtctcaacatagaaagtccgtgcgtcctggtgcctcctacaaacggcagaatgaaggaaatcctgaaagagataaagagaggcctgtccagtctttgaaaacatcaagagatacttcaccctcaagtggttcagcagtttcttcatcaaaggtgttagacaaacccagtaggctaactgaaaaggaacttgctgaggctgcaagcaagtgggctgctgaaaagctagagaaatcagatgaaagtaacttgcctgaaatttctgagtatgaggcgggatccacagcaccattgtttactgaccagccagaggaacctgagtcaaacacaacacatgggatagaattatttgaagatagtcagctaaccactcgctctaaagcaatagcatcaaaaaccaaagagattgaacaggtttaccgacaagactgtgaaactttcgggatggtggtgaaaatgctgattgaaaaagatccttcattagaaaagtctatacagtttgcattgaggcagaatttacatgaaataggtgagcggtgtgttgaagaactcaagcatttcattgcagagtatgatacttccactcaagattttggagagcctttttagatttttctgctcaggctaaaaaaaaaaaaaaacagtttctaaaaattttttttcctggattgtgtaaatccttaatatatggaatttttgtgatgcagagaaatactttatgatagttgacaacatttcagtattaaataaacatctaaaatagtctgtttaaaatgtttgattcaaatttttgtattttttgtagagatggggttcaccatgttggccaggctagtctctaactcctggcctcaagtgatctgcctgcctcagcctctcaaagtgttgagattacaggcgtgagccaccgctccctgcccaacacatataccatctgaaaatgttagaattctgagttgtgattttattgacttgttgcttgctttttcttaggctttgtaacttgtaatatgttaaagtgtactatcctaataaactgaatactttggtatcttaaaaaaagggcctcttggcgccaataaatcttagct

SEQ ID NO: 291711 - DNA, 1654 bp, Homo sapiens
tgcgcgcgccggaagtacctacctgggataacggcggcgagcggacggctgcatttacggggtctcccggagggccagagtcgtggcttacagaagagacgaaatgtggtctgagggacgatatgaatatgaaagaattccgagagaacgagcacctcctcgaagtcatcccagtgatggctacaatagactagttaatattgtgccaaagaaaccaccactgctagacagacctggtgaaggaagctacaatagatattacagtcatgttgattaccgagactatgacgagggccgcagtttttctcatgatcgaagaagtggtccacctcacagaggagatgaatctggttatagatggacaagagacgatcattctgcaagcaggcaacctgaatacagggacatgagagatggctttagaagaaaaagtttctactcttcccattatgcgagagagcggtctccttataaaagggacaatacttttttcagagaatcacctgttggccgaaaggattctccacacagcagatctggttccagtgtcagtagcagaagctactctccagaaaggagcaaatcatactctttccatcagtctcaacatagaaagtccgtgcgtcctggtgcctcctacaaacggcagaatgaaggaaatcctgaaagagataaagagaggcctgtccagtctttgaaaacatcaagagatacttcaccctcaagtggttcagcagtttcttcatcaaaggtgttagacaaacccagtaggctaactgaaaaggaacttgctgaggctgcaagcaagtgggctgctgaaaagctagagaaatcagatgaaagtaacttgcctgaaatttctgagtatgaggcgggatccacagcaccattgtttactgaccagccagaggaacctgagtcaaacacaacacatgggatagaattatttgaagatagtcagctaaccactcgctctaaagcaatagcatcaaaaaccaaagagattgaacaggtttaccgacaagactgtgaaactttcgggatggtggtgaaaatgctgattgaaaaagatccttcattagaaaagtctatacagtttgcattgaggcagaatttacatgaaataggtgagcggtgtgttgaagaactcaagcatttcattgcagagtatgatacttccactcaagattttggagagcctttttagatttttctgctcaggctaaaaaaaaaaaaaaacagtttctaaaaattttttttcctggattgtgtaaatccttaatatatggaatttttgtgatgcagagaaatactttatgatagttgacaacatttcagtattaaataaacatctaaaatagtctgtttaaaatgtttgattcaaatttttgtattttttgtagagatggggttcaccatgttggccaggctagtctctaactcctggcctcaagtgatctgcctgcctcagcctctcaaagtgttgagattacaggcgtgagccaccgctccctgcccaacacatataccatctgaaaatgttagaattctgagttgtgattttattgacttgttgcttgctttttcttaggctttgtaacttgtaatatgttaaagtgtactatcctaataaactgaatactttggtatctta

SEQ ID NO: 291712 - DNA, 1580 bp, Homo sapiens
ccttagctctctgggtcgataccagtttttatgtttttgacacactgtcaccaaaagacgttggaatgactcagaaacaccaatatttcattcaagaatcagatggctacaatagactagttaatattgtgccaaagaaaccaccactgctagacagacctggtgaaggaagctacaatagatattacagtcatgttgattaccgagactatgacgagggccgcagtttttctcatgatcgaagaagtggtccacctcacagaggagatgaatctggttatagatggacaagagacgatcattctgcaagcaggcaacctgaatacagggacatgagagatggctttagaagaaaaagtttctactcttcccattatgcgagagagcggtctccttataaaagggacaatacttttttcagagaatcacctgttggccgaaaggattctccacacagcagatctggttccagtgtcagtagcagaagctactctccagaaaggagcaaatcatactctttccatcagtctcaacatagaaagtccgtgcgtcctggtgcctcctacaaacggcagaatgaaggaaatcctgaaagagataaagagaggcctgtccagtctttgaaaacatcaagagatacttcaccctcaagtggttcagcagtttcttcatcaaaggtgttagacaaacccagtaggctaactgaaaaggaacttgctgaggctgcaagcaagtgggctgctgaaaagctagagaaatcagatgaaagtaacttgcctgaaatttctgagtatgaggcgggatccacagcaccattgtttactgaccagccagaggaacctgagtcaaacacaacacatgggatagaattatttgaagatagtcagctaaccactcgctctaaagcaatagcatcaaaaaccaaagagattgaacaggtttaccgacaagactgtgaaactttcgggatggtggtgaaaatgctgattgaaaaagatccttcattagaaaagtctatacagtttgcattgaggcagaatttacatgaaataggtgagcggtgtgttgaagaactcaagcatttcattgcagagtatgatacttccactcaagattttggagagcctttttagatttttctgctcaggctaaaaaaaaaaaaaaacagtttctaaaaattttttttcctggattgtgtaaatccttaatatatggaatttttgtgatgcagagaaatactttatgatagttgacaacatttcagtattaaataaacatctaaaatagtctgtttaaaatgtttgattcaaatttttgtattttttgtagagatggggttcaccatgttggccaggctagtctctaactcctggcctcaagtgatctgcctgcctcagcctctcaaagtgttgagattacaggcgtgagccaccgctccctgcccaacacatataccatctgaaaatgttagaattctgagttgtgattttattgacttgttgcttgctttttcttaggctttgtaacttgtaatatgttaaagtgtactatcctaataaactgaatactttggtatctta

SEQ ID NO: 291713 - DNA, 1597 bp, Homo sapiens
tgcgcgcgccggaagtacctacctgggataacggcggcgagcggacggctgcatttacggggtctcccggagggccagagtcgtggcttacagaagagacgaaatgtggtctgagggacgatatgaatatgaaagaattccgagagaacgagcacctcctcgaagtcatcccagtgatggctacaatagactagttaatattgtgccaaagaaaccaccactgctagacagacctggtgaaggaagctacaatagatattacagtcatgttgattaccgagactatgacgagggccgcagtttttctcatgatcgaagaagtggtccacctcacagaggagatgaatctggttatagatggacaagagacgatcattctgcaagcaggcaacctgaatacagggacatgagagatggctttagaagaaaaagtttctactcttcccattatgcgagagagcggtctccttataaaagggacaatacttttttcagagaatcacctgttggccgaaaggattctccacacagcagatctggttccagtgtcagtagcagaagctactctccagaaaggagcaaatcatactctttccatcagtctcaacatagaaataaagagaggcctgtccagtctttgaaaacatcaagagatacttcaccctcaagtggttcagcagtttcttcatcaaaggtgttagacaaacccagtaggctaactgaaaaggaacttgctgaggctgcaagcaagtgggctgctgaaaagctagagaaatcagatgaaagtaacttgcctgaaatttctgagtatgaggcgggatccacagcaccattgtttactgaccagccagaggaacctgagtcaaacacaacacatgggatagaattatttgaagatagtcagctaaccactcgctctaaagcaatagcatcaaaaaccaaagagattgaacaggtttaccgacaagactgtgaaactttcgggatggtggtgaaaatgctgattgaaaaagatccttcattagaaaagtctatacagtttgcattgaggcagaatttacatgaaataggtgagcggtgtgttgaagaactcaagcatttcattgcagagtatgatacttccactcaagattttggagagcctttttagatttttctgctcaggctaaaaaaaaaaaaaaacagtttctaaaaattttttttcctggattgtgtaaatccttaatatatggaatttttgtgatgcagagaaatactttatgatagttgacaacatttcagtattaaataaacatctaaaatagtctgtttaaaatgtttgattcaaatttttgtattttttgtagagatggggttcaccatgttggccaggctagtctctaactcctggcctcaagtgatctgcctgcctcagcctctcaaagtgttgagattacaggcgtgagccaccgctccctgcccaacacatataccatctgaaaatgttagaattctgagttgtgattttattgacttgttgcttgctttttcttaggctttgtaacttgtaatatgttaaagtgtactatcctaataaactgaatactttggtatctta

SEQ ID NO: 291714 - DNA, 1546 bp, Homo sapiens
tgcgcgcgccggaagtacctacctgggataacggcggcgagcggacggctgcatttacggggtctcccggagggccagagtcggtgggacgagagactgagaaaagaaataagacacagagacaaagtatagagaaagaacagtgggcccaggagaccaacacttagcatatggaggacctgcaccggcaccagtcttggcttacagaagagacgaaatgtggtctgagggacgatatgaatatgaaagaattccgagagaacgagcacctcctcgaagtcatcccagtgatgaatctggttatagatggacaagagacgatcattctgcaagcaggcaacctgaatacagggacatgagagatggctttagaagaaaaagtttctactcttcccattatgcgagagagcggtctccttataaaagggacaatacttttttcagagaatcacctgttggccgaaaggattctccacacagcagatctggttccagtgtcagtagcagaagctactctccagaaaggagcaaatcatactctttccatcagtctcaacatagaaataaagagaggcctgtccagtctttgaaaacatcaagagatacttcaccctcaagtggttcagcagtttcttcatcaaaggtgttagacaaacccagtaggctaactgaaaaggaacttgctgaggctgcaagcaagtgggctgctgaaaagctagagaaatcagatgaaagtaacttgcctgaaatttctgagtatgaggcgggatccacagcaccattgtttactgaccagccagaggaacctgagtcaaacacaacacatgggatagaattatttgaagatagtcagctaaccactcgctctaaagcaatagcatcaaaaaccaaagagattgaacaggtttaccgacaagactgtgaaactttcgggatggtggtgaaaatgctgattgaaaaagatccttcattagaaaagtctatacagtttgcattgaggcagaatttacatgaaataggtgagcggtgtgttgaagaactcaagcatttcattgcagagtatgatacttccactcaagattttggagagcctttttagatttttctgctcaggctaaaaaaaaaaaaaaacagtttctaaaaattttttttcctggattgtgtaaatccttaatatatggaatttttgtgatgcagagaaatactttatgatagttgacaacatttcagtattaaataaacatctaaaatagtctgtttaaaatgtttgattcaaatttttgtattttttgtagagatggggttcaccatgttggccaggctagtctctaactcctggcctcaagtgatctgcctgcctcagcctctcaaagtgttgagattacaggcgtgagccaccgctccctgcccaacacatataccatctgaaaatgttagaattctgagttgtgattttattgacttgttgcttgctttttcttaggctttgtaacttgtaatatgttaaagtgtactatcctaataaactgaatactttggtatctta

SEQ ID NO: 291715 - DNA, 1286 bp, Homo sapiens
  misc_feature (22)..(22): n is a, c, g, or t
gggctgctctagaggtccccgnacatgtcgtggcttacagaagagacgaaatgtggtctgagggacgatatgaatatgaaagaattccgagagaacgagcacctcctcgaagtcatcccagtgatgaatctggttatagatggacaagagacgatcattctgcaagcaggcaacctgaatacagagaatcacctgttggccgaaaggattctccacacagcagatctggttccagtgtcagtagcagaagctactctccagaaaggagcaaatcatactctttccatcagtctcaacatagaaataaagagaggcctgtccagtctttgaaaacatcaagagatacttcaccctcaagtggttcagcagtttcttcatcaaaggtgttagacaaacccagtaggctaactgaaaaggaacttgctgaggctgcaagcaagtgggctgctgaaaagctagagaaatcagatgaaagtaacttgcctgaaatttctgagtatgaggcgggatccacagcaccattgtttactgaccagccagaggaacctgagtcaaacacaacacatgggatagaattatttgaagatagtcagctaaccactcgctctaaagcaatagcatcaaaaaccaaagagattgaacaggtttaccgacaagactgtgaaactttcgggatggtggtgaaaatgctgattgaaaaagatccttcattagaaaagtctatacagtttgcattgaggcagaatttacatgaaataggtgagcggtgtgttgaagaactcaagcatttcattgcagagtatgatacttccactcaagattttggagagcctttttagatttttctgctcaggctaaaaaaaaaaaaaaacagtttctaaaaattttttttcctggattgtgtaaatccttaatatatggaatttttgtgatgcagagaaatactttatgatagttgacaacatttcagtattaaataaacatctaaaatagtctgtttaaaatgtttgattcaaatttttgtattttttgtagagatggggttcaccatgttggccaggctagtctctaactcctggcctcaagtgatctgcctgcctcagcctctcaaagtgttgagattacaggcgtgagccaccgctccctgcccaacacatataccatctgaaaatgttagaattctgagttgtgattttattgacttgttgcttgctttttcttaggctttgtaacttgtaatatgttaaagtgtactatcctaataaactgaatactttggtatctta

SEQ ID NO: 291716 - DNA, 2261 bp, Homo sapiens
tgcgcgcgccggaagtacctacctgggataacggcggcgagcggacggctgcatttacggggtctcccggagggccagagtcgtggcttacagaagagacgaaatgtggtctgagggacgatatgaatatgaaagaattccgagagaacgagcacctcctcgaagtcatcccagtgatgaatctggttatagatggacaagagacgatcattctgcaagcaggcaacctgaatacagggacatgagagatggctttagaagaaaaagtttctactcttcccattatgcgagagagcggtctccttataaaagggacaatacttttttcagagaatcacctgttggccgaaaggattctccacacagcagatctggttccagtgtcagtagcagaagctactctccagaaaggagcaaatcatactctttccatcagtctcaacatagaaagtccgtgcgtcctggtgcctcctacaaacggcagaatgaaggaaatcctgaaagagataaagagaggcctgtccagtctttgaaaacatcaagagatacttcaccctcaagtggttcagcagtttcttcatcaaaggtgttagacaaacccagtaggctaactgaaaaggaacttgctgaggctgcaagcaagtgggctgctgaaaagctagagaaatcagatgaaagtaacttgcctgaaatttctgagtatgaggcgggatccacagcaccattgtttactgaccagccagaggaacctgagtcaaacacaacacatgggatagaattatttgaagatagtcagctaaccactcgctctaaagcaatagcatcaaaaaccaaagagattgaacaggtttaccgacaagactgtgaaactttcgggatggtggtgaaaatgctgattgaaaaagatccttcattagaaaagtctatacagtttgcattgaggcagaatttacatgaaatagagtctgcaggacagacttggcagcaggtaccccctgtgaggaacactgaaatggatcacgacggaacccccgaaaacgaaggcgaagagactgcgcagtcagccctctttggattccagcacgacgcatcaaaccataccatagtggggctaggacccaacccagtaccagaaatgaaggaaacgaccctgcaggccccgcagcccccgcaggccccgcagcccctgcagccccggaagaaacgggttcgtcggacgacacagcttcgtcggacgacaggagccccagacattacctgggggatgctgaagaagacaactcaggaggctgagaggatcctgctccgaacacagacaccattcactccagaaaatttgttccttgctatgctctctgttgtacattgcaactcacgcaaggatgtaaagccagaaaacaagcagtaactgctatgcctgacaaaactgttgctgcacacatctgtactcgtcaatcaacaaaacctgatgcaaaaaacagaaaaggggtgatgtaggagatggtcaggttggtaggagaagctataaggaaagacgcaattggaaggtcgggaggttttccaaagcttcaggagagaataaagctgaaggcagctttattaattaattctcttaccctgaggctgagggcgaacagtaggtagcaagggagtgtaaaggaatttatctagataagtttgtttacttatgccctccggaaatcatgcaagactgctccctgcaaaggggggcgacaatgttcattactcacaaattgtgttggcttcaggcctttggtattctgtctctactgaataaatacaaatggttccagcctatcaggactgcactctcttctcggctgcactaaagctggcactcccccagccgttctcatgcaaaatacctgtgtcagaatactcctttcatccatcactcagccagagtcttcaggacagactcggcatgggacttgtccaaaaaaattctaatcaaaagaggaaaattttggaatatgccaggaatagtggaattttattttttaaatttttttataggcccatatgctctatctcaagaaacaagatgattgtaacatgtccatgattaaactattgtttgtaaattatccgttgtttttgcatatgcccagttgatgtgataaaattttcattgtcttgccatataaagccttggttatcaacaggtggaatgtagatattgtaaagctttttgtgaattaaaagtgcaaaataaagcaaccacatttaaaaaaaaaaaa

SEQ ID NO: 291717 - DNA, 1478 bp, Homo sapiens
cccactcatgtgcaacctttaccactttctgatggcaggagggtagcttatcagcaccccggttgcttagtctgcctccagttctactgtgggtcctcgtcctccaagaaccacagtttgacttcctggaagggtggctgatggcctatctctggtcacctgggtggtattctgctggtcagagatgagacagaagccctctagtctgcctcagccactggaggttgggtcagggagctggtgcttcaagaattgaggctcagggacacgaccacctcaggggccctgcagtgctggtctggggaagcaagcttttacacacggcccgccttgctcggaggtgccacggtgtttgaaatgaagcctgggggtgacagactcagtacaggcaggggaagctcctttctgggcaccctggaccccagtggggccggaaggagatgcagacaggcctcctcacaaccacccgcaacgcgttcggatgcccctcagctccaggcaccatgccccctacagcctgcagggcaggttctgtgccagagttgtttccagggaccgcagtttcttcatcaaaggtgttagacaaacccagtaggctaactgaaaaggaacttgctgaggctgcaagcaagtgggctgctgaaaagctagagaaatcagatgaaagtaacttgcctgaaatttctgagtatgaggcgggatccacagcaccattgtttactgaccagccagaggaacctgagtcaaacacaacacatgggatagaattatttgaagatagtcagctaaccactcgctctaaagcaatagcatcaaaaaccaaagagattgaacaggtttaccgacaagactgtgaaactttcgggatggtggtgaaaatgctgattgaaaaagatccttcattagaaaagtctatacagtttgcattgaggcagaatttacatgaaataggtgagcggtgtgttgaagaactcaagcatttcattgcagagtatgatacttccactcaagattttggagagcctttttagatttttctgctcaggctaaaaaaaaaaaaaaacagtttctaaaaattttttttcctggattgtgtaaatccttaatatatggaatttttgtgatgcagagaaatactttatgatagttgacaacatttcagtattaaataaacatctaaaatagtctgtttaaaatgtttgattcaaatttttgtattttttgtagagatggggttcaccatgttggccaggctagtctctaactcctggcctcaagtgatctgcctgcctcagcctctcaaagtgttgagattacaggcgtgagccaccgctccctgcccaacacatataccatctgaaaatgttagaattctgagttgtgattttattgacttgttgcttgctttttcttaggctttgtaacttgtaatatgttaaagtgtactatcctaataaactgaatactttggtatctta

SEQ ID NO: 291718 - DNA, 1089 bp, Homo sapiens
tgcgcgcgccggaagtacctacctgggataacggcggcgagcggacggctgcatttacggggtctcccggagggccagagtcgtggcttacagaagagacgaaatgtggtctgagggacgatatgaatatgaaagaattccgagagaacgagcacctcctcgaagtcatcccagtgatgaatctggttatagatggacaagagacgatcattctgcaagcaggcaacctgaatacagggacatgagagatggctttagaagaaaaagtttctactcttcccattatgcgagagagcggtctccttataaaagggacaatacttttttcagagaatcacctgttggccgaaaggattctccacacagcagatctggttccagtgtcagtagcagaagctactctccagaaaggagcaaatcatactctttccatcagtctcaacatagaaagtccgtgcgtcctggtgcctcctacaaacggcagaatgaaggaaatcctgaaagagataaagagaggcctgtccagtctttgaaaacatcaagagatacttcaccctcaagtggttcagcagtttcttcatcaaaggtgttagacaaacccagtaggctaactgaaaaggaacttgctgaggctgcaagcaagtgggctgctgaaaagctagagaaatcagatgaaagtaacttgcctgaaatttctgagtatgaggcgggatccacagcaccattgtttactgaccagccagaggaacctgagtcaaacacaacacatgggatagaattatttgaagatagtcagctaaccactcgctctaaagcaatagcatcaaaaaccaaagagattgaacaggtttaccgacaagactgtgaaactttcgggatggtggtgaaaatgctgattgaaaaagatccttcattagaaaagtctatacagtttgcattgaggcagaatttacatgaaatagagtctgcaggacagacttggcagcaggtaccccctgtgaggaacactgaaatggatcacgacggaacccccgaaaacgaaggcgaagagactgcgcagtcagatatgcttgtgttcacatcccctca

SEQ ID NO: 291719 - DNA, 2320 bp, Homo sapiens
  misc_feature (2005)..(2005): n is a, c, g, or t
tgcgcgcgccggaagtacctacctgggataacggcggcgagcggacggctgcatttacggggtctcccggagggccagagtcgtggcttacagaagagacgaaatgtggtctgagggacgatatgaatatgaaagaattccgagagaacgagcacctcctcgaagtcatcccagtgatgaatctggttatagatggacaagagacgatcattctgcaagcaggcaacctgaatacagggacatgagagatggctttagaagaaaaagtttctactcttcccattatgcgagagagcggtctccttataaaagggacaatacttttttcagagaatcacctgttggccgaaaggattctccacacagcagatctggttccagtgtcagtagcagaagctactctccagaaaggagcaaatcatactctttccatcagtctcaacatagaaagtccgtgcgtcctggtgcctcctacaaacggcagaatgaaggaaatcctgaaagagataaagagaggcctgtccagtctttgaaaacatcaagagatacttcaccctcaagtggttcagcagtttcttcatcaaaggtgttagacaaacccagtaggctaactgaaaaggaacttgctgaggctgcaagcaagtgggctgctgaaaagctagagaaatcagatgaaagtaacttgcctgaaatttctgagtatgaggcgggatccacagcaccattgtttactgaccagccagaggaacctgagtcaaacacaacacatgggatagaattatttgaagatagtcagctaaccactcgctctaaagcaatagcatcaaaaaccaaagagattgaacaggtgagagtctagttgtcttcatgtacataatttttgtttgtgttgctttgcacatgtaaacatttattgaataaatatgcttcatttctttttccacctgtaactctaaaactacaacttaaaaaattataaaaattgtttgagttgacttcacagtcagtttgatcagtatggtcccccacctggattgtttatttttaaataaaaaacagacttcttttttacagaatattaatattctagttagtatgaagcaattaaaaattattaaagttaatagggatgggatggaagaaatgttcaatgtagcaaaatgttagcaaatgttatttttgaatattgggattacagatgtttcttatgttttttcattatactttaaggtagtttccaaatattaaaggaaaaataaaggatactatttaagtctagttttttagtgaagtcattctgaaaagcaggactttgtttttaatgtgcaactattatggggttattttcattttatgaggattaaatgaagtaaatgtgaaagggttttataaaatgtaacattttgtacaggtgcttattgatgttgttactctctagtgcgttgaataaatgtaattacattgataataatattctaaaacctattggaaattaagaacaaagtgaaaacttttctctaggtgctgtccgatttctacatcaattaaatccgtttccttttgttggatagggaatggtctcaaatcctagatgtgaccgtgtagcttatgttaatgtcacactaatgtgaaaagataagaaccagaataggaaatttgtcatgcaaaccattggagtttcaaaatgaaggtggtgagcagtatcagatgcttagaggaatataaggaaaatggagactgagaaaattctgtttaatttggtgattgggaggcagttggtacctttcaagataccaattaaatgagagcataagtaaaaggtttgctcagtatatctatctttaacacaaagatgaatgtctttattttatataaaattactgtccttttttttcttgacatgtttttatttccttttctccccttaccataatggatgctctgtgaaaacaagggctttgttttatcttgttttatttactgctacatctgccatcaccgagancagtatgtgtagcaggcttacaagaaatacttgtggccgggcgcggtggctcacgcctgtaatcccagcactttgggaggccgaggcgggcggatcacgaggtcaggagatcgagaccatcccggctaaaacggtgaaaccccgtctctactaaaaatacaaaaaattagccgggcgtagtggcgggcacctgtagtcccagctacttgggaggctgaggcaggagaatggcgtgaacccgggaggcggagcttgcagtgagccgagatcccgccactgcactccagcctgggcgacagagcgagactccgtctc

SEQ ID NO: 291720 - DNA, 822 bp, Homo sapiens
tgcgcgcgccggaagtacctacctgggataacggcggcgagcggacggctgcatttacggggtctcccggagggccagagtcggaaattgttgaaaacgttaaatttgattcctaaaaggactcaatggcttacagaagagacgaaatgtggtctgagggacgatatgaatatgaaagaattccgagagaacgagcacctcctcgaagtcatcccagtgatgaatctggttatagatggacaagagacgatcattctgcaagcaggcaacctgaatacagggacatgagagatggctttagaagaaaaagtttctactcttcccattatgcgagagagcggtctccttataaaagggacaatacttttttcagagaatcacctgttggccgaaaggattctccacacagcagatctggttccagtgtcagtagcagaagctactctccagaaaggagcaaatcatactctttccatcagtctcaacatagaagtatgtattttaagactttatttttttctctcacagtctcctctgatgagaatgtactgagtcagatttccttctaggtgtaagagatttattttttaaactttttattttgaaaaatttcaaacttacagaaaagatggtagaatagtataacaaacaccatacacacacatttttttcaaactatttgaagtggcattctgcatgacacttacctttaatttcttcagcatgtaaaaggttttttttttttttttttcagagtctcgctctgtctcccaggctggagtgtagtggcacgatcttgtttcactgcagtctccgcctccc

SEQ ID NO: 291721 - DNA, 718 bp, Homo sapiens
ggattctataggatagtatttaacaacctgaaacataaatttatcaggcacaggttagattttctttccattgtgattatttgtccctgcatcccacatgattatttgccagtcagatttgtgtgtctcaaaataactggacaagaggagtaaacttcctttataaaaatgaaccattattgcagcaagaggactgatttcaaaagatgacctggaaaactgtttagtcttgttaaaatatttggcctcatcttcaaaatgtatacatgaatctttcattttgggattgaaatatctttctgatttagaaaagaagcttgattaagaaggagatgtcaacttttacctcccccgcccccaacaaaaaaacagtttcagaaatttatgattaatttaaaagcagttaagataataaagcaaacaattttgtaaaattttttgagggtaatgagtaaactggaatgctcaatgtatactaaaaatactcctgatcttagtaaccagtttttattacatccttagtgtttgtactaacactaaattggtgattataaatttatttacttgatagtatagtatatgtaatattcaacagagtgttaatgcaaaaactgaaaaaattaaaacattttgcttttttgcttaatcggtaaattttcctttctactacctttaaagatggtgcttttggctgggcgtggtggctcatgcctatata

SEQ ID NO: 291722 - DNA, 746 bp, Homo sapiens
ggattctataggatagtatttaacaacctgaaacataaatttatcaggcacaggttagattttctttccattgtgattatttgtccctgcatcccacatgattatttgccagtcagatttgtgtgtctcaaaataactggacaagaggagtaaacttcctttataaaaatgaaccattattgcagcaagaggactgatttcaaaagatgacctggaaaactgtttagtcttgttaaaatatttggcctcatcttcaaaatgtatacatgaatctttcattttgggattgaaatatctttctgatttagaaaagaagcttgattaagaaggagatgtcaacttttacctcccccgcccccaacaaaaaaacagtttcagaaatttatgattaatttaaaagcagttaagataataaagcaaacaattttgtaaaattttttgagggtaatgagtaaactggaatgctcaatgtatactaaaaatactcctgatcttagtaaccagtttttattacatccttagtgtttgtactaacactaaattggtgattataaatttatttacttgatagtatagtagtatatgaacactagtgtttatgtatacatgtgcaggtttgttatataggtcaattgcatgtaatgggggcttggggtacagagtagggcataacacaggtcatgagcatagtacgtagcagggagttaaacgagtcggcccgtgaaagctggctcccggtagaacat

SEQ ID NO: 291723 - DNA, 710 bp, Homo sapiens
agcgggggcggtaactcgcaggccggacgtgacgcaaggcgggggctgagctgcgccggccggaaacccagcaggcggcgaagatggcggagaacagcggtcgcgccggcaagagcagcgggagcggcgcggggaagggggcggtgtccgcagagcaggtgattgctggcttcaaccgccttcggcaggaacagcgaggcctggcatccaaagcagctgagttggagatggagttgaatgagcacagcctagtgatcgatacactgaaggaggtagatgaaactcgtaagtgctaccgcatggttggaggagtgctggtggagcgaactgtcaaagaggtgctgcccgctttggagaacaacaaggagcagatacagaagatcattgagacactgacacagcagcttcaggcaaagggaaaagaactaaatgaattccgggaaaagcacaacattcgtctcatgggagaagatgagaagccagcagccaaggaaaactcagaaggggctggggctaaggccagctcagctggagtgttggtctcctagggaccaaggcctttgcatttttttctaccctgactcccacttctaatttctctttattgttattattattattttctctgctattgtaatatttttttgttaattaaatgttttggtcagaatcttaaaaaaaaaaaaatcactggccgtcgtttacaacgc

SEQ ID NO: 291724 - DNA, 406 bp, Homo sapiens
  misc_feature (5)..(5): n is a, c, g, or t
  misc_feature (112)..(112): n is a, c, g, or t
  misc_feature (151)..(151): n is a, c, g, or t
  misc_feature (172)..(172): n is a, c, g, or t
  misc_feature (184)..(184): n is a, c, g, or t
  misc_feature (200)..(200): n is a, c, g, or t
agttnttcatactgtttaacaagaccacagcaggtaaggattaatttttgagtggctgctggaattacttgatttgaatacttaggggcccccccccaaaaaaaaccccccnaaaaaaaaaaacccccaaaatttttttttcccccggggnttttccccctttcccccaaanttgggggggggngaaggaaaaaaagganattgtagaagccagcagccaaggaaaactcagaaggggctggggctaaggccagctcagctggagtgttggtctcctagggaccaaggcctttgcatttttttctaccctgactcccacttctaatttctctttattgttattattattattttctctgctattgtaatatttttttgttaattaaatgttttggtcagaatctta

SEQ ID NO: 291725 - DNA, 914 bp, Homo sapiens
gtaggaacttgtctctgtaaaaaataaaaataagcagcccaggtgattctaagtacattaaagtgtataaaccactgtgttcaagaaaggaataattttaatgtctgggctcctctacttggttaaaggtaaggttaaatgtgttaacacttcctccaaccatagtccattccaggtgggggaaaggagtcctgaattccttatataatccctgtcacttgtcctctagatacagaagatcattgagacactgacacagcagcttcaggcaaagggaaaagaactaaatgaattccgggaaaagcacaacattcgtctcatgggagaagatgagaagccagcagccaaggaaaactcagaaggggctggggctaaggccagctcagctggagtgttggtctcctagggaccaaggcctttgcatttttttctaccctgactcccacttctaatttctctttattgttattattattattttctctgctattgtaatatttttttgttaattaaatgttttggtcagaatcttaaaaaaacgaacaacacaacacgaaaaatgaacaacgtcagacgaacaaagcaagaagaagagagacagacacaacgaccgaggcaagacgaagagagcaggacagagaacaagccacgacatgaataacagcagacccaacgaaaccaaaaacatgggcggcgggacgccccccgcgccacgaacaaagagaaaccacaaacaccagatcggtgggggcgccgccaccccaagataagatagagaaaggagccgcgacgcagacacgaaagaaaggctgacacaggggtgaggggcccaccaaaaaaaaagcgcgggggggggcgaagactagaaaaaaagggggcgtagatcaacggtacacaaggacgcgagggaaaaa

SEQ ID NO: 291726 - DNA, 977 bp, Homo sapiens
agcgggggcggtaactcgcaggccggacgtgacgcaaggcgggggctgagctgcgccggccggaaacccagcaggcggcgaagatggcggagaacagcggtcgcgccggcaagagcagcgggagcggcgcggggaagggggcggtgtccgcagagcaggtgattgctggcttcaaccgccttcggcaggaacagcgaggcctggcatccaaagcagctgagttggagatggagttgaatgagcacagcctagtgatcgatacactgaaggaggtagatgaaactcgtaagtgctaccgcatggttggaggagtgctggtggagcgaactgtcaaagaggtgctgcccgctttggagaacaacaaggagcagatacagaagatcattgagacactgacacagcagcttcaggcaaagggaaaagaactaaatgaattccgggaaaagcacaacattcgtctcatgggagaagatgagaagccagcagccaaggaaaactcagaaggggctggggctaaggccagctcagctggagtgttggtctcctagggaccaaggcctttgcatttttttctaccctgactcccacttctaatttctctttattgttattattattattttctctgctattgtaatatttttttgttaattaaatgttttggtcagaatcttaaaaaaaaacggcacgagtttttttttctacattttattatttcaaaccaggtgaacaattccataaaacatgtgaaaaaagcaaggaagtgttcaacgctgaaggccccgggcctgggacaagggcatgaggggcgtggccccccagcagacagcggcggttcctaggttagcgctagggagctacattttaggttaatagagcctggggccagggccgctggggcagggccctcagtgacgttggcagttgtctggaacagcccttggaacccaattctgtggagggcagggcaggggtgc

SEQ ID NO: 291727 - DNA, 675 bp, Homo sapiens
agcgggggcggtaactcgcaggccggacgtgacgcaaggcgggggctgagctgcgccggccggaaacccagcaggcggcgaagatggcggagaacagcggtcgcgccggcaagagcagcgggagcggcgcggggaagggggcggtgtccgcagagcaggtgattgctggcttcaaccgccttcggcaggaacagcgaggcctggcatccaaagcagctgagttggagatggagttgaatgagcacagcctagtgatcgatacactgaaggaggtagatgaaactcgtaagtgctaccgcatggttggaggagtgctggtggagcgaactgtcaaagaggtgctgcccgctttggagaacaacaaggagcagatacagaagatcattgagacactgacacagcagcttcaggcaaagggaaaagaactaaatgaattccgggaaaagcacaacattcgtctcatgggagaagatgagaagccagcagccaaggaaaactcagaaggggctggggctaaggccagctcagctggagtgttggtctcctagggaccaaggcctttgcatttttttctaccctgactcccacttctaatttctctttattgttattattattattttctctgctattgtaatatttttttgttaattaaatgttttggtcagaatctta

SEQ ID NO: 291728 - DNA, 771 bp, Homo sapiens
  misc_feature (474)..(474): n is a, c, g, or t
  misc_feature (485)..(487): n is a, c, g, or t
  misc_feature (504)..(505): n is a, c, g, or t
  misc_feature (521)..(521): n is a, c, g, or t
  misc_feature (533)..(533): n is a, c, g, or t
  misc_feature (543)..(543): n is a, c, g, or t
agcgggggcggtaactcgcaggccggacgtgacgcaaggcgggggctgagctgcgccggccggaaacccagcaggcggcgaagatggcggagaacagcggtcgcgccggcaagagcagcgggagcggcgcggggaagggggcggtgtccgcagagcaggtgattgctggcttcaaccgccttcggcaggaacagcgaggcctggcatccaaagcagctgagttggagatggagttgaatgagcacagcctagtgatcgatacactgaaggaggtagatgaaactcgtaagtgctaccgcatggttggaggagtgctggtggagcgaactgtcaaagaggtgctgcccgctttggagaacaacaaggagcagatacagaagatcattgagacactgacacagcagcttcaggcaaagggaaaagaactaaatgaattccgggaaaagcccccttttttttggggggttttttttnccccctttttnnncccccgcccctttgggnnccccccccccccgggnaaaatttttggntccggagggncccaaaacccaagccccggaagcgccgtgttgacttcccgggcggcctgctgagcctggggcccggcgaagggcccgggcgccatccccgacgcggccaacggaggggtggacatggcgcggctgcagcttcaggccggaaggggccagacagcaggtgtcaggggtctgcccggaattgggaggctgtggggcctcagcgttggaaccagcttgagagaccccccgc

SEQ ID NO: 291729 - DNA, 1207 bp, Homo sapiens
cgactgcaagcgctgccacctgaggagcctggtagccaaggcagcggcaggctcaacccagatctcgcgagacggagcacgcctagcggagatttgacctctcgtccctgagaggcgggtgggtgttagttcagagggttatgggagggctctggcgtcctggatggaggtgcgttcctttctgtggctggcgctggatccaccctgggtctccaaccagggctgcagagagggtagagccgtttcttaggccagagtggagtgggacaggaggtgccgagagaggactgaggtggcttgggacatggaagcgctgcagccttcgagcccggcatccagcattgcagccgccgcggcggcctaagagctcgaaccctttcacacgcgcgcaggaggaggagcggcggcggcagaacaagacgaccctcacttacgtggccgctgtcgccgtgggcatgctgggggcgtcctacgctgccgtacccctttatcggctctattgccagactactggacttggaggatcagcagttgcaggtcatgcctcagacaagattgaaaacatggtgcctgttaaagatcgaatcattaaaattagctttaatgcagatgtgcatgcaagtctccagtggaactttagacctcagcaaacagaaatatatgtggtgccaggagagactgcactggcgttttacagagctaagaatcctactgacaaaccagtaattggaatttctacatacaatattgttccatttgaagctggacagtatttcaataaaatacaggcttcaaagctgcacagagtctacgttttagagagttggcacctttgatgtggtagtgagctgatcatccactttcttctaaaataaagagaagaaaatggccagtattcatcctgtccttctctttccccattccttgataactctcttgtctttactgggaagctggagagtcacagtctagtagaagaaagattagaaaaatttcaactgtaggtgcctttgcaacctatcctgggagaccctaaaacatatttagttttagtgcctagagattttcactcctctaacatctctggatacagtgtccctggtcaacatgaagaagttacagaagaacgctttctgatcctggcccctaaagaatttacttgtgctaagtaataaaattcctattgatcaaaacctgaaaacttgtg

SEQ ID NO: 291730 - DNA, 895 bp, Homo sapiens
cgactgcaagcgctgccacctgaggagcctggtagccaaggcagcggcaggctcaacccagatctcgcgagacggagcacgcctagcggagatttgacctctcgtccctgagaggcgggtgggtgttagttcagagggttatgggagggctctggcgtcctggatggaggtgcgttcctttctgtggctggcgctggatccaccctgggtctccaaccagggctgcagagagggtagagccgtttcttaggccagagtggagtgggacaggaggtgccgagagaggactgaggtggcttgggacatggaagcgctgcagccttcgagcccggcatccagcattgcagccgccgcggcggcctaagagctcgaaccctttcacacgcgcgcaggaggaggagcggcggcggcagaacaagacgaccctcacttacgtggccgctgtcgccgtgggcatgctgggggcgtcctacgctgccgtacccctttatcggctctattgccagactactggacttggaggatcagcagttgcaggtcatgcctcagacaagattgaaaacatggtgcctgttaaagatcgaatcattaaaattagctttaatgcagatgtgcatgcaagtctccagtggaactttagacctcagcaaacagaaatatatgtggtgccaggagagactgcactggcgttttacagagctaagaatcctactgacaaaccagtaattggaatttctacatacaatattgttccatttgaagctggacagtatttcaataaaatacaggcttcaaagctgcacagagtctacgttttagagagttggcacctttgatgtggtagtgagctgatcatccactttcttctaaaataaagagaagaaaatggccagta

SEQ ID NO: 291731 - DNA, 775 bp, Homo sapiens
cgactgcaagcgctgccacctgaggagcctggtagccaaggcagcggcaggctcaacccagatctcgcgagacggagcacgcctagcggagatttgacctctcgtccctgagaggcgggtgggtgttagttcagagggttatgggagggctctggcgtcctggatggaggtgcgttcctttctgtggctggcgctggatccaccctgggtctccaaccagggctgcagagagggtagagccgtttcttaggccagagtggagtgggacaggaggtgccgagagaggactgaggtggcttgggacatggaagcgctgcagccttcgagcccggcatccagcattgcagccgccgcggcggcctaagagctcgaaccctttcacacgcgcgcaggaggaggagcggcggcggcagaacaagacgaccctcacttacgtggccgctgtcgccgtgggcatgctgggggcgtcctacgctgccgtacccctttatcggctctattgccaggtaggggccggcgccgcccgcagggtggcgcagacgcgagaggtgggggtgcaagacaaatcccgggacaagccctcgctctgcgggtcgtaggtggaagaggtttccgatattatctacctaagaggagagaggttcaaaacagtcacttaacacccaaagtcaccaaagaaattggtgacaaaactgcaagtagcatccagttcttagtgattgtgcttataccatgctgcagagtgaaacccctgatctatgaactgcacctcgcc

SEQ ID NO: 291732 - DNA, 517 bp, Homo sapiens
tgcctaatttttgtatttttagtagagacggggtttcaccatgttgcccaggctgatcttgaattcagggtgatctgcgcgccttggcctcgcaaagtgctgggattacaggggtgagccaccacatcaggcctaatagccatacttctaattctgtttgagaagttctcaaattagcaataccaagtgttacttggtttcttcccctaatgaggccactaattttattgctcttactactgttgtttggtccctgcatctttaacctcttcgtaaaatttgtatcttccagattagaaaaatttcaactgtaggtgcctttgcaacctatcctgggagaccctaaaacatatttagttttagtgcctagagattttcactcctctaacatctctggatacagtgtccctggtcaacatgaagaagttacagaagaacgctttctgatcctggcccctaaagaatttacttgtgctaagtaataaaattcctattgatcaaaacctgaaaacttgtg

SEQ ID NO: 291733 - DNA, 605 bp, Homo sapiens
cgactgcaagcgctgccacctgaggagcctggtagccaaggcagcggcaggctcaacccagatctcgcgagacggagcacgcctagcggagatttgacctctcgtccctgagaggcgggtgggtgttagttcagagggttatgggagggctctggcgtcctggatggaggtgcgttcctttctgtggctggcgctggatccaccctgggtctccaaccagggctgcagagagggtagagccgtttcttaggccagagtggagtgggacaggaggtgccgagagaggactgaggtggcttgggacatggaagcgctgcagccttcgagcccggcatccagcattgcagccgccgcggcggcctaagagctcgaaccctttcacacgcgcgcaggaggaggagcggcggcggcagaacaagacgaccctcacttacgtggccgctgtcgccgtgggcatgctgggggcgtcctacgctgccgtacccctttatcggctctattgccaggctggagtagctcttattgcccaggctggagtagctcttattgcccaggctggagtagctctatgcccaggctggagtagctcttatgcccaggatgga

SEQ ID NO: 291734 - DNA, 752 bp, Homo sapiens
gacttaattgatttatttcagatcaaccatagtggagttatttagatgtaaaaaaaaaattatttgtcaaaagaaattaagaatagcactccccacaccagatctttatatgtcactaacaaaaagtatacaaagaaaaataacattccacattcaacagtctctataaacaagttgatcccctgccagaacctattcaatttgaatttggccatgagtagtattctcatgttgatttataacctaagactctttactattcaaggcaaaacacagccctgagctctggcattaaaacagcaaccaacaaattagcattatccttgaaaaattcaaccaaacatctgcacccaaacaccctgagacaaagcacttcagattggaataaaatataaaactggattcacatatttaaatgaaatgtttcagtgtgtttttactgaaggattgtttgccacagatggatgagaatatgagagaaaaagtcataaatcatttcattttagagctctgaaaggcccaggaagaccaggtggaactagaaatattgctgtggctatttaaaaaatattatctgccacatatccgtttactttgatatttaatttttcaattttagtttaacacacgtgttaacatcataagttaaaaagtttatatctggaaaagccgccattgtggactactacctttgaaatctatttaatgatgaattttcctttttacatcccacataaagaggatatatttaa

SEQ ID NO: 291735 - DNA, 2498 bp, Homo sapiens
cgactgcaagcgctgccacctgaggagcctggtagccaaggcagcggcaggctcaacccagatctcgcgagacggagcacgcctagcggagatttgacctctcgtccctgagaggcgggtgggtgttagttcagagggttatgggagggctctggcgtcctggatggaggtgcgttcctttctgtggctggcgctggatccaccctgggtctccaaccagggctgcagagagggtagagccgtttcttaggccagagtggagtgggacaggaggtgccgagagaggactgaggtggcttgggacatggaagcgctgcagccttcgagcccggcatccagcattgcagccgccgcggcggcctaagagctcgaaccctttcacacgcgcgcaggaggaggagcggcggcggcagaacaagacgaccctcacttacgtggccgctgtcgccgtgggcatgctgggggcgtcctacgctgccgtacccctttatcggctctattgccagactactggacttggaggatcagcagttgcaggtcatgcctcagacaagattgaaaacatggtgcctgttaaagatcgaatcattaaaattagctttaatgcagatgtgcatgcaagtctccagtggaactttagacctcagcaaacagaaatatatgtggtgccaggagagactgcactggcgttttacagagctaagaatcctactgacaaaccagtaattggaatttctacatacaatattgttccatttgaagctggacagtatttcaataaaatacagtgcttctgttttgaagaacaaaggcttaatccccaagaggaagtagatatgccagtgtttttctacattgatcctgaatttgctgaagatccaagaatgattaaagttgatcttatcactctttcttacactttttttgaagcaaaggaagggcacaagttgccagttccaggatataattgaagtcagcaactaagtcttccttcaaagttgtgatttttgggaaaatcatatatcctatcttctcaaaggagaaatattgtacaataatatgaaggcttatattttaaataattattttttctcaactaatttttttcacttaaacttgagagaacaagttcagcttttatcataagaaactcatatgcctagctagaatatatgactgactattcaataccatactgaagagtttgatactattaaaataagccgctttgttttttaaatatgcaggcatgggttcagcttaattccataattcccttccagattattaactcttcatacttacagcaatgaatctgacaatgtttttcaaaaatgtatgctcagggttatttgtttcaagtcataggccagaacttctaaccatgtttattgtgtctaaaagagttggttgctattttccttcattatgaatagtcagtattttaaaagctcaaagtagaagaggagtcactaagccctaacagcttgtccaaagatttaaattcttatttcaaatttgatttgtcctttaaggtttagggctattttatattcagagttctgaataattactttgaaactgtagtatcataaaattgaaataaaatacatctactaggctgttagccaaagcatcaccattacaagtccatgaatgttaaaatgtacaggtgggattgtgaagatttactgacatcaaaagttcttctggaaacaaacctttgttaaaaaaaaaaagtattaaattgttttaatagtgatttatttgtcatcaaatgtacaacttattctaaatattttcattttctgtgttctaaatagaaatattaagttgcagtaaaaagagaaaaaaaggctatttagcattacaaagaatcatatttaaaggctgcccaatgtagagtctagtgacctgttcaggacacctgaaatataattaaatgacaattatcaaggttttaacaatttataattctaaaccagaggattataaagaagtgcaaattgacttttacattcaactttagttaaatgaaggcactcagtattcttcctgaataatacattcagtttctcacattttatgctttcatctattcagaattatttcatagtaaaataatctactcttatcacagctgtgtgacgatttctaaatgtaggaaggcctgtgaaacatgacactgcagttaaattggttggcctaaggactaagtaatttttcttctgctgaagttttaagtgagtatttgttccaaacaagttctgttgaaatctcacgctgttgtcaggaatcagtgttatcctggaactgttattctatttaatcttcattatagcagaaatgtgccaccatggctttgacatgttggtaggtattgtcttccaggcttcaaagctgcacagagtctacgttttagagagttggcacctttgatgtggtagtgagctgatcatccactttcttctaaaataaagagaagaaaatggccagta

SEQ ID NO: 291736 - DNA, 2851 bp, Homo sapiens
cgactgcaagcgctgccacctgaggagcctggtagccaaggcagcggcaggctcaacccagatctcgcgagacggagcacgcctagcggagatttgacctctcgtccctgagaggcgggtgggtgttagttcagagggttatgggagggctctggcgtcctggatggaggtgcgttcctttctgtggctggcgctggatccaccctgggtctccaaccagggctgcagagagggtagagccgtttcttaggccagagtggagtgggacaggaggtgccgagagaggactgaggtggcttgggacatggaagcgctgcagccttcgagcccggcatccagcattgcagccgccgcggcggcctaagagctcgaaccctttcacacgcgcgcaggaggaggagcggcggcggcagaacaagacgaccctcacttacgtggccgctgtcgccgtgggcatgctgggggcgtcctacgctgccgtacccctttatcggctctattgccagactactggacttggaggatcagcagttgcaggtcatgcctcagacaagattgaaaacatggtgcctgttaaagatcgaatcattaaaattagctttaatgcagatgtgcatgcaagtctccagtggaactttagacctcagcaaacagaaatatatgtggtgccaggagagactgcactggcgttttacagagctaagaatcctactgacaaaccagtaattggaatttctacatacaatattgttccatttgaagctggacagtatttcaataaaatacagtgcttctgttttgaagaacaaaggcttaatccccaagaggaagtagatatgccagtgtttttctacattgatcctgaatttgctgaagatccaagaatgattaaagttgatcttatcactctttcttacactttttttgaagcaaaggaagggcacaagttgccagttccaggatataattgaagtcagcaactaagtcttccttcaaagttgtgatttttgggaaaatcatatatcctatcttctcaaaggagaaatattgtacaataatatgaaggcttatattttaaataattattttttctcaactaatttttttcacttaaacttgagagaacaagttcagcttttatcataagaaactcatatgcctagctagaatatatgactgactattcaataccatactgaagagtttgatactattaaaataagccgctttgttttttaaatatgcaggcatgggttcagcttaattccataattcccttccagattattaactcttcatacttacagcaatgaatctgacaatgtttttcaaaaatgtatgctcagggttatttgtttcaagtcataggccagaacttctaaccatgtttattgtgtctaaaagagttggttgctattttccttcattatgaatagtcagtattttaaaagctcaaagtagaagaggagtcactaagccctaacagcttgtccaaagatttaaattcttatttcaaatttgatttgtcctttaaggtttagggctattttatattcagagttctgaataattactttgaaactgtagtatcataaaattgaaataaaatacatctactaggctgttagccaaagcatcaccattacaagtccatgaatgttaaaatgtacaggtgggattgtgaagatttactgacatcaaaagttcttctggaaacaaacctttgttaaaaaaaaaaagtattaaattgttttaatagtgatttatttgtcatcaaatgtacaacttattctaaatattttcattttctgtgttctaaatagaaatattaagttgcagtaaaaagagaaaaaaaggctatttagcattacaaagaatcatatttaaaggctgcccaatgtagagtctagtgacctgttcaggacacctgaaatataattaaatgacaattatcaaggttttaacaatttataattctaaaccagaggattataaagaagtgcaaattgacttttacattcaactttagttaaatgaaggcactcagtattcttcctgaataatacattcagtttctcacattttatgctttcatctattcagaattatttcatagtaaaataatctactcttatcacagctgtgtgacgatttctaaatgtaggaaggcctgtgaaacatgacactgcagttaaattggttggcctaaggactaagtaatttttcttctgctgaagttttaagtgagtatttgttccaaacaagttctgttgaaatctcacgctgttgtcaggaatcagtgttatcctggaactgttattctatttaatcttcattatagcagaaatgtgccaccatggctttgacatgttggtaggtattgtcttccaggcttcaaagctgcacagagtctacgttttagagagttggcacctttgatgtggtagtgagctgatcatccactttcttctaaaataaagagaagaaaatggccagtattcatcctgtccttctctttccccattccttgataactctcttgtctttactgggaagctggagagtcacagtctagtagaagaaagggtcactgtcacccaggctggagtgcagtggtgcaatcatggcttattgcagcttcgacctcccaggttcaagtgatccttccacttcagcctctcaaaatgttgggattagaggcataagccaccatgccaggcccattcaattctttatatgcgtcttacatatgtctgtagctggaaaatatacctgaaagcacaacattcatatatacagtatagcaaaacatggctgaggaaaaatctcaaaaatcacagcgctatgaaac

SEQ ID NO: 291737 - DNA, 2888 bp, Homo sapiens
cgactgcaagcgctgccacctgaggagcctggtagccaaggcagcggcaggctcaacccagatctcgcgagacggagcacgcctagcggagatttgacctctcgtccctgagaggcgggtgggtgttagttcagagggttatgggagggctctggcgtcctggatggaggtgcgttcctttctgtggctggcgctggatccaccctgggtctccaaccagggctgcagagagggtagagccgtttcttaggccagagtggagtgggacaggaggtgccgagagaggactgaggtggcttgggacatggaagcgctgcagccttcgagcccggcatccagcattgcagccgccgcggcggcctaagagctcgaaccctttcacacgcgcgcaggaggaggagcggcggcggcagaacaagacgaccctcacttacgtggccgctgtcgccgtgggcatgctgggggcgtcctacgctgccgtacccctttatcggctctattgccagactactggacttggaggatcagcagttgcaggtcatgcctcagacaagattgaaaacatggtgcctgttaaagatcgaatcattaaaattagctttaatgcagatgtgcatgcaagtctccagtggaactttagacctcagcaaacagaaatatatgtggtgccaggagagactgcactggcgttttacagagctaagaatcctactgacaaaccagtaattggaatttctacatacaatattgttccatttgaagctggacagtatttcaataaaatacaggtacatcaaagtgtaaactttacagaatatgataaagatacatgaaacggtttagtatgaaacttagtgttttagtagatcttgtgatttctgaaaacgaatttcttctaaacatcaagctatttttcttcactatctatacctgctatgcagagattgagaaccaaaccaaatggatatctgcttttaagattagaatttgttcttcatccttaaagcagaactcattgagatgaaaagatgctcttaatttatcacagaactgtgtatttaatagtatgcttattaaaatcacgaagtgtactggaatgctaagataaaagaactgtatagtttctgttatgtaatacgagaatagaaatgttattaaaatctttctataatttccagtgcttctgttttgaagaacaaaggcttaatccccaagaggaagtagatatgccagtgtttttctacattgatcctgaatttgctgaagatccaagaatgattaaagttgatcttatcactctttcttacactttttttgaagcaaaggaagggcacaagttgccagttccaggatataattgaagtcagcaactaagtcttccttcaaagttgtgatttttgggaaaatcatatatcctatcttctcaaaggagaaatattgtacaataatatgaaggcttatattttaaataattattttttctcaactaatttttttcacttaaacttgagagaacaagttcagcttttatcataagaaactcatatgcctagctagaatatatgactgactattcaataccatactgaagagtttgatactattaaaataagccgctttgttttttaaatatgcaggcatgggttcagcttaattccataattcccttccagattattaactcttcatacttacagcaatgaatctgacaatgtttttcaaaaatgtatgctcagggttatttgtttcaagtcataggccagaacttctaaccatgtttattgtgtctaaaagagttggttgctattttccttcattatgaatagtcagtattttaaaagctcaaagtagaagaggagtcactaagccctaacagcttgtccaaagatttaaattcttatttcaaatttgatttgtcctttaaggtttagggctattttatattcagagttctgaataattactttgaaactgtagtatcataaaattgaaataaaatacatctactaggctgttagccaaagcatcaccattacaagtccatgaatgttaaaatgtacaggtgggattgtgaagatttactgacatcaaaagttcttctggaaacaaacctttgttaaaaaaaaaaagtattaaattgttttaatagtgatttatttgtcatcaaatgtacaacttattctaaatattttcattttctgtgttctaaatagaaatattaagttgcagtaaaaagagaaaaaaaggctatttagcattacaaagaatcatatttaaaggctgcccaatgtagagtctagtgacctgttcaggacacctgaaatataattaaatgacaattatcaaggttttaacaatttataattctaaaccagaggattataaagaagtgcaaattgacttttacattcaactttagttaaatgaaggcactcagtattcttcctgaataatacattcagtttctcacattttatgctttcatctattcagaattatttcatagtaaaataatctactcttatcacagctgtgtgacgatttctaaatgtaggaaggcctgtgaaacatgacactgcagttaaattggttggcctaaggactaagtaatttttcttctgctgaagttttaagtgagtatttgttccaaacaagttctgttgaaatctcacgctgttgtcaggaatcagtgttatcctggaactgttattctatttaatcttcattatagcagaaatgtgccaccatggctttgacatgttggtaggtattgtcttccaggcttcaaagctgcacagagtctacgttttagagagttggcacctttgatgtggtagtgagctgatcatccactttcttctaaaataaagagaagaaaatggccagta

SEQ ID NO: 291738 - DNA, 2643 bp, Homo sapiens
ttttattctgattttaaggtaagtttaatgttggtatctttttaaaaaaaatagtcaatcatgacattcaggtataagtgttacagaaaagttgggctagggctgtgatatgattggcttggacacattttaaataatgtaatttgccgattattccttgaagacctcaaatatacaagaggacagttcataactaattatggatattagaacattggttcttcattgacatatgcaagtaagtttttaaactcagatatgtttatgggtaatattcacaatttattttgctgaaccctacattagattaggtattatggtctgatgaataggcaaaataatgagactaatttagcagggaaaagaggaactttgtgagattcaaagtattgataatatatatattctttaaaacaggtggtgccaggagagactgcactggcgttttacagagctaagaatcctactgacaaaccagtaattggaatttctacatacaatattgttccatttgaagctggacagtatttcaataaaatacaggtacatcaaagtgtaaactttacagaatatgataaagatacatgaaacggtttagtatgaaacttagtgttttagtagatcttgtgatttctgaaaacgaatttcttctaaacatcaagctatttttcttcactatctatacctgctatgcagagattgagaaccaaaccaaatggatatctgcttttaagattagaatttgttcttcatccttaaagcagaactcattgagatgaaaagatgctcttaatttatcacagaactgtgtatttaatagtatgcttattaaaatcacgaagtgtactggaatgctaagataaaagaactgtatagtttctgttatgtaatacgagaatagaaatgttattaaaatctttctataatttccagtgcttctgttttgaagaacaaaggcttaatccccaagaggaagtagatatgccagtgtttttctacattgatcctgaatttgctgaagatccaagaatgattaaagttgatcttatcactctttcttacactttttttgaagcaaaggaagggcacaagttgccagttccaggatataattgaagtcagcaactaagtcttccttcaaagttgtgatttttgggaaaatcatatatcctatcttctcaaaggagaaatattgtacaataatatgaaggcttatattttaaataattattttttctcaactaatttttttcacttaaacttgagagaacaagttcagcttttatcataagaaactcatatgcctagctagaatatatgactgactattcaataccatactgaagagtttgatactattaaaataagccgctttgttttttaaatatgcaggcatgggttcagcttaattccataattcccttccagattattaactcttcatacttacagcaatgaatctgacaatgtttttcaaaaatgtatgctcagggttatttgtttcaagtcataggccagaacttctaaccatgtttattgtgtctaaaagagttggttgctattttccttcattatgaatagtcagtattttaaaagctcaaagtagaagaggagtcactaagccctaacagcttgtccaaagatttaaattcttatttcaaatttgatttgtcctttaaggtttagggctattttatattcagagttctgaataattactttgaaactgtagtatcataaaattgaaataaaatacatctactaggctgttagccaaagcatcaccattacaagtccatgaatgttaaaatgtacaggtgggattgtgaagatttactgacatcaaaagttcttctggaaacaaacctttgttaaaaaaaaaaagtattaaattgttttaatagtgatttatttgtcatcaaatgtacaacttattctaaatattttcattttctgtgttctaaatagaaatattaagttgcagtaaaaagagaaaaaaaggctatttagcattacaaagaatcatatttaaaggctgcccaatgtagagtctagtgacctgttcaggacacctgaaatataattaaatgacaattatcaaggttttaacaatttataattctaaaccagaggattataaagaagtgcaaattgacttttacattcaactttagttaaatgaaggcactcagtattcttcctgaataatacattcagtttctcacattttatgctttcatctattcagaattatttcatagtaaaataatctactcttatcacagctgtgtgacgatttctaaatgtaggaaggcctgtgaaacatgacactgcagttaaattggttggcctaaggactaagtaatttttcttctgctgaagttttaagtgagtatttgttccaaacaagttctgttgaaatctcacgctgttgtcaggaatcagtgttatcctggaactgttattctatttaatcttcattatagcagaaatgtgccaccatggctttgacatgttggtaggtattgtcttccaggcttcaaagctgcacagagtctacgttttagagagttggcacctttgatgtggtagtgagctgatcatccactttcttctaaaataaagagaagaaaatggccagta

SEQ ID NO: 291739 - DNA, 1306 bp, Homo sapiens
cgactgcaagcgctgccacctgaggagcctggtagccaaggcagcggcaggctcaacccagatctcgcgagacggagcacgcctagcggagatttgacctctcgtccctgagaggcgggtgggtgttagttcagagggttatgggagggctctggcgtcctggatggaggtgcgttcctttctgtggctggcgctggatccaccctgggtctccaaccagggctgcagagagggtagagccgtttcttaggccagagtggagtgggacaggaggtgccgagagaggactgaggtggcttgggacatggaagcgctgcagccttcgagcccggcatccagcattgcagccgccgcggcggcctaagagctcgaaccctttcacacgcgcgcaggaggaggagcggcggcggcagaacaagacgaccctcacttacgtggccgctgtcgccgtgggcatgctgggggcgtcctacgctgccgtacccctttatcggctctattgccagactactggacttggaggatcagcagttgcaggtcatgcctcagacaagattgaaaacatggtgcctgttaaagatcgaatcattaaaattagctttaatgcagatgtgcatgcaagtctccagtggaactttagacctcagcaaacagaaatatatgtggtgccaggagagactgcactggcgttttacagagctaagaatcctactgacaaaccagtaattggaatttctacatacaatattgttccatttgaagctggacagtatttcaataaaatacaggcttcaaagctgcacagagtctacgttttagagagttggcacctttgatgtggtagtgagctgatcatccactttcttctaaaataaagagaagaaaatggccagtattcatcctgtccttctctttccccattccttgataactctcttgtctttactgggaagctggagagtcacagtctagtagaagaaaggtctatagtaaagagatgtggcatctgatgaaaaggaagacaagaagatgcggcagccctacagactacttcaggaagcccaggaagaagatggcatggattagaaaaatttcaactgtaggtgcctttgcaacctatcctgggagaccctaaaacatatttagttttagtgcctagagattttcactcctctaacatctctggatacagtgtccctggtcaacatgaagaagttacagaagaacgctttctgatcctggcccctaaagaatttacttgtgctaagtaataaaattcctattgatcaaaacctgaaaacttgtg

SEQ ID NO: 291740 - DNA, 1215 bp, Homo sapiens
cgactgcaagcgctgccacctgaggagcctggtagccaaggcagcggcaggctcaacccagatctcgcgagacggagcacgcctagcggagatttgacctctcgtccctgagaggcgggtgggtgttagttcagagggttatgggagggctctggcgtcctggatggaggtgcgttcctttctgtggctggcgctggatccaccctgggtctccaaccagggctgcagagagggtagagccgtttcttaggccagagtggagtgggacaggaggtgccgagagaggactgaggtggcttgggacatggaagcgctgcagccttcgagcccggcatccagcattgcagccgccgcggcggcctaagagctcgaaccctttcacacgcgcgcaggaggaggagcggcggcggcagaacaagacgaccctcacttacgtggccgctgtcgccgtgggcatgctgggggcgtcctacgctgccgtacccctttatcggctctattgccagactactggacttggaggatcagcagttgcaggtcatgcctcagacaagattgaaaacatggtgcctgttaaagatcgaatcattaaaattagctttaatgcagatgtgcatgcaagtctccagtggaactttagacctcagcaaacagaaatatatgtggtgccaggagagactgcactggcgttttacagagctaagaatcctactgacaaaccagtaattggaatttctacatacaatattgttccatttgaagctggacagtatttcaataaaatacagctgtgtgacgatttctaaatgtaggaaggcctgtgaaacatgacactgcagttaaattggttggcctaaggactaagtaatttttcttctgctgaagttttaagtctatagtaaagagatgtggcatctgatgaaaaggaagacaagaagatgcggcagccctacagactacttcaggaagcccaggaagaagatggcatggattagaaaaatttcaactgtaggtgcctttgcaacctatcctgggagaccctaaaacatatttagttttagtgcctagagattttcactcctctaacatctctggatacagtgtccctggtcaacatgaagaagttacagaagaacgctttctgatcctggcccctaaagaatttacttgtgctaagtaataaaattcctattgatcaaaacctgaaaacttgtg

SEQ ID NO: 291741 - DNA, 667 bp, Homo sapiens
ggggagaaaaatgcctgttttacaattcatatagctgatttcagatacttttattccttctttacagttgtactccttccatcagagtatgcccgtgggccctcactgacccccaaggtgggtgccaccctgctgatgactccctaggcttatgctgaagcctccaaaagcccctgcagttataagggggcagccaaccagggagccagtattatctgggcgttctaactgtattgacgtgactccttcagatgggtatgagaaacctttgaaaaaatacaccctaaagaattctttgtttatgacatagggttagagggggaaaaaatgaataaataaaataaataaataaataaataaatcaataaaaaaccaaaaccaaaaacaccaaaaaaagaattctctatttccccacagtctatctttgctgacttcattctgaaattcttaaatcagatatgcttcttgtcctttttctccatagaagacttaattgatttatttcagatcaaccatagtggagttatttagatgtaaaaaaaaaattatttgtcaaaagaaattaagaatagcactccccacaccagatctttatatgtcactaacaaaaagtatacaaagaaaaataacattccacattcaacagtctctataaacaagttgatcc

SEQ ID NO: 291742 - DNA, 2810 bp, Homo sapiens
cgactgcaagcgctgccacctgaggagcctggtagccaaggcagcggcaggctcaacccagatctcgcgagacggagcacgcctagcggagatttgacctctcgtccctgagaggcgggtgggtgttagttcagagggttatgggagggctctggcgtcctggatggaggtgcgttcctttctgtggctggcgctggatccaccctgggtctccaaccagggctgcagagagggtagagccgtttcttaggccagagtggagtgggacaggaggtgccgagagaggactgaggtggcttgggacatggaagcgctgcagccttcgagcccggcatccagcattgcagccgccgcggcggcctaagagctcgaaccctttcacacgcgcgcaggaggaggagcggcggcggcagaacaagacgaccctcacttacgtggccgctgtcgccgtgggcatgctgggggcgtcctacgctgccgtacccctttatcggctctattgccagactactggacttggaggatcagcagttgcaggtcatgcctcagacaagattgaaaacatggtgcctgttaaagatcgaatcattaaaattagctttaatgcagatgtgcatgcaagtctccagtggaactttagacctcagcaaacagaaatatatgtggtgccaggagagactgcactggcgttttacagagctaagaatcctactgacaaaccagtaattggaatttctacatacaatattgttccatttgaagctggacagtatttcaataaaatacagtgcttctgttttgaagaacaaaggcttaatccccaagaggaagtagatatgccagtgtttttctacattgatcctgaatttgctgaagatccaagaatgattaaagttgatcttatcactctttcttacactttttttgaagcaaaggaagggcacaagttgccagttccaggatataattgaagtcagcaactaagtcttccttcaaagttgtgatttttgggaaaatcatatatcctatcttctcaaaggagaaatattgtacaataatatgaaggcttatattttaaataattattttttctcaactaatttttttcacttaaacttgagagaacaagttcagcttttatcataagaaactcatatgcctagctagaatatatgactgactattcaataccatactgaagagtttgatactattaaaataagccgctttgttttttaaatatgcaggcatgggttcagcttaattccataattcccttccagattattaactcttcatacttacagcaatgaatctgacaatgtttttcaaaaatgtatgctcagggttatttgtttcaagtcataggccagaacttctaaccatgtttattgtgtctaaaagagttggttgctattttccttcattatgaatagtcagtattttaaaagctcaaagtagaagaggagtcactaagccctaacagcttgtccaaagatttaaattcttatttcaaatttgatttgtcctttaaggtttagggctattttatattcagagttctgaataattactttgaaactgtagtatcataaaattgaaataaaatacatctactaggctgttagccaaagcatcaccattacaagtccatgaatgttaaaatgtacaggtgggattgtgaagatttactgacatcaaaagttcttctggaaacaaacctttgttaaaaaaaaaaagtattaaattgttttaatagtgatttatttgtcatcaaatgtacaacttattctaaatattttcattttctgtgttctaaatagaaatattaagttgcagtaaaaagagaaaaaaaggctatttagcattacaaagaatcatatttaaaggctgcccaatgtagagtctagtgacctgttcaggacacctgaaatataattaaatgacaattatcaaggttttaacaatttataattctaaaccagaggattataaagaagtgcaaattgacttttacattcaactttagttaaatgaaggcactcagtattcttcctgaataatacattcagtttctcacattttatgctttcatctattcagaattatttcatagtaaaataatctactcttatcacagctgtgtgacgatttctaaatgtaggaaggcctgtgaaacatgacactgcagttaaattggttggcctaaggactaagtaatttttcttctgctgaagttttaagtgagtatttgttccaaacaagttctgttgaaatctcacgctgttgtcaggaatcagtgttatcctggaactgttattctatttaatcttcattatagcagaaatgtgccaccatggctttgacatgttggtaggtattgtcttccaggcttcaaagctgcacagagtctacgttttagagagttggcacctttgatgtggtagtgagctgatcatccactttcttctaaaataaagagaagaaaatggccagtattcatcctgtccttctctttccccattccttgataactctcttgtctttactgggaagctggagagtcacagtctagtagaagaaagattagaaaaatttcaactgtaggtgcctttgcaacctatcctgggagaccctaaaacatatttagttttagtgcctagagattttcactcctctaacatctctggatacagtgtccctggtcaacatgaagaagttacagaagaacgctttctgatcctggcccctaaagaatttacttgtgctaagtaataaaattcctattgatcaaaacctgaaaacttgtg

SEQ ID NO: 291743 - DNA, 949 bp, Homo sapiens
ggagaaagaggttttgctcgggtctatgtgttttttaaaactgttgacttgtataactggaaatcccatagtaagggcttatgggtgagcccacgagagttcgtaactctcatatggagaatattctccacacataaccctacctggccaggtgtgcagaccgtaacagcaaccctgctcacagcagaagataaatctgccaccatggccaaaactaaggaggaggcagacaatatgtgtgctgataacctggtgacctggcccgttgaggtgtcagtcccaatagccaacccaaactgggaccccagtgataacaagaatcaagagtggcttcatcattataggaatatgcttctcagaggtatgagggaagcaagccagtccctggtcaattggggaaatctcagagaaatagaacaaggccctaatgaaaatccatcagcattcctaaattgataataagaatgcctccagaattacaccccttgggacccagatgacccaaaagctgagtagtactttaatctcacttcatctctcagccccagatattcagagaaaactctaaaaagtggcaataaatccacatactccccctttccaactggtagacatctcctttaaggtctatagtaaagagatgtggcatctgatgaaaaggaagacaagaagatgcggcagccctacagactacttcaggaagcccaggaagaagatggcatggattagaaaaatttcaactgtaggtgcctttgcaacctatcctgggagaccctaaaacatatttagttttagtgcctagagattttcactcctctaacatctctggatacagtgtccctggtcaacatgaagaagttacagaagaacgctttctgatcctggcccctaaagaatttacttgtgctaagtaataaaattcctattgatcaaaacctgaaaacttgtg

SEQ ID NO: 291744 - DNA, 1765 bp, Homo sapiens
cgactgcaagcgctgccacctgaggagcctggtagccaaggcagcggcaggctcaacccagatctcgcgagacggagcacgcctagcggagatttgacctctcgtccctgagaggcgggtgggtgttagttcagagggttatgggagggctctggcgtcctggatggaggtgcgttcctttctgtggctggcgctggatccaccctgggtctccaaccagggctgcagagagggtagagccgtttcttaggccagagtggagtgggacaggaggtgccgagagaggactgaggtggcttgggacatggaagcgctgcagccttcgagcccggcatccagcattgcagccgccgcggcggcctaagagctcgaaccctttcacacgcgcgcaggaggaggagcggcggcggcagaacaagacgaccctcacttacgtggccgctgtcgccgtgggcatgctgggggcgtcctacgctgccgtacccctttatcggctctattgccagactactggacttggaggatcagcagttgcaggtcatgcctcagacaagattgaaaacatggtgcctgttaaagatcgaatcattaaaattagctttaatgcagatgtgcatgcaagtctccagtggaactttagacctcagcaaacagaaatatatgtggtgccaggagagactgcactggcgttttacagagctaagaatcctactgacaaaccagtaattggaatttctacatacaatattgttccatttgaagctggacagtatttcaataaaatacagtgcttctgttttgaagaacaaaggcttaatccccaagaggaagtagatatgccagtgtttttctacattgatcctgaatttgctgaagatccaagaatgattaaagttgatcttatcactctttcttacactttttttgaagcaaaggaagggcacaagttgccagttccaggatataattgaagtcagcaactaagtcttccttcaaagttgtgatttttgggaaaatcatatatcctatcttctcaaaggagaaatattgtacaataatatgaaggcttatattttaaataattattttttctcaactaatttttttcacttaaacttgagagaacaagttcagcttttatcataagaaactcatatgcctagctagaatatatgactgactattcaataccatactgaagagtttgatactattaaaataagccgctttgttttttaaatatgcaggcatgggttcagcttaattccataattcccttccagattattaactcttcatacttacagcaatgaatctgacaatgtttttcaaaaatgtatgctcagggttatttgtttcaagtcataggccagaacttctaaccatgtttattgtgtctaaaagagttggttgctattttccttcattatgaatagtcagtattttaaaagctcaaagtagaagaggagtcactaagccctaacagcttgtccaaagatttaaattcttatttcaaatttgatttgtcctttaaggtttagggctattttatattcagagttctgaataattactttgaaactgtagtatcataaaattgaaataaaatacatctactaggctgttagccaaagcatcaccattacaagtccatgaatgttaaaatgtacaggtgggattgtgaagatttactgacatcaaaagttcttctggaaacaaacctttgttaaaaaaaaaaagtattaaattgttttaatagtgattt

SEQ ID NO: 291745 - DNA, 2909 bp, Homo sapiens
cgactgcaagcgctgccacctgaggagcctggtagccaaggcagcggcaggctcaacccagatctcgcgagacggagcacgcctagcggagatttgacctctcgtccctgagaggcgggtgggtgttagttcagagggttatgggagggctctggcgtcctggatggaggtgcgttcctttctgtggctggcgctggatccaccctgggtctccaaccagggctgcagagagggtagagccgtttcttaggccagagtggagtgggacaggaggtgccgagagaggactgaggtggcttgggacatggaagcgctgcagccttcgagcccggcatccagcattgcagccgccgcggcggcctaagagctcgaaccctttcacacgcgcgcaggaggaggagcggcggcggcagaacaagacgaccctcacttacgtggccgctgtcgccgtgggcatgctgggggcgtcctacgctgccgtacccctttatcggctctattgccagactactggacttggaggatcagcagttgcaggtcatgcctcagacaagattgaaaacatggtgcctgttaaagatcgaatcattaaaattagctttaatgcagatgtgcatgcaagtctccagtggaactttagacctcagcaaacagaaatatatgtggtgccaggagagactgcactggcgttttacagagctaagaatcctactgacaaaccagtaattggaatttctacatacaatattgttccatttgaagctggacagtatttcaataaaatacagtgcttctgttttgaagaacaaaggcttaatccccaagaggaagtagatatgccagtgtttttctacattgatcctgaatttgctgaagatccaagaatgattaaagttgatcttatcactctttcttacactttttttgaagcaaaggaagggcacaagttgccagttccaggatataattgaagtcagcaactaagtcttccttcaaagttgtgatttttgggaaaatcatatatcctatcttctcaaaggagaaatattgtacaataatatgaaggcttatattttaaataattattttttctcaactaatttttttcacttaaacttgagagaacaagttcagcttttatcataagaaactcatatgcctagctagaatatatgactgactattcaataccatactgaagagtttgatactattaaaataagccgctttgttttttaaatatgcaggcatgggttcagcttaattccataattcccttccagattattaactcttcatacttacagcaatgaatctgacaatgtttttcaaaaatgtatgctcagggttatttgtttcaagtcataggccagaacttctaaccatgtttattgtgtctaaaagagttggttgctattttccttcattatgaatagtcagtattttaaaagctcaaagtagaagaggagtcactaagccctaacagcttgtccaaagatttaaattcttatttcaaatttgatttgtcctttaaggtttagggctattttatattcagagttctgaataattactttgaaactgtagtatcataaaattgaaataaaatacatctactaggctgttagccaaagcatcaccattacaagtccatgaatgttaaaatgtacaggtgggattgtgaagatttactgacatcaaaagttcttctggaaacaaacctttgttaaaaaaaaaaagtattaaattgttttaatagtgatttatttgtcatcaaatgtacaacttattctaaatattttcattttctgtgttctaaatagaaatattaagttgcagtaaaaagagaaaaaaaggctatttagcattacaaagaatcatatttaaaggctgcccaatgtagagtctagtgacctgttcaggacacctgaaatataattaaatgacaattatcaaggttttaacaatttataattctaaaccagaggattataaagaagtgcaaattgacttttacattcaactttagttaaatgaaggcactcagtattcttcctgaataatacattcagtttctcacattttatgctttcatctattcagaattatttcatagtaaaataatctactcttatcacagctgtgtgacgatttctaaatgtaggaaggcctgtgaaacatgacactgcagttaaattggttggcctaaggactaagtaatttttcttctgctgaagttttaagtgagtatttgttccaaacaagttctgttgaaatctcacgctgttgtcaggaatcagtgttatcctggaactgttattctatttaatcttcattatagcagaaatgtgccaccatggctttgacatgttggtaggtattgtcttccaggcttcaaagctgcacagagtctacgttttagagagttggcacctttgatgtggtagtgagctgatcatccactttcttctaaaataaagagaagaaaatggccagtattcatcctgtccttctctttccccattccttgataactctcttgtctttactgggaagctggagagtcacagtctagtagaagaaaggtctatagtaaagagatgtggcatctgatgaaaaggaagacaagaagatgcggcagccctacagactacttcaggaagcccaggaagaagatggcatggattagaaaaatttcaactgtaggtgcctttgcaacctatcctgggagaccctaaaacatatttagttttagtgcctagagattttcactcctctaacatctctggatacagtgtccctggtcaacatgaagaagttacagaagaacgctttctgatcctggcccctaaagaatttacttgtgctaagtaataaaattcctattgatcaaaacctgaaaacttgtg

SEQ ID NO: 291746 - DNA, 2444 bp, Homo sapiens
cgactgcaagcgctgccacctgaggagcctggtagccaaggcagcggcaggctcaacccagatctcgcgagacggagcacgcctagcggagatttgacctctcgtccctgagaggcgggtgggtgttagttcagagggttatgggagggctctggcgtcctggatggaggtgcgttcctttctgtggctggcgctggatccaccctgggtctccaaccagggctgcagagagggtagagccgtttcttaggccagagtggagtgggacaggaggtgccgagagaggactgaggtggcttgggacatggaagcgctgcagccttcgagcccggcatccagcattgcagccgccgcggcggcctaagagctcgaaccctttcacacgcgcgcaggaggaggagcggcggcggcagaacaagacgaccctcacttacgtggccgctgtcgccgtgggcatgctgggggcgtcctacgctgccgtacccctttatcggctctattgccagactactggacttggaggatcagcagttgcaggtcatgcctcagacaagattgaaaacatggtgcctgttaaagatcgaatcattaaaattagctttaatgcagatgtgcatgcaagtctccagtggaactttagacctcagcaaacagaaatatatgtggtgccaggagagactgcactggcgttttacagagctaagaatcctactgacaaaccagtaattggaatttctacatacaatattgttccatttgaagctggacagtatttcaataaaatacagtgcttctgttttgaagaacaaaggcttaatccccaagaggaagtagatatgccagtgtttttctacattgatcctgaatttgctgaagatccaagaatgattaaagttgatcttatcactctttcttacactttttttgaagcaaaggaagggcacaagttgccagttccaggatataattgaagtcagcaactaagtcttccttcaaagttgtgatttttgggcttatattttaaataattattttttctcaactaatttttttcacttaaacttgagagaacaagttcagcttttatcataagaaactcatatgcctagctagaatatatgactgactattcaataccatactgaagagtttgatactattaaaataagccgctttgttttttaaatatgcaggcatgggttcagcttaattccataattcccttccagattattaactcttcatacttacagcaatgaatctgacaatgtttttcaaaaatgtatgctcagggttatttgtttcaagtcataggccagaacttctaaccatgtttattgtgtctaaaagagttggttgctattttccttcattatgaatagtcagtattttaaaagctcaaagtagaagaggagtcactaagccctaacagcttgtccaaagatttaaattcttatttcaaatttgatttgtcctttaaggtttagggctattttatattcagagttctgaataattactttgaaactgtagtatcataaaattgaaataaaatacatctactaggctgttagccaaagcatcaccattacaagtccatgaatgttaaaatgtacaggtgggattgtgaagatttactgacatcaaaagttcttctggaaacaaacctttgttaaaaaaaaaaagtattaaattgttttaatagtgatttatttgtcatcaaatgtacaacttattctaaatattttcattttctgtgttctaaatagaaatattaagttgcagtaaaaagagaaaaaaaggctatttagcattacaaagaatcatatttaaaggctgcccaatgtagagtctagtgacctgttcaggacacctgaaatataattaaatgacaattatcaaggttttaacaatttataattctaaaccagaggattataaagaagtgcaaattgacttttacattcaactttagttaaatgaaggcactcagtattcttcctgaataatacattcagtttctcacattttatgctttcatctattcagaattatttcatagtaaaataatctactcttatcacagctgtgtgacgatttctaaatgtaggaaggcctgtgaaacatgacactgcagttaaattggttggcctaaggactaagtaatttttcttctgctgaagttttaagtgagtatttgttccaaacaagttctgttgaaatctcacgctgttgtcaggaatcagtgttatcctggaactgttattctatttaatcttcattatagcagaaatgtgccaccatggctttgacatgttggtaggtattgtcttccaggcttcaaagctgcacagagtctacgttttagagagttggcacctttgatgtggtagtgagctgatcatccactttcttctaaaataaagagaagaaaatggccagta

SEQ ID NO: 291747 - DNA, 1254 bp, Homo sapiens
cgactgcaagcgctgccacctgaggagcctggtagccaaggcagcggcaggctcaacccagatctcgcgagacggagcacgcctagcggagatttgacctctcgtccctgagaggcgggtgggtgttagttcagagggttatgggagggctctggcgtcctggatggaggtgcgttcctttctgtggctggcgctggatccaccctgggtctccaaccagggctgcagagagggtagagccgtttcttaggccagagtggagtgggacaggaggtgccgagagaggactgaggtggcttgggacatggaagcgctgcagccttcgagcccggcatccagcattgcagccgccgcggcggcctaagagctcgaaccctttcacacgcgcgcaggaggaggagcggcggcggcagaacaagacgaccctcacttacgtggccgctgtcgccgtgggcatgctgggggcgtcctacgctgccgtacccctttatcggctctattgccagactactggacttggaggatcagcagttgcaggtcatgcctcagacaagattgaaaacatggtgcctgttaaagatcgaatcattaaaattagctttaatgcagatgtgcatgcaagtctccagtggaactttagacctcagcaaacagaaatatatgtggtgccaggagagactgcactggcgttttacagagctaagaatcctactgacaaaccagtaattggaatttctacatacaatattgttccatttgaagctggacagtatttcaataaaatacagagattcctagattcttttggaaaccagcagttatttggaggagagtccttttttctggccttgacagccaccctggaagttccctgctcctgacttagcggctcagacagcagaggacagaggacagttgttttccttaccatttgtactccttccatcagagtatgcccgtgggccctcactgacccccaaggtgggtgccaccctgctgatgactccctaggcttatgctgaagcctccaaaagcccctgcagttataagggggcagccaaccagggagccagtattatctgggcgttctaactgtattgacgtgactccttcagatgggtatgagaaacctttgaaaaaatacaccctaaagaattctttgtttatgacatagggttagagggggaaaaaatgaataaataaaataaataaataaataaataaatcaataaaaaaccaaaaccaaaaacacca

SEQ ID NO: 291748 - DNA, 2490 bp, Homo sapiens
gagatgaggtttcaccatgttggccaggctggtcttgaactcccagcctcaagtgattcacctgcctgtacctcccaaagtgctgggattaaaggcgtgagccactgcacccagcctcagattgtatttattttaaaacctattacttactttgcaaagctcttttacataccttgtgttatttgattccaacaactcagagcggtccagtaggatggataatgttcttattttacagatgaggaaactgagatacaggaaggtgagttacagaactctggctactgttctgctcatctcccagccccgtgaattttcatctctctcttcccccagtttatttatggagattcttagttcctgttcagattgtgatgagatccaattcatggaagatggatcctggtgcccaatgaaacccaagaaggaggcatctgaggcctccagtacagcccagtccaggggggagatccatcagagaataagaagaaggtcgaagttattgacttgacaatagaaagctcatcagatgaggaggatctgccccctaccaagaagcactgttctgtcacctcagctgccatcccggccctacctggaagcaaaggagtcctgacatctggccaccagccatcctcggtgctaaggagccctgctatgggcacgttgggtggggatttcctgtccagtctcccactacatgagtacccacctgccttcccactgggagccgacatccaaggtttagatttattttcatttcttcagacagagagtcaggtaagtggttctttcttcagaaggtctcagatctctgaagcttcctttctagacactgatggggcccctccctctcttatgatctctggggatgtaaatctgctttcccgtgagggcagtggggtgtaggtatcttattatctcctcagccccactggtagttcctgagattcctacttaggcctccttcctagatcccctgttacttttctgccctggcctactcacccctacccccgtgtgcacttagagcaccatgcctgctctaaccggacattccacacatttcagacgcccacaaagccaagaacctaacaagttggaggagctctctcaaggcagggaaaggggaagggtgtagggaagtaggggaaagagggagaggctctcctgcttctcaagagaataccttcggatccacaggggttgattgctctcatacggcatttctgagatgagtgactgggaggtggggaagtcgggattgagatcttaaactatgcccttgattcttcctagcactatggcccctctgtcatcacctcactagatgaacaggatgcccttggccacttcttccagtaccgagggaccccttctcactttctgggcccactggcccccacgctggggagctcccactgcagcgccactccggcgccccctcctggccgtgtcagcagcattgtggcccctgggggggccttgagggaggggcatggaggacccctgccctcaggtccctctttgactggctgtcggtcagacatcatttccctggactgagttccctggattatggaaacttcgctgtcccccaacactgagcaagtatgctgtggagtcccaaccccagctactctgatccctctgggggctctggccaagggccagacagaccttcacagatgcctacttttggcctcatctctgcctgacaaggccagcacccaaagggttaatatttaacctctttttaaggacactggggtctgtttctggaaatgttctttagatggtggcacattcctttgggtatgttaacctaggcagtgggaggcaaatgggatggtatgtgagctaggagaagggctgaaccctcagccttgactatgtctagagcctcttggggaaggggcacctctcttgaaccccaaatgctctctcttcttattacccaaacccatggctctatttcttcttcacatccattgtctcttcatgtctattccattcccttcggccaaacagacaggtggaaaaactgagacaggcagtttcagagatggacagagaactttattttggattgtggatgtggacttttttgtacataaataagaaaaaccaaaatactccaaagatgacttcccctgcctcctactccagtatgacagaggaggatgtaaggccttagccatgatctgcaggggtctgggagtcaggcccggcctattgcttgggtctctctctatttatatatctaagttcacagtgtttcttattcccccctaagcttctagaggctcatggccctgtagttaggcctggctcattctgcacctttccagggaggtggaaggaccctgtgccctccttcccaatcttctttttcaggctcgccaaggcctaggacctatgttgtaattttactttttatttctaaagttgtagtgaagctctcacccataataaaggttgtgaatgttc

SEQ ID NO: 291749 - DNA, 1639 bp, Homo sapiens
atatgggctctccggactggaaagaatcttaggggtcctctaatctaaccctcacatgatgcttcaactcctccagatcatctctaacatagccagagtgtcacgctatgtttaagcatcttcagggatgggaaaatcccccacacccagccttcatcatccatatcccagaccacttccatgtgacgtcccactggcccccaaagacgctccacccagcagcctctcagccagagccatctgttcctggccttaccaactcctgggcttcctccagccttgctgaccccatggctctggcctcacttttgtttcagtcaaggagaaattgactgctgaccctgacagtgaggtggccactacaagtctccgggtgtcactcatgtgcccggtgggtaaaaggggagaagggaacagggtgggaagggagttgggtttagcctgtggactttgatgagggttcctagggatactggcgtgaagttttctgggatgaaatcagagtagggcctctgacaagagaacttgcttctcctcagctagggaagatgcgcctgactgtcccttgtcgtgccctcacctgcgcccacctgcagagcttcgatgctgccctttatctacagatgaatgagaagaagcctacatggacatgtcctgtgtgtgacaagaaggctccctatgaatctcttatcattgatgggtagggccattttgcttcctcttacctgggacatccactagaacctcttttcttggttatttctttttctttttcttttcttttttttttttttgagatggaatcttactctgttccccaggctggagtgcagtggcacaatcttggctcactgcaacctccacctcccgggttcaggcgatactcctgcctcagcctcctgagtagctgggattacaggcacccaccaccatgcctggctaatttttgtatttttagtaaagactgggtttcaccatgttggccaggctggtcttgaactcctgacctcaggtgatctgcccacttcagcctcctaaagtgctgggattacaggcatgagacaacatgcccagcctataatatttcttttttcttttagccaccacctccttcagggtttttaattcatatggcttacttcccctcacatgaactgcaattctcaccttatctatcccttttaccagtctgtgtgtgtgtgtgtgtatgtgcatgtgtgtggagggggagggcaacattaaggacttagtatatacaaggcatcttgctgagcactttgcatgagttatctcattgaatcctcacaataaccctatggactcggctcctacctgtaattccaacactggaaggctgagatgggaagatcatttgaggctgggagtttgagaccagcctgggcaacatggtagaccctctctctataaaaaattaaaaaaattagccaggcatgttataatagctcatgactgtagtcttagctgctcaggaggctgaggcgggaggatggcttgaacccaggagtttgaggctgcagtgagctatgattgcattactgcaccccagcctgggcaacagattgagaccctgtctcaaaaaaagaaataatcctatgattggctagtgacactcacccag

SEQ ID NO: 291750 - DNA, 2923 bp, Homo sapiens
cggccgccgcgtccggctgctggaccgaacttctgccgtgcggacagcaggagcagcgccgagccccattcccccacctctccagctcgccctctgagcctcccgagccctctctccatttcccacaattgtgctgcacatggtgatgagtttccgggtgtctgagctccaggtgcttcttggctttgctggccggaacaagagtggacggaagcacgagctcctggccaaggctctgcacctcctgaagtccagctgtgcccctagtgtccagatgaagatcaaagagctttaccgacgacgctttccccggaagaccctggggccctctgatctctcccttctctctttgccccctggcacctctcctgtaggctcccctggtcctctagctcccattcccccaacgctgttggcccctggcaccctgctgggccccaagcgtgaggtggacatgcacccccctctgccccagcctgtgcaccctgatgtcaccatgaaaccattgcccttctatgaagtctatggggagctcatccggcccaccacccttgcatccacttctagccagcggtttgaggaagcgcactttacctttgccctcacaccccagcaagtgcagcagattcttacatccagagaggttctgccaggagccaaatgtgattataccatacaggtgcagctaaggttctgtctctgtgagaccagctgcccccaggaagattattttccccccaacctctttgtcaaggtcaatgggaaactgtgccccctgccgggttaccttcccccaaccaagaatggggccgagcccaagaggcccagccgccccatcaacatcacacccctggctcgactctcagccactgttcccaacaccattgtggtcaattggtcatctgagttcggacggaattactccttgtctgtgtacctggtgaggcagttgactgcaggaacccttctacaaaaactcagagcaaagggtatccggaacccagaccactcgcgggcactgatcaaggagaaattgactgctgaccctgacagtgaggtggccactacaagtctccgggtgtcactcatgtgcccgctagggaagatgcgcctgactgtcccttgtcgtgccctcacctgcgcccacctgcagagcttcgatgctgccctttatctacagatgaatgagaagaagcctacatggacatgtcctgtgtgtgacaagaaggctccctatgaatctcttatcattgatggtttatttatggagattcttagttcctgttcagattgtgatgagatccaattcatggaagatggatcctggtgcccaatgaaacccaagaaggaggcatctgaggtttgccccccgccagggtatgggctggatggcctccagtacagcccagtccaggggggagatccatcagagaataagaagaaggtcgaagttattgacttgacaatagaaagctcatcagatgaggaggatctgccccctaccaagaagcactgttctgtcacctcagctgccatcccggccctacctggaagcaaaggagtcctgacatctggccaccagccatcctcggtgctaaggagccctgctatgggcacgttgggtggggatttcctgtccagtctcccactacatgagtacccacctgccttcccactgggagccgacatccaaggtttagatttattttcatttcttcagacagagagtcagcactatggcccctctgtcatcacctcactagatgaacaggatgcccttggccacttcttccagtaccgagggaccccttctcactttctgggcccactggcccccacgctggggagctcccactgcagcgccactccggcgccccctcctggccgtgtcagcagcattgtggcccctgggggggccttgagggaggggcatggaggacccctgccctcaggtccctctttgactggctgtcggtcagacatcatttccctggactgagttccctggattatggaaacttcgctgtcccccaacactgagcaagtatgctgtggagtcccaaccccagctactctgatccctctgggggctctggccaagggccagacagaccttcacagatgcctacttttggcctcatctctgcctgacaaggccagcacccaaagggttaatatttaacctctttttaaggacactggggtctgtttctggaaatgttctttagatggtggcacattcctttgggtatgttaacctaggcagtgggaggcaaatgggatggtatgtgagctaggagaagggctgaaccctcagccttgactatgtctagagcctcttggggaaggggcacctctcttgaaccccaaatgctctctcttcttattacccaaacccatggctctatttcttcttcacatccattgtctcttcatgtctattccattcccttcggccaaacagacaggtggaaaaactgagacaggcagtttcagagatggacagagaactttattttggattgtggatgtggacttttttgtacataaataagaaaaaccaaaatactccaaagatgacttcccctgcctcctactccagtatgacagaggaggatgtaaggccttagccatgatctgcaggggtctgggagtcaggcccggcctattgcttgggtctctctctatttatatatctaagttcacagtgtttcttattcccccctaagcttctagaggctcatggccctgtagttaggcctggctcattctgcacctttccagggaggtggaaggaccctgtgccctccttcccaatcttctttttcaggctcgccaaggcctaggacctatgttgtaattttactttttatttctaaagttgtagtgaagctctcacccataataaaggttgtgaatgttc

SEQ ID NO: 291751 - DNA, 3021 bp, Homo sapiens
ggcatttgcggccggcgccagggtggagagttgtgcgccggtccctgggcctgagctccggctccggctggggcgcctgcgatgtctcaagatggcggagctgggcgaattaaagcacatggtgatgagtttccgggtgtctgagctccaggtgcttcttggctttgctggccggaacaagagtggacggaagcacgagctcctggccaaggctctgcacctcctgaagtccagctgtgcccctagtgtccagatgaagatcaaagagctttaccgacgacgctttccccggaagaccctggggccctctgatctctcccttctctctttgccccctggcacctctcctgtaggctcccctggtcctctagctcccattcccccaacgctgttggcccctggcaccctgctgggccccaagcgtgaggtggacatgcacccccctctgccccagcctgtgcaccctgatgtcaccatgaaaccattgcccttctatgaagtctatggggagctcatccggcccaccacccttgcatccacttctagccagcggtttgaggaagcgcactttacctttgccctcacaccccagcaagtgcagcagattcttacatccagagaggttctgccaggagccaaatgtgattataccatacaggtgcagctaaggttctgtctctgtgagaccagctgcccccaggaagattattttccccccaacctctttgtcaaggtcaatgggaaactgtgccccctgccgggttaccttcccccaaccaagaatggggccgagcccaagaggcccagccgccccatcaacatcacacccctggctcgactctcagccactgttcccaacaccattgtggtcaattggtcatctgagttcggacggaattactccttgtctgtgtacctggtgaggcagttgactgcaggaacccttctacaaaaactcagagcaaagggtatccggaacccagaccactcgcgggcactgatcaaggagaaattgactgctgaccctgacagtgaggtggccactacaagtctccgggtgtcactcatgtgcccgctagggaagatgcgcctgactgtcccttgtcgtgccctcacctgcgcccacctgcagagcttcgatgctgccctttatctacagatgaatgagaagaagcctacatggacatgtcctgtgtgtgacaagaaggctccctatgaatctcttatcattgatggtttatttatggagattcttagttcctgttcagattgtgatgagatccaattcatggaagatggatcctggtgcccaatgaaacccaagaaggaggcatctgaggtttgccccccgccagggtatgggctggatggcctccagtacagcccagtccaggggggagatccatcagagaataagaagaaggtcgaagttattgacttgacaatagaaagctcatcagatgaggaggatctgccccctaccaagaagcactgttctgtcacctcagctgccatcccggccctacctggaagcaaaggagtcctgacatctggccaccagccatcctcggtgctaaggagccctgctatgggcacgttgggtggggatttcctgtccagtctcccactacatgagtacccacctgccttcccactgggagccgacatccaaggtttagatttattttcatttcttcagacagagagtcagcactatggcccctctgtcatcacctcactagatgaacaggatgcccttggccacttcttccagtaccgagggaccccttctcactttctgggcccactggcccccacgctggggagctcccactgcagcgccactccggcgccccctcctggccgtgtcagcagcattgtggcccctgggggggccttgagggaggggcatggaggacccctgccctcaggtccctctttgactggctgtcggtcagacatcatttccctggactgagttccctggattatggaaacttcgctgtcccccaacactgagcaagtatgctgtggagtcccaaccccagctactctgatccctctgggggctctggccaagggccagacagaccttcacagatgcctacttttggcctcatctctgcctgacaaggccagcacccaaagggttaatatttaacctctttttaaggacactggggtctgtttctggaaatgttctttagatggtggcacattcctttgggtatgttaacctaggcagtgggaggcaaatgggatggtatgtgagctaggagaagggctgaaccctcagccttgactatgtctagagcctcttggggaaggggcacctctcttgaaccccaaatgctctctcttcttattacccaaacccatggctctatttcttcttcacatccattgtctcttcatgtctattccattcccttcggccaaacagacaggtggaaaaactgagacaggcagtttcagagatggacagagaactttattttggattgtggatgtggacttttttgtacataaataagaaaaaccaaaatactccaaagatgacttcccctgcctcctactccagtatgacagaggaggatgtaaggccttagccatgatctgcaggggtctgggagtcaggcccggcctattgcttgggtctctctctatttatatatctaagttcacagtgtttcttattcccccctaagcttctagaggctcatggccctgtagttaggcctggctcattctgcacctttccagggaggtggaaggaccctgtgccctccttcccaatcttctttttcaggctcgccaaggcctaggacctatgttgtaattttactttttatttctaaagttgtagtgaagctctcacccataataaaggttgtgaatgttcaaaaaaaaaaaaaaaaattttgggggggggccggcccccaattcccctttaggggaggtgtataacaatcttgcggccggcatttaaaacctcagggatggagaaaacccggcggaacc

SEQ ID NO: 291752 - DNA, 2990 bp, Homo sapiens
ggcatttgcggccggcgccagggtggagagttgtgcgccggtccctgggcctgagctccggctccggctggggcgcctgcgatgtctcaagatggcggagctgggcgaattaaagcacatggtgatgagtttccgggtgtctgagctccaggtgcttcttggctttgctggccggaacaagagtggacggaagcacgagctcctggccaaggctctgcacctcctgaagtccagctgtgcccctagtgtccagatgaagatcaaagagctttaccgacgacgctttccccggaagaccctggggccctctgatctctcccttctctctttgccccctggcacctctcctgtaggctcccctggtcctctagctcccattcccccaacgctgttggcccctggcaccctgctgggccccaagcgtgaggtggacatgcacccccctctgccccagcctgtgcaccctgatgtcaccatgaaaccattgcccttctatgaagtctatggggagctcatccggcccaccacccttgcatccacttctagccagcggtttgaggaagcgcactttacctttgccctcacaccccagcaagtgcagcagattcttacatccagagaggttctgccaggagccaaatgtgattataccatacaggtgcagctaaggttctgtctctgtgagaccagctgcccccaggaagattattttccccccaacctctttgtcaaggtcaatgggaaactgtgccccctgccgggttaccttcccccaaccaagaatggggccgagcccaagaggcccagccgccccatcaacatcacacccctggctcgactctcagccactgttcccaacaccattgtggtcaattggtcatctgagttcggacggaattactccttgtctgtgtacctggtgaggcagttgactgcaggaacccttctacaaaaactcagagcaaagggtatccggaacccagaccactcgcgggcactgatcaaggagaaattgactgctgaccctgacagtgaggtggccactacaagtctccgggtgtcactcatgtgcccgctagggaagatgcgcctgactgtcccttgtcgtgccctcacctgcgcccacctgcagagcttcgatgctgccctttatctacagatgaatgagaagaagcctacatggacatgtcctgtgtgtgacaagaaggctccctatgaatctcttatcattgatggtttatttatggagattcttagttcctgttcagattgtgatgagatccaattcatggaagatggatcctggtgcccaatgaaacccaagaaggaggcatctgaggcctccagtacagcccagtccaggggggagatccatcagagaataagaagaaggtcgaagttattgacttgacaatagaaagctcatcagatgaggaggatctgccccctaccaagaagcactgttctgtcacctcagctgccatcccggccctacctggaagcaaaggagtcctgacatctggccaccagccatcctcggtgctaaggagccctgctatgggcacgttgggtggggatttcctgtccagtctcccactacatgagtacccacctgccttcccactgggagccgacatccaaggtttagatttattttcatttcttcagacagagagtcagcactatggcccctctgtcatcacctcactagatgaacaggatgcccttggccacttcttccagtaccgagggaccccttctcactttctgggcccactggcccccacgctggggagctcccactgcagcgccactccggcgccccctcctggccgtgtcagcagcattgtggcccctgggggggccttgagggaggggcatggaggacccctgccctcaggtccctctttgactggctgtcggtcagacatcatttccctggactgagttccctggattatggaaacttcgctgtcccccaacactgagcaagtatgctgtggagtcccaaccccagctactctgatccctctgggggctctggccaagggccagacagaccttcacagatgcctacttttggcctcatctctgcctgacaaggccagcacccaaagggttaatatttaacctctttttaaggacactggggtctgtttctggaaatgttctttagatggtggcacattcctttgggtatgttaacctaggcagtgggaggcaaatgggatggtatgtgagctaggagaagggctgaaccctcagccttgactatgtctagagcctcttggggaaggggcacctctcttgaaccccaaatgctctctcttcttattacccaaacccatggctctatttcttcttcacatccattgtctcttcatgtctattccattcccttcggccaaacagacaggtggaaaaactgagacaggcagtttcagagatggacagagaactttattttggattgtggatgtggacttttttgtacataaataagaaaaaccaaaatactccaaagatgacttcccctgcctcctactccagtatgacagaggaggatgtaaggccttagccatgatctgcaggggtctgggagtcaggcccggcctattgcttgggtctctctctatttatatatctaagttcacagtgtttcttattcccccctaagcttctagaggctcatggccctgtagttaggcctggctcattctgcacctttccagggaggtggaaggaccctgtgccctccttcccaatcttctttttcaggctcgccaaggcctaggacctatgttgtaattttactttttatttctaaagttgtagtgaagctctcacccataataaaggttgtgaatgttcaaaaaaaaaaaaaaaaattttgggggggggccggcccccaattcccctttaggggaggtgtataacaatcttgcggccggcatttaaaacctcagggatggagaaaacccggcggaacc

SEQ ID NO: 291753 - DNA, 702 bp, Homo sapiens
ctcggctctaccttgtctctcggctctaccattgtctctcttcttattacccaaacccatggctctatttcttcttcacatccattgtctcttcatgtctattccattcccttcggccaaacagacaggtggaaaaactgagacaggcagtttcagagatggacagagaactttattttggattgtggatgtggacttttttgtacataaataagaaaaaccaaaatactccaaagatgacttcccctgcctcctactccagtatgacagaggaggatgtaaggccttagccatgatctgcaggggtctgggagtcaggcccggcctattgcttgggtctctctctatttatatatctaagttcacagtgtttcttattcccccctaagcttctagaggctcatggccctgtagttaggcctggctcattctgcacctttccagggaggtggaaggaccctgtgccctccttcccaatcttctttttcaggctcgccaaggcctaggacctatgttgtaattttactttttatttctaaagttgtagtgaagctctcacccataataaaggttgtgaatgttcaaaaaaaaaaaaaaaaattttgggggggggccggcccccaattcccctttaggggaggtgtataacaatcttgcggccggcatttaaaacctcagggatggagaaaacccggcggaacc

SEQ ID NO: 291754 - DNA, 2175 bp, Homo sapiens
ggcatttgcggccggcgccagggtggagagttgtgcgccggtccctgggcctgagctccggctccggctggggcgcctgcgatgtctcaagatggcggagctgggcgaattaaagcacatggtgatgagtttccgggtgtctgagctccaggtgcttcttggctttgctggccggaacaagagtggacggaagcacgagctcctggccaaggctctgcacctcctgaagtccagctgtgcccctagtgtccagatgaagatcaaagagctttaccgacgacgctttccccggaagaccctggggccctctgatctctcccttctctctttgccccctggcacctctcctgtaggctcccctggtcctctagctcccattcccccaacgctgttggcccctggcaccctgctgggccccaagcgtgaggtggacatgcacccccctctgccccagcctgtgcaccctgatgtcaccatgaaaccattgcccttctatgaagtctatggggagctcatccggcccaccacccttgcatccacttctagccagcggtttgaggaagcgcactttacctttgccctcacaccccagcaagtgcagcagattcttacatccagagaggttctgccaggagccaaatgtgattataccatacaggtgcagctaaggttctgtctctgtgagaccagctgcccccaggaagattattttccccccaacctctttgtcaaggtcaatgggaaactgtgccccctgccgggttaccttcccccaaccaagaatggggccgagcccaagaggcccagccgccccatcaacatcacacccctggctcgactctcagccactgttcccaacaccattgtggtcaattggtcatctgagttcggacggaattactccttgtctgtgtacctggtgaggcagttgactgcaggaacccttctacaaaaactcagagcaaagggtatccggaacccagaccactcgcgggcactgatcaaggagaaattgactgctgaccctgacagtgaggtggccactacaagtctccgggtgtcactcatgtgcccgctagggaagatgcgcctgactgtcccttgtcgtgccctcacctgcgcccacctgcagagcttcgatgctgccctttatctacagatgaatgagaagaagcctacatggacatgtcctgtgtgtgacaagaaggctccctatgaatctcttatcattgatgggtagggccattttgcttcctcttacctgggacatccactagaacctcttttcttggttatttctttttctttttcttttcttttttttttttttgagatggaatcttactctgttccccaggctggagtgcagtggcacaatcttggctcactgcaacctccacctcccgggttcaggcgatactcctgcctcagcctcctgagtagctgggattacaggcacccaccaccatgcctggctaatttttgtatttttagtaaagactgggtttcaccatgttggccaggctggtcttgaactcctgacctcaggtgatctgcccacttcagcctcctaaagtgctgggattacaggcatgagacaacatgcccagcctataatatttcttttttcttttagccaccacctccttcagggtttttaattcatatggcttacttcccctcacatgaactgcaattctcaccttatctatcccttttaccagtctgtgtgtgtgtgtgtgtatgtgcatgtgtgtggagggggagggcaacattaaggacttagtatatacaaggcatcttgctgagcactttgcatgagttatctcattgaatcctcacaataaccctatggactcggctcctacctgtaattccaacactggaaggctgagatgggaagatcatttgaggctgggagtttgagaccagcctgggcaacatggtagaccctctctctataaaaaattaaaaaaattagccaggcatgttataatagctcatgactgtagtcttagctgctcaggaggctgaggcgggaggatggcttgaacccaggagtttgaggctgcagtgagctatgattgcattactgcaccccagcctgggcaacagattgagaccctgtctcaaaaaaagaaataatcctatgattggctagtgacactcacccag

SEQ ID NO: 291755 - DNA, 867 bp, Homo sapiens
ggcatttgcggccggcgccagggtggagagttgtgcgccggtccctgggcctgagctccggctccggctggggcgcctgcgatgtctcaagatggcggagctgggcgaattaaagcacatggtgatgagtttccgggtgtctgagctccaggtgcttcttggctttgctggccggaacaagagtggacggaagcacgagctcctggccaaggctctgcacctcctgaagtccagctgtgcccctagtgtccagatgaagatcaaagagctttaccgacgacgctttccccggaagaccctggggccctctgatctctcccttctctctttgccccctggcacctctcctgtaggctcccctggtcctctagctcccattcccccaacgctgttggcccctggcaccctgctgggccccaagcgtgaggtggacatgcacccccctctgccccagcctgtgcaccctgatgtcaccatgaaaccattgcccttctatgaagtctatggggagctcatccggcccaccacccttggtatggctctttgtggtcccttagtcttctggactccctacctgttccccaaacatttcttaggctttagtcctatgggatcagtgacctgggatgggggcgatttctgtggctgcctgtgcatgggcttggaataactgcccctttgtatcctcagcatccacttctagccagcggtttgaggaagcgcactttacctttgccctcacaccccagcaagtgcagcagattcttacatccagacgttgtccttttcccctggttctaggaacttttgactggagagaatcacagatgtggaatatttgtcataaataaataatgaaaacctaaa

SEQ ID NO: 291756 - DNA, 242 bp, Homo sapiens
cccaaccaagaatggggccgagcccaagaggcccagccgccccatcaacatcacacccctggctcgactctcagccactgttcccaacaccattgtggtcaattggtcatctgagttcggacgggtgagcacagctaaagcaggtgcctggaaaagcctgctgagggtgaaggggaaccatccagtgtcctgggttggggaagcattttcctctttatgagtctgtctctggtcctcatgga

SEQ ID NO: 291757 - DNA, 2902 bp, Homo sapiens
ggcatttgcggccggcgccagggtggagagttgtgcgccggtccctgggcctgagctccggctccggctggggcgcctgcgatgtctcaagatggcggagctgggcgaattaaagcacatggtgatgagtttccgggtgtctgagctccaggtgcttcttggctttgctggccggaacaagagtggacggaagcacgagctcctggccaaggctctgcacctcctgaagtccagctgtgcccctagtgtccagatgaagatcaaagagctttaccgacgacgctttccccggaagaccctggggccctctgatctctcccttctctctttgccccctggcacctctcctgtaggctcccctggtcctctagctcccattcccccaacgctgttggcccctggcaccctgctgggccccaagcgtgaggtggacatgcacccccctctgccccagcctgtgcaccctgatgtcaccatgaaaccattgcccttctatgaagtctatggggagctcatccggcccaccacccttgcatccacttctagccagcggtttgaggaagcgcactttacctttgccctcacaccccagcaagtgcagcagattcttacatccagagaggttctgccaggagccaaatgtgattataccatacaggtgcagctaaggttctgtctctgtgagaccagctgcccccaggaagattattttccccccaacctctttgtcaaggtcaatgggaaactgtgccccctgccgggttaccttcccccaaccaagaatggggccgagcccaagaggcccagccgccccatcaacatcacacccctggctcgactctcagccactgttcccaacaccattgtggtcaattggtcatctgagttcggacggaattactccttgtctgtgtacctggtgaggcagttgactgcaggaacccttctacaaaaactcagagcaaagggtatccggaacccagaccactcgcgggcactgatcaaggagaaattgactgctgaccctgacagtgaggtggccactacaagtctccgggtgtcactcatgtgcccgctagggaagatgcgcctgactgtcccttgtcgtgccctcacctgcgcccacctgcagagcttcgatgctgccctttatctacagatgaatgagaagaagcctacatggacatgtcctgtgtgtgacaagaaggctccctatgaatctcttatcattgatggtttatttatggagattcttagttcctgttcagattgtgatgagatccaattcatggaagatggatcctggtgcccaatgaaacccaagaaggaggcatctgaggtttgccccccgccagggtatgggctggatggcctccagtacagcccagtccaggggggagatccatcagagaataagaagaaggtcgaagttattgacttgacaatagaaagctcatcagatgaggaggatctgccccctaccaagaagcactgttctgtcacctcagctgccatcccggccctacctggaagcaaaggagtcctgacatctggccaccagccatcctcggtgctaaggagccctgctatgggcacgttgggtggggatttcctgtccagtctcccactacatgagtacccacctgccttcccactgggagccgacatccaaggtttagatttattttcatttcttcagacagagagtcagcactatggcccctctgtcatcacctcactagatgaacaggatgcccttggccacttcttccagtaccgagggaccccttctcactttctgggcccactggcccccacgctggggagctcccactgcagcgccactccggcgccccctcctggccgtgtcagcagcattgtggcccctgggggggccttgagggaggggcatggaggacccctgccctcaggtccctctttgactggctgtcggtcagacatcatttccctggactgagttccctggattatggaaacttcgctgtcccccaacactgagcaagtatgctgtggagtcccaaccccagctactctgatccctctgggggctctggccaagggccagacagaccttcacagatgcctacttttggcctcatctctgcctgacaaggccagcacccaaagggttaatatttaacctctttttaaggacactggggtctgtttctggaaatgttctttagatggtggcacattcctttgggtatgttaacctaggcagtgggaggcaaatgggatggtatgtgagctaggagaagggctgaaccctcagccttgactatgtctagagcctcttggggaaggggcacctctcttgaaccccaaatgctctctcttcttattacccaaacccatggctctatttcttcttcacatccattgtctcttcatgtctattccattcccttcggccaaacagacaggtggaaaaactgagacaggcagtttcagagatggacagagaactttattttggattgtggatgtggacttttttgtacataaataagaaaaaccaaaatactccaaagatgacttcccctgcctcctactccagtatgacagaggaggatgtaaggccttagccatgatctgcaggggtctgggagtcaggcccggcctattgcttgggtctctctctatttatatatctaagttcacagtgtttcttattcccccctaagcttctagaggctcatggccctgtagttaggcctggctcattctgcacctttccagggaggtggaaggaccctgtgccctccttcccaatcttctttttcaggctcgccaaggcctaggacctatgttgtaattttactttttatttctaaagttgtagtgaagctctcacccataataaaggttgtgaatgttc

SEQ ID NO: 291758 - DNA, 3059 bp, Homo sapiens
ggcatttgcggccggcgccagggtggagagttgtgcgccggtccctgggcctgagctccggctccggctggggcgcctgcgatgtctcaagatggcggagctgggcgaattaaagcacatggtgatgagtttccgggtgtctgagctccaggtgcttcttggctttgctggccggaacaagagtggacggaagcacgagctcctggccaaggctctgcacctcctgaagtccagctgtgcccctagtgtccagatgaagatcaaagagctttaccgacgacgctttccccggaagaccctggggccctctgatctctcccttctctctttgccccctggcacctctcctgtaggctcccctggtcctctagctcccattcccccaacgctgttggcccctggcaccctgctgggccccaagcgtgaggtggacatgcacccccctctgccccagcctgtgcaccctgatgtcaccatgaaaccattgcccttctatgaagtctatggggagctcatccggcccaccacccttggtatggctctttgtggtcccttagtcttctggactccctacctgttccccaaacatttcttaggctttagtcctatgggatcagtgacctgggatgggggcgatttctgtggctgcctgtgcatgggcttggaataactgcccctttgtatcctcagcatccacttctagccagcggtttgaggaagcgcactttacctttgccctcacaccccagcaagtgcagcagattcttacatccagagaggttctgccaggagccaaatgtgattataccatacaggtgcagctaaggttctgtctctgtgagaccagctgcccccaggaagattattttccccccaacctctttgtcaaggtcaatgggaaactgtgccccctgccgggttaccttcccccaaccaagaatggggccgagcccaagaggcccagccgccccatcaacatcacacccctggctcgactctcagccactgttcccaacaccattgtggtcaattggtcatctgagttcggacggaattactccttgtctgtgtacctggtgaggcagttgactgcaggaacccttctacaaaaactcagagcaaagggtatccggaacccagaccactcgcgggcactgatcaaggagaaattgactgctgaccctgacagtgaggtggccactacaagtctccgggtgtcactcatgtgcccgctagggaagatgcgcctgactgtcccttgtcgtgccctcacctgcgcccacctgcagagcttcgatgctgccctttatctacagatgaatgagaagaagcctacatggacatgtcctgtgtgtgacaagaaggctccctatgaatctcttatcattgatggtttatttatggagattcttagttcctgttcagattgtgatgagatccaattcatggaagatggatcctggtgcccaatgaaacccaagaaggaggcatctgaggtttgccccccgccagggtatgggctggatggcctccagtacagcccagtccaggggggagatccatcagagaataagaagaaggtcgaagttattgacttgacaatagaaagctcatcagatgaggaggatctgccccctaccaagaagcactgttctgtcacctcagctgccatcccggccctacctggaagcaaaggagtcctgacatctggccaccagccatcctcggtgctaaggagccctgctatgggcacgttgggtggggatttcctgtccagtctcccactacatgagtacccacctgccttcccactgggagccgacatccaaggtttagatttattttcatttcttcagacagagagtcagcactatggcccctctgtcatcacctcactagatgaacaggatgcccttggccacttcttccagtaccgagggaccccttctcactttctgggcccactggcccccacgctggggagctcccactgcagcgccactccggcgccccctcctggccgtgtcagcagcattgtggcccctgggggggccttgagggaggggcatggaggacccctgccctcaggtccctctttgactggctgtcggtcagacatcatttccctggactgagttccctggattatggaaacttcgctgtcccccaacactgagcaagtatgctgtggagtcccaaccccagctactctgatccctctgggggctctggccaagggccagacagaccttcacagatgcctacttttggcctcatctctgcctgacaaggccagcacccaaagggttaatatttaacctctttttaaggacactggggtctgtttctggaaatgttctttagatggtggcacattcctttgggtatgttaacctaggcagtgggaggcaaatgggatggtatgtgagctaggagaagggctgaaccctcagccttgactatgtctagagcctcttggggaaggggcacctctcttgaaccccaaatgctctctcttcttattacccaaacccatggctctatttcttcttcacatccattgtctcttcatgtctattccattcccttcggccaaacagacaggtggaaaaactgagacaggcagtttcagagatggacagagaactttattttggattgtggatgtggacttttttgtacataaataagaaaaaccaaaatactccaaagatgacttcccctgcctcctactccagtatgacagaggaggatgtaaggccttagccatgatctgcaggggtctgggagtcaggcccggcctattgcttgggtctctctctatttatatatctaagttcacagtgtttcttattcccccctaagcttctagaggctcatggccctgtagttaggcctggctcattctgcacctttccagggaggtggaaggaccctgtgccctccttcccaatcttctttttcaggctcgccaaggcctaggacctatgttgtaattttactttttatttctaaagttgtagtgaagctctcacccataataaaggttgtgaatgttc

SEQ ID NO: 291759 - DNA, 1260 bp, Homo sapiens
ggcatttgcggccggcgccagggtggagagttgtgcgccggtccctgggcctgagctccggctccggctggggcgcctgcgatgtctcaagatggcggagctgggcgaattaaagcacatggtgatgagtttccgggtgtctgagctccaggtgcttcttggctttgctggccggaacaagagtggacggaagcacgagctcctggccaaggctctgcacctcctgaagtccagctgtgcccctagtgtccagatgaagatcaaagagctttaccgacgacgctttccccggaagaccctggggccctctgatctctcccttctctctttgccccctggcacctctcctgtaggctcccctggtcctctagctcccattcccccaacgctgttggcccctggcaccctgctgggccccaagcgtgaggtggacatgcacccccctctgccccagcctgtgcaccctgatgtcaccatgaaaccattgcccttctatgaagtctatggggagctcatccggcccaccacccttgcatccacttctagccagcggtttgaggaagcgcactttacctttgccctcacaccccagcaagtgcagcagattcttacatccagagaggttctgccaggagccaaatgtgattataccatacaggtgcagctaaggttctgtctctgtgagaccagctgcccccaggaagattattttccccccaacctctttgtcaaggtcaatgggaaactgtgccccctgccgggttaccttcccccaaccaagaatggggccgagcccaagaggcccagccgccccatcaacatcacacccctggctcgactctcagccactgttcccaacaccattgtggtcaattggtcatctgagttcggacggaattactccttgtctgtgtacctggtgaggcagttgactgcaggaacccttctacaaaaactcagagcaaagggtatccggaacccagaccactcgcgggcactgatcaaggagaaattgactgctgaccctgacagtgaggtggccactacaagtctccgggtgtcactcatgtgcccgctagggaagatgcgcctgactgtcccttgtcgtgccctcacctgcgcccacctgcagagcttcgatgctgccctttatctacagatgaatgagaagaagcctacatggacatgtcctgtgtgtgacaagaaggctccctatgaatctcttatcattgatggaagcgtcgcgcatgggtaccgagc

SEQ ID NO: 291760 - DNA, 990 bp, Homo sapiens
  misc_feature (944)..(944): n is a, c, g, or t
  misc_feature (951)..(951): n is a, c, g, or t
ggcatttgcggccggcgccagggtggagagttgtgcgccggtccctgggcctgagctccggctccggctggggcgcctgcgatgtctcaagatggcggagctgggcgaattaaagcacatggtgatgagtttccgggtgtctgagctccaggtgcttcttggctttgctggccggaacaagagtggacggaagcacgagctcctggccaaggctctgcacctcctgaagtccagctgtgcccctagtgtccagatgaagatcaaagagctttaccgacgacgctttccccggaagaccctggggccctctgatctctcccttctctctttgccccctggcacctctcctgtaggctcccctggtcctctagctcccattcccccaacgctgttggcccctggcaccctgctgggccccaagcgtgaggtggacatgcacccccctctgccccagcctgtgcaccctgatgtcaccatgaaaccattgcccttctatgaagtctatggggagctcatccggcccaccacccttggtatggctctttgtggtcccttagtcttctggactccctacctgttccccaaacatttcttaggctttagtcctatgggatcagtgacctgggatgggggcgatttctgtggctgcctgtgcatgggcttggaataactgcccctttgtatcctcagcatccacttctagccagcggtttgaggaagcgcactttacctttgccctcacaccccagcaagtgcagcagattcttacatccagagaggttctgccaggagccaaatgtgattataccatacaggtgcagctaaggttctgtctctgtgagaccagctgcccccaggaagattattttccccccaacctctttgtcaaggtcaatgggaaactgtgccccctgccgggtacctttcccaaccagaatgggccnagccaanaggccagccgccataacataaccctggttgatttaagca

SEQ ID NO: 291761 - DNA, 650 bp, Homo sapiens
ggcatttgcggccggcgccagggtggagagttgtgcgccggtccctgggcctgagctccggctccggctggggcgcctgcgatgtctcaagatggcggagctgggcgaattaaagcacatggtgatgagtttccgggtgtctgagctccaggtgcttcttggctttgctggccggaacaagagtggacggaagcacgagctcctggccaaggctctgcacctcctgaagtccagctgtgcccctagtgtccagatgaagatcaaagagctttaccgacgacgctttccccggaagaccctggggccctctgatctctcccttctctctttgccccctggcacctctcctgtaggctcccctggtcctctagctcccattcccccaacgctgttggcccctggcaccctgctgggccccaagcgtgaggtggacatgcacccccctctgccccagcctgtgcaccctgatgtcaccatgaaaccattgcccttctatgaagtctatggggagctcatccggcccaccacccttgcatccacttctagccagcggtttgaggaagcgcactttacctttgccctcacaccccagcaagtgcagcagattcttacatccagccagcaaagaaccacacgccaaacaagaacca

SEQ ID NO: 291762 - DNA, 208 bp, Homo sapiens
aaaacagatactgcgcttccagagcgcagtatacggtgctttgcaggaggcaagtgaggcctatctggttggcctttttgaagacaccaacctgtgtgctatccatgccaaacgtgtaacaattatgccaaaagacatccagctagcacgccgcatacgtggagaacgtgcttaagaatccactatgatgggaaacatttcattctca

SEQ ID NO: 291763 - DNA, 682 bp, Homo sapiens
  misc_feature (13)..(13): n is a, c, g, or t
  misc_feature (20)..(20): n is a, c, g, or t
taattcggcacgngggcacnagctcctggtgatgtagagtataaaacagttgtaacaagacagctttcttagtcattttgatcatgagggttaaatattgtaatatggatacttgaaggactttatataaaaggatgactcaaaggataaaatgaacgctatttgaggactctggttgaaggagatttatttaaatttgaagtaatatattatgggataaaaggccacaggaaataagactgctgaatgtctgagagaaccagagttgttctcgtccaaggtagaaaggtacgaagatacaatactgttattcatttatcctgtacaatcatctgtgaagtggtggtgtcaggtgagaaggcgtccacaaaagaggggagaaaaggcgacgaatcaggacacagtgaacttgggaatgaagaggtagcaggagggtggagtgtcggctgcaaaggcagcagtagctgagctggttgcaggtgctgatagccttcaggggaggacctgcccaggtatgccttccagtgatgcccaccagagaatacattctctattagtttttaaagagtttttgtaaaatgattttgtacaagtaggatatgaattagcagtttacaagtttacatattaactaataataaatatgtctatcaaatacctctgtagtaaaatgtgaaaaagc

SEQ ID NO: 291764 - DNA, 2410 bp, Homo sapiens
aaggagggaggcggagctcgtactcaagagccgcctcccgggcggctggggcggtccccgagctgctttccgcgttctcccctctccgcgggcagtgctagctcgccgcggccgcctccggggaccacctggcttcatgtgtggatttccacggctcttgcccagaggcgggtacactgtgttccaatgtgccacggaactcacgcagtggcactttgtggcttcatgaaggaagaggcaggccacgcaacacttcctccccaagccaaggagaagtatcacttttagaggcagaggagcggaaggcagtgggtgtgaccaaaagtgccatttgttaaagcttatcttccttgccagattttaaaaactattatggaaaatctcaagcattcacaaaagtagagagaaagaaaggactctcagactgttggagcagaactactgagaaaaaccaggcattgtatcttcagttgtcatcaagttcgcaatcagattggaaaagctcaacttgaagctttcttgcctgcagtgaagcagagagatagatattattcacgtaataaaaaacatgggcttcaacctgactttccacctttcctacaaattccgattactgttgctgttgactttgtgcctgacagtggttgggtgggccaccagtaactacttcgtgggtgccattcaagagattcctaaagcaaaggagttcatggctaatttccataagaccctcattttggggaagggaaaaactctgactaatgaagcatccacgaagaaggtagaacttgacaactgcccttctgtgtctccttacctcagaggccagagcaagctcattttcaaaccagatctcactttggaagaggtacaggcagaaaatcccaaagtgtccagaggccggtatcgccctcaggaatgtaaagctttacagagggtcgccatcctcgttccccaccggaacagagagaaacacctgatgtacctgctggaacatctgcatcccttcctgcagaggcagcagctggattatggcatctacgtcatccaccaggctgaaggtaaaaagtttaatcgagccaaactcttgaatgtgggctatctagaagccctcaaggaagaaaattgggactgctttatattccacgatgtggacctggtacccgagaatgactttaacctttacaagtgtgaggagcatcccaagcatctggtggttggcaggaacagcactgggtacaggttacgttacagtggatattttgggggtgttactgccctaagcagagagcagtttttcaaggtgaatggattctctaacaactactggggatggggaggcgaagacgatgacctcagactcagggttgagctccaaagaatgaaaatttcccggcccctgcctgaagtgggtaaatatacaatggtcttccacactagagacaaaggcaatgaggtgaacgcagaacggatgaagctcttacaccaagtgtcacgagtctggagaacagatgggttgagtagttgttcttataaattagtatctgtggaacacaatcctttatatatcaacatcacagtggatttctggtttggtgcatgaccctggatcttttggtgatgtttggaagaactgattctttgtttgcaataattttggcctagagacttcaaatagtagcacacattaagaacctgttacagctcattgttgagctgaatttttcctttttgtattttcttagcagagctcctggtgatgtagagtataaaacagttgtaacaagacagctttcttagtcattttgatcatgagggttaaatattgtaatatggatacttgaaggactttatataaaaggatgactcaaaggataaaatgaacgctatttgaggactctggttgaaggagatttatttaaatttgaagtaatatattatgggataaaaggccacaggaaataagactgctgaatgtctgagagaaccagagttgttctcgtccaaggtagaaaggtacgaagatacaatactgttattcatttatcctgtacaatcatctgtgaagtggtggtgtcaggtgagaaggcgtccacaaaagaggggagaaaaggcgacgaatcaggacacagtgaacttgggaatgaagaggtagcaggagggtggagtgtcggctgcaaaggcagcagtagctgagctggttgcaggtgctgatagccttcaggggaggacctgcccaggtatgccttccagtgatgcccaccagagaatacattctctattagtttttaaagagtttttgtaaaatgattttgtacaagtaggatatgaattagcagtttacaagtttacatattaactaataataaatatgtctatcaaatacctctgtagtaaaatgtgaaaaagc

SEQ ID NO: 291765 - DNA, 2327 bp, Homo sapiens
aaggagggaggcggagctcgtactcaagagccgcctcccgggcggctggggcggtccccgagctgctttccgcgttctcccctctccgcgggcagtgctagctcgccgcggccgcctccggggaccacctggcttcatgtgtggatttccacggctcttgcccagaggcgggtacactgtgttccaatgtgccacggaactcacgcagtggcactttgtggcttcatgaaggaagaggcaggccacgcaacacttcctccccaagccaaggagaagtatcacttttagaggcagaggagcggaaggcagtgggtgtgaccaaaagtgccatttgttaaagactgttggagcagaactactgagaaaaaccaggcattgtatcttcagttgtcatcaagttcgcaatcagattggaaaagctcaacttgaagctttcttgcctgcagtgaagcagagagatagatattattcacgtaataaaaaacatgggcttcaacctgactttccacctttcctacaaattccgattactgttgctgttgactttgtgcctgacagtggttgggtgggccaccagtaactacttcgtgggtgccattcaagagattcctaaagcaaaggagttcatggctaatttccataagaccctcattttggggaagggaaaaactctgactaatgaagcatccacgaagaaggtagaacttgacaactgcccttctgtgtctccttacctcagaggccagagcaagctcattttcaaaccagatctcactttggaagaggtacaggcagaaaatcccaaagtgtccagaggccggtatcgccctcaggaatgtaaagctttacagagggtcgccatcctcgttccccaccggaacagagagaaacacctgatgtacctgctggaacatctgcatcccttcctgcagaggcagcagctggattatggcatctacgtcatccaccaggctgaaggtaaaaagtttaatcgagccaaactcttgaatgtgggctatctagaagccctcaaggaagaaaattgggactgctttatattccacgatgtggacctggtacccgagaatgactttaacctttacaagtgtgaggagcatcccaagcatctggtggttggcaggaacagcactgggtacaggttacgttacagtggatattttgggggtgttactgccctaagcagagagcagtttttcaaggtgaatggattctctaacaactactggggatggggaggcgaagacgatgacctcagactcagggttgagctccaaagaatgaaaatttcccggcccctgcctgaagtgggtaaatatacaatggtcttccacactagagacaaaggcaatgaggtgaacgcagaacggatgaagctcttacaccaagtgtcacgagtctggagaacagatgggttgagtagttgttcttataaattagtatctgtggaacacaatcctttatatatcaacatcacagtggatttctggtttggtgcatgaccctggatcttttggtgatgtttggaagaactgattctttgtttgcaataattttggcctagagacttcaaatagtagcacacattaagaacctgttacagctcattgttgagctgaatttttcctttttgtattttcttagcagagctcctggtgatgtagagtataaaacagttgtaacaagacagctttcttagtcattttgatcatgagggttaaatattgtaatatggatacttgaaggactttatataaaaggatgactcaaaggataaaatgaacgctatttgaggactctggttgaaggagatttatttaaatttgaagtaatatattatgggataaaaggccacaggaaataagactgctgaatgtctgagagaaccagagttgttctcgtccaaggtagaaaggtacgaagatacaatactgttattcatttatcctgtacaatcatctgtgaagtggtggtgtcaggtgagaaggcgtccacaaaagaggggagaaaaggcgacgaatcaggacacagtgaacttgggaatgaagaggtagcaggagggtggagtgtcggctgcaaaggcagcagtagctgagctggttgcaggtgctgatagccttcaggggaggacctgcccaggtatgccttccagtgatgcccaccagagaatacattctctattagtttttaaagagtttttgtaaaatgattttgtacaagtaggatatgaattagcagtttacaagtttacatattaactaataataaatatgtctatcaaatacctctgtagtaaaatgtgaaaaagc

SEQ ID NO: 291766 - DNA, 2816 bp, Homo sapiens
aaggagggaggcggagctcgtactcaagagccgcctcccgggcggctggggcggtccccgagctgctttccgcgttctcccctctccgcgggcagtgctagctcgccgcggccgcctccggggtgagtacgctggctccgccggcgcccgggaaatgcagttccctggacacgggcgccgtgcgagggtagccgggcgacggccggggtcagtcccagggctgtagcggggcgggcgtggggatgacgtggcggcgtccgtggggcagtcccgcctcagccggagcggtgggccgggccgggggcctacggaggccgagcctggcgggaggcaccggctcaggtgctggcgttccgcgcggcgccgcctctgctgcgggccgggggagccagacgaggtgctgccgggtaggaaaaaatccagggctcattcataccccaggtcacgattccggggtcgcccccagcacttctccgccgggtgcatcaacctgaaaaagccccttcttcctggaaaccctccttctccagcgtttcaacggggaaactgatcagctgacaccagccccagtcctgcgaggggccggcgacctttgacctttctccaaaggggaccacctggcttcatgtgtggatttccacggctcttgcccagaggcgggtacactgtgttccaatgtgccacggaactcacgcagtggcactttgtggcttcatgaaggaagaggcaggccacgcaacacttcctccccaagccaaggagaagtatcacttttagaggcagaggagcggaaggcagtgggtgtgaccaaaagtgccatttgttaaagactgttggagcagaactactgagaaaaaccaggcattgtatcttcagttgtcatcaagttcgcaatcagattggaaaagctcaacttgaagctttcttgcctgcagtgaagcagagagatagatattattcacgtaataaaaaacatgggcttcaacctgactttccacctttcctacaaattccgattactgttgctgttgactttgtgcctgacagtggttgggtgggccaccagtaactacttcgtgggtgccattcaagagattcctaaagcaaaggagttcatggctaatttccataagaccctcattttggggaagggaaaaactctgactaatgaagcatccacgaagaaggtagaacttgacaactgcccttctgtgtctccttacctcagaggccagagcaagctcattttcaaaccagatctcactttggaagaggtacaggcagaaaatcccaaagtgtccagaggccggtatcgccctcaggaatgtaaagctttacagagggtcgccatcctcgttccccaccggaacagagagaaacacctgatgtacctgctggaacatctgcatcccttcctgcagaggcagcagctggattatggcatctacgtcatccaccaggctgaaggtaaaaagtttaatcgagccaaactcttgaatgtgggctatctagaagccctcaaggaagaaaattgggactgctttatattccacgatgtggacctggtacccgagaatgactttaacctttacaagtgtgaggagcatcccaagcatctggtggttggcaggaacagcactgggtacaggttacgttacagtggatattttgggggtgttactgccctaagcagagagcagtttttcaaggtgaatggattctctaacaactactggggatggggaggcgaagacgatgacctcagactcagggttgagctccaaagaatgaaaatttcccggcccctgcctgaagtgggtaaatatacaatggtcttccacactagagacaaaggcaatgaggtgaacgcagaacggatgaagctcttacaccaagtgtcacgagtctggagaacagatgggttgagtagttgttcttataaattagtatctgtggaacacaatcctttatatatcaacatcacagtggatttctggtttggtgcatgaccctggatcttttggtgatgtttggaagaactgattctttgtttgcaataattttggcctagagacttcaaatagtagcacacattaagaacctgttacagctcattgttgagctgaatttttcctttttgtattttcttagcagagctcctggtgatgtagagtataaaacagttgtaacaagacagctttcttagtcattttgatcatgagggttaaatattgtaatatggatacttgaaggactttatataaaaggatgactcaaaggataaaatgaacgctatttgaggactctggttgaaggagatttatttaaatttgaagtaatatattatgggataaaaggccacaggaaataagactgctgaatgtctgagagaaccagagttgttctcgtccaaggtagaaaggtacgaagatacaatactgttattcatttatcctgtacaatcatctgtgaagtggtggtgtcaggtgagaaggcgtccacaaaagaggggagaaaaggcgacgaatcaggacacagtgaacttgggaatgaagaggtagcaggagggtggagtgtcggctgcaaaggcagcagtagctgagctggttgcaggtgctgatagccttcaggggaggacctgcccaggtatgccttccagtgatgcccaccagagaatacattctctattagtttttaaagagtttttgtaaaatgattttgtacaagtaggatatgaattagcagtttacaagtttacatattaactaataataaatatgtctatcaaatacctctgtagtaaaatgtgaaaaagc

SEQ ID NO: 291767 - DNA, 2265 bp, Homo sapiens
aaggagggaggcggagctcgtactcaagagccgcctcccgggcggctggggcggtccccgagctgctttccgcgttctcccctctccgcgggcagtgctagctcgccgcggccgcctccggggaccacctggcttcatgtgtggatttccacggctcttgcccagaggcgggtacactgtgttccaatgtgccacggaactcacgcagtggcactttgtggcttcatgaaggaagaggcaggccacgcaacacttcctccccaagccaaggagaagtatcacttttagaggcagaggagcggaaggcagtgggtgtgaccaaaagtgccatttgttaaagactgttggagcagaactactgagaaaaaccaggcattgtatcttcagttgtcatcaagttcgcaatcagattggaaaagctcaacttgaagctttcttgcctgcagtgaagcagagagatagatattattcacgtaataaaaaacatgggcttcaacctgactttccacctttcctacaaattccgattactgttgctgttgactttgtgcctgacagtggttgggtgggccaccagtaactacttcgtgggtgccattcaagagattcctaaagcaaaggagttcatggctaatttccataagaccctcattttggggaagggaaaaactctgactaatgaagcatccacgaagaaggtagaacttgacaactgcccttctgtgtctccttacctcagaggccagagcaagctcattttcaaaccagatctcactttggaagaggtacaggcagaaaatcccaaagtgtccagaggccggtatcgccctcaggaatgtaaagctttacagagggtcgccatcctcgttccccaccggaacagagagaaacacctgatgtacctgctggaacatctgcatcccttcctgcagaggcagcagctggattatggcatctacgtcatccaccaggctgaaggtaaaaagtttaatcgagccaaactcttgaatgtgggctatctagaagccctcaaggaagaaaattgggactgctttatattccacgatgtggacctggtacccgagaatgactttaacctttacaagtgtgaggagcatcccaagcatctggtggttggcaggaacagcactgggtacaggttacgttacagtggatattttgggggtgttactgccctaagcagagagcagtttttcaagggttgagctccaaagaatgaaaatttcccggcccctgcctgaagtgggtaaatatacaatggtcttccacactagagacaaaggcaatgaggtgaacgcagaacggatgaagctcttacaccaagtgtcacgagtctggagaacagatgggttgagtagttgttcttataaattagtatctgtggaacacaatcctttatatatcaacatcacagtggatttctggtttggtgcatgaccctggatcttttggtgatgtttggaagaactgattctttgtttgcaataattttggcctagagacttcaaatagtagcacacattaagaacctgttacagctcattgttgagctgaatttttcctttttgtattttcttagcagagctcctggtgatgtagagtataaaacagttgtaacaagacagctttcttagtcattttgatcatgagggttaaatattgtaatatggatacttgaaggactttatataaaaggatgactcaaaggataaaatgaacgctatttgaggactctggttgaaggagatttatttaaatttgaagtaatatattatgggataaaaggccacaggaaataagactgctgaatgtctgagagaaccagagttgttctcgtccaaggtagaaaggtacgaagatacaatactgttattcatttatcctgtacaatcatctgtgaagtggtggtgtcaggtgagaaggcgtccacaaaagaggggagaaaaggcgacgaatcaggacacagtgaacttgggaatgaagaggtagcaggagggtggagtgtcggctgcaaaggcagcagtagctgagctggttgcaggtgctgatagccttcaggggaggacctgcccaggtatgccttccagtgatgcccaccagagaatacattctctattagtttttaaagagtttttgtaaaatgattttgtacaagtaggatatgaattagcagtttacaagtttacatattaactaataataaatatgtctatcaaatacctctgtagtaaaatgtgaaaaagc

SEQ ID NO: 291768 - DNA, 2329 bp, Homo sapiens
  misc_feature (2302)..(2302): n is a, c, g, or t
  misc_feature (2314)..(2314): n is a, c, g, or t
aaggagggaggcggagctcgtactcaagagccgcctcccgggcggctggggcggtccccgagctgctttccgcgttctcccctctccgcgggcagtgctagctcgccgcggccgcctccggggaccacctggcttcatgtgtggatttccacggctcttgcccagaggcgggtacactgtgttccaatgtgccacggaactcacgcagtggcactttgtggcttcatgaaggaagaggcaggccacgcaacacttcctccccaagccaaggagaagtatcacttttagaggcagaggagcggaaggcagtgggtgtgaccaaaagtgccatttgttaaagactgttggagcagaactactgagaaaaaccaggcattgtatcttcagttgtcatcaagttcgcaatcagattggaaaagctcaacttgaagctttcttgcctgcagtgaagcagagagatagatattattcacgtaataaaaaacatgggcttcaacctgactttccacctttcctacaaattccgattactgttgctgttgactttgtgcctgacagtggttgggtgggccaccagtaactacttcgtgggtgccattcaagagattcctaaagcaaaggagttcatggctaatttccataagaccctcattttggggaagggaaaaactctgactaatgaagcatccacgaagaaggtagaacttgacaactgcccttctgtgtctccttacctcagaggccagagcaagctcattttcaaaccagatctcactttggaagaggtacaggcagaaaatcccaaagtgtccagaggccggtatcgccctcaggaatgtaaagctttacagagggtcgccatcctcgttccccaccggaacagagagaaacacctgatgtacctgctggaacatctgcatcccttcctgcagaggcagcagctggattatggcatctacgtcatccaccaggctgaaggtaaaaagtttaatcgagccaaactcttgaatgtgggctatctagaagccctcaaggaagaaaattgggactgctttatattccacgatgtggacctggtacccgagaatgactttaacctttacaagtgtgaggagcatcccaagcatctggtggttggcaggaacagcactgggtacaggttacgttacagtggatattttgggggtgttactgccctaagcagagagcagtttttcaaggtgaatggattctctaacaactactggggatggggaggcgaagacgatgacctcagactcagggttgagctccaaagaatgaaaatttcccggcccctgcctgaagtgggtaaatatacaatggtcttccacactagagacaaaggcaatgaggtgaacgcagaacggatgaagctcttacaccaagtgtcacgagtctggagaacagatgggttgagtagttgttcttataaattagtatctgtggaacacaatcctttatatatcaacatcacagtggatttctggtttggtgcatgaccctggatcttttggtgatgtttggaagaactgattctttgtttgcaataattttggcctagagacttcaaatagtagcacacattaagaacctgttacagctcattgttgagctgaatttttcctttttgtattttcttagcagagctcctggtgatgtagagtataaaacagttgtaacaagacagctttcttagtcattttgatcatgagggttaaatattgtaatatggatacttgaaggactttatataaaaggatgactcaaaggataaaatgaacgctatttgaggactctggttgaaggagatttatttaaatttgaagtaatatattatgggataaaaggccacaggaaataagactgctgaatgtctgagagaaccagagttgttctcgtccaaggtagaaaggtacgaagatacaatactgttattcatttatcctgtacaatcatctgtgaagtggtggtgtcaggtgagaaggcgtccacaaaagaggggagaaaaggcgacgaatcaggacacagtgaacttgggaatgaagaggtagcaggagggtggagtgtcggctgcaaaggcagcagtagctgagctggttgcaggtgctgatagccttcaggggaggacctgcccaggtatgccttccagtgatgcccaccagagaatacattctctattagtttttaaagagtttttgtaaaatgattttgtacaagtaggatatgaattagcagtttacaagtttacatattaactaataataaatatggttatcccatncagaattaatcntcagtaactggatgg

SEQ ID NO: 291769 - DNA, 2356 bp, Homo sapiens
aaggagggaggcggagctcgtactcaagagccgcctcccgggcggctggggcggtccccgagctgctttccgcgttctcccctctccgcgggcagtgctagctcgccgcggccgcctccggggtgagtacgctggctccgccggcgcccgggaaatgcagttccctggacacgggcgccgtgcgagggtagccgggcgacggccggggtcagtcccagggctgtagcggggcgggcgtggggatgacgtggcggcgtccgtggggcagtcccgcctcagccggagcggtgggccgggccgggggcctacggaggccgagcctggcgggaggcaccggctcaggtgctggcgttccgcgcggcgccgcctctgctgcgggccgggggagccagacgaggtgctgccgggtaggaaaaaatccagggctcattcataccccaggtcacgattccggggtcgcccccagcacttctccgccgggtgcatcaacctgaaaaagccccttcttcctggaaaccctccttctccagcgtttcaacggggaaactgatcagctgacaccagccccagtcctgcgaggggccggcgacctttgacctttctccaaaggggaccacctggcttcatgtgtggatttccacggctcttgcccagaggcgggtacactgtgttccaatgtgccacggaactcacgcagtggcactttgtggcttcatgaaggaagaggcaggccacgcaacacttcctccccaagccaaggagaagtatcacttttagaggcagaggagcggaaggcagtgggtgtgaccaaaagtgccatttgttaaaggaggccagagcaagctcattttcaaaccagatctcactttggaagaggtacaggcagaaaatcccaaagtgtccagaggccggtatcgccctcaggaatgtaaagctttacagagggtcgccatcctcgttccccaccggaacagagagaaacacctgatgtacctgctggaacatctgcatcccttcctgcagaggcagcagctggattatggcatctacgtcatccaccaggctgaaggtaaaaagtttaatcgagccaaactcttgaatgtgggctatctagaagccctcaaggaagaaaattgggactgctttatattccacgatgtggacctggtacccgagaatgactttaacctttacaagtgtgaggagcatcccaagcatctggtggttggcaggaacagcactgggtacaggttacgttacagtggatattttgggggtgttactgccctaagcagagagcagtttttcaagggttgagctccaaagaatgaaaatttcccggcccctgcctgaagtgggtaaatatacaatggtcttccacactagagacaaaggcaatgaggtgaacgcagaacggatgaagctcttacaccaagtgtcacgagtctggagaacagatgggttgagtagttgttcttataaattagtatctgtggaacacaatcctttatatatcaacatcacagtggatttctggtttggtgcatgaccctggatcttttggtgatgtttggaagaactgattctttgtttgcaataattttggcctagagacttcaaatagtagcacacattaagaacctgttacagctcattgttgagctgaatttttcctttttgtattttcttagcagagctcctggtgatgtagagtataaaacagttgtaacaagacagctttcttagtcattttgatcatgagggttaaatattgtaatatggatacttgaaggactttatataaaaggatgactcaaaggataaaatgaacgctatttgaggactctggttgaaggagatttatttaaatttgaagtaatatattatgggataaaaggccacaggaaataagactgctgaatgtctgagagaaccagagttgttctcgtccaaggtagaaaggtacgaagatacaatactgttattcatttatcctgtacaatcatctgtgaagtggtggtgtcaggtgagaaggcgtccacaaaagaggggagaaaaggcgacgaatcaggacacagtgaacttgggaatgaagaggtagcaggagggtggagtgtcggctgcaaaggcagcagtagctgagctggttgcaggtgctgatagccttcaggggaggacctgcccaggtatgccttccagtgatgcccaccagagaatacattctctattagtttttaaagagtttttgtaaaatgattttgtacaagtaggatatgaattagcagtttacaagtttacatattaactaataataaatatgtctatcaaatacctctgtagtaaaatgtgaaaaagc

SEQ ID NO: 291770 - DNA, 1243 bp, Homo sapiens
aaggagggaggcggagctcgtactcaagagccgcctcccgggcggctggggcggtccccgagctgctttccgcgttctcccctctccgcgggcagtgctagctcgccgcggccgcctccggggaccacctggcttcatgtgtggatttccacggctcttgcccagaggcgggtacactgtgttccaatgtgccacggaactcacgcagtggcactttgtggcttcatgaaggaagaggcaggccacgcaacacttcctccccaagccaaggagaagtatcacttttagaggcagaggagcggaaggcagtgggtgtgaccaaaagtgccatttgttaaagactgttggagcagaactactgagaaaaaccaggcattgtatcttcagttgtcatcaagttcgcaatcagattggaaaagctcaacttgaagctttcttgcctgcagtgaagcagagagatagatattattcacgtaataaaaaacatgggcttcaacctgactttccacctttcctacaaattccgattactgttgctgttgactttgtgcctgacagtggttgggtgggccaccagtaactacttcgtgggtgccattcaagagattcctaaagcaaaggagttcatggctaatttccataagaccctcattttggggaagggaaaaactctgactaatgaagcatccacgaagaaggtagaacttgacaactgcccttctgtgtctccttacctcagaggccagagcaagctcattttcaaaccagatctcactttggaagaggtacaggaaataagactgctgaatgtctgagagaaccagagttgttctcgtccaaggtagaaaggtacgaagatacaatactgttattcatttatcctgtacaatcatctgtgaagtggtggtgtcaggtgagaaggcgtccacaaaagaggggagaaaaggcgacgaatcaggacacagtgaacttgggaatgaagaggtagcaggagggtggagtgtcggctgcaaaggcagcagtagctgagctggttgcaggtgctgatagccttcaggggaggacctgcccaggtatgccttccagtgatgcccaccagagaatacattctctattagtttttaaagagtttttgtaaaatgattttgtacaagtaggatatgaattagcagtttacaagtttacatattaactaataataaatatgtctatcaaatacctctgtagtaaaatgtgaaaaagc

SEQ ID NO: 291771 - DNA, 1014 bp, Homo sapiens
aaggagggaggcggagctcgtactcaagagccgcctcccgggcggctggggcggtccccgagctgctttccgcgttctcccctctccgcgggcagtgctagctcgccgcggccgcctccggggaccacctggcttcatgtgtggatttccacggctcttgcccagaggcgggtacactgtgttccaatgtgccacggaactcacgcagtggcactttgtggcttcatgaaggaagaggcaggccacgcaacacttcctccccaagccaaggagaagtatcacttttagaggcagaggagcggaaggcagtgggtgtgaccaaaagtgccatttgttaaagactgttggagcagaactactgagaaaaaccaggcattgtatcttcagttgtcatcaagttcgcaatcagattggaaaagctcaacttgaagctttcttgcctgcagtgaagcagagagatagatattattcacgtaataaaaaacatgggcttcaacctgactttccacctttcctacaaattccgattactgttgctgttgactttgtgcctgacagtggttgggtgggccaccagtaactacttcgtgggtgccattcaagagattcctaaagcaaaggagttcatggctaatttccataagaccctcattttggggaagggaaaaactctgactaatgaagcatccacgaagaaggtagaacttgacaactgcccttctgtgtctccttacctcagaggccagagcaagctcattttcaaaccagatctcactttggaagaggtacaggcagaaaatcccaaagtgtccagaggccggtatcgccctcaggaatgtaaagctttacagagggtcgccatcctcgttccccaccggaacagagagaaacacctgatgtacctgctggaacatctgcatcccttcctgcagaggcagcagctggattatggcatctacgtcatccaccaggctgaaggtaaaaagttccgtcgaagccgtcggggatcctcta

SEQ ID NO: 291772 - DNA, 1143 bp, Homo sapiens
aaggagggaggcggagctcgtactcaagagccgcctcccgggcggctggggcggtccccgagctgctttccgcgttctcccctctccgcgggcagtgctagctcgccgcggccgcctccggggtgagtacgctggctccgccggcgcccgggaaatgcagttccctggacacgggcgccgtgcgagggtagccgggcgacggccggggtcagtcccagggctgtagcggggcgggcgtggggatgacgtggcggcgtccgtggggcagtcccgcctcagccggagcggtgggccgggccgggggcctacggaggccgagcctggcgggaggcaccggctcaggtgctggcgttccgcgcggcgccgcctctgctgcgggccgggggagccagacgaggtgctgccgggtaggaaaaaatccagggctcattcataccccaggtcacgattccggggtcgcccccagcacttctccgccgggtgcatcaacctgaaaaagccccttcttcctggaaaccctccttctccagcgtttcaacggggaaactgatcagctgacaccagccccagtcctgcgaggggccggcgacctttgacctttctccaaaggggaccacctggcttcatgtgtggatttccacggctcttgcccagaggcgggtacactgtgttccaatgtgccacggaactcacgcagtggcactttgtggcttcatgaaggaagaggcaggccacgcaacacttcctccccaagccaaggagaagtatcacttttagaggcagaggagcggaaggcagtgggtgtgaccaaaagtgccatttgttaaagaaaagaggggagaaaaggcgacgaatcaggacacagtgaacttgggaatgaagaggtagcaggagggtggagtgtcggctgcaaaggcagcagtagctgagctggttgcaggtgctgatagccttcaggggaggacctgcccaggtatgccttccagtgatgcccaccagagaatacattctctattagtttttaaagagtttttgtaaaatgattttgtacaagtaggatatgaattagcagtttacaagtttacatattaactaataataaatatgtctatcaaatacctctgtagtaaaatgtgaaaaagc

SEQ ID NO: 291773 - DNA, 1408 bp, Homo sapiens
aaggagggaggcggagctcgtactcaagagccgcctcccgggcggctggggcggtccccgagctgctttccgcgttctcccctctccgcgggcagtgctagctcgccgcggccgcctccggggtgagtacgctggctccgccggcgcccgggaaatgcagttccctggacacgggcgccgtgcgagggtagccgggcgacggccggggtcagtcccagggctgtagcggggcgggcgtggggatgacgtggcggcgtccgtggggcagtcccgcctcagccggagcggtgggccgggccgggggcctacggaggccgagcctggcgggaggcaccggctcaggtgctggcgttccgcgcggcgccgcctctgctgcgggccgggggagccagacgaggtgctgccgggtaggaaaaaatccagggctcattcataccccaggtcacgattccggggtcgcccccagcacttctccgccgggtgcatcaacctgaaaaagccccttcttcctggaaaccctccttctccagcgtttcaacggggaaactgatcagctgacaccagccccagtcctgcgaggggccggcgacctttgacctttctccaaaggggaccacctggcttcatgtgtggatttccacggctcttgcccagaggcgggtacactgtgttccaatgtgccacggaactcacgcagtggcactttgtggcttcatgaaggaagaggcaggccacgcaacacttcctccccaagccaaggagaagtatcacttttagaggcagaggagcggaaggcagtgggtgtgaccaaaagtgccatttgttaaagactgttggagcagaactactgagaaaaaccaggcattgtatcttcagttgtcatcaagttcgcaatcagattggaaaagctcaacttgaagctttcttgcctgcagtgaagcagagagatagatattattcacgtaataaaaaacatgggcttcaacctgactttccacctttcctacaaattccgattactgttgctgttgactttgtgcctgacagtggttgggtgggccaccagtaactacttcgtgggtgccattcaagagattcctaaagcaaaggagttcatggctaatttccataagaccctcattttggggaagggaaaaactctgactaatgaagcatccacgaagaaggtagaacttgacaactgcccttctgtgtctccttacctcagtaagtgttgcttttttcctttgattaagtagtatgcaaactttttatttaagtataatatgtacttgcctgtatcaaaacatctcatgtaccccataaatatatatatctcctgtgtcacaaaaactatacattcaaataaaataaatataacatgtacaagaaagtacaaaactcagaa

SEQ ID NO: 291774 - DNA, 546 bp, Homo sapiens
ctccctgacacctcacccgacttcctcatgaagttaggtctcccttcattcatcctcatctacatacattctaatttttttggaggctcgtgaaagctatgtacccacctacagacaaactttccttataacataggaagattcagagatcccctgaagctcagccaaggatcagttagcaatggttggtacatatcctgtagtatctgtattccttgcacatccttctgtcctgtagactgggggctcactgagtgcagtgacacttttcatcatgggtccccgggttctcacgtggagtctgacacatgaatacatggctatcatgtctgtcaccttcaatggggcaaacaaactttgtaatggtaggaaacacaacaggtacaataatttacaaaaatatgtttgccacatttcagggcaaggcaaaatgcagtggagacatatgttaaattcttatcattcacatttgttctttttatctttaggatgaagctcttacaccaagtgtcacgagtctggagaacagatgggttgagtagttgt

SEQ ID NO: 291775 - DNA, 4515 bp, Homo sapiens
cttaagtatctgtttagaagtttaggaattttctatactgtcttcttgaaatcaacttagagaaaatgaacacaatagattttaagatcttaattcactaatgtttaatgaatatgtttgatgctgacacaaccaccaacttggtaacaatttctttcattttgcctataggtgttcatgtatttggattatgctctacagctctcattacagatatcatacagctgtccacaggatatcaagcaccttactttctgactgtgtgcaaaccaaactatacctctctgaatgtatcttgcaaagaaaattcctacattgtggaagatatttgctcaggatctgacctcacagttatcaacagtggcagaaagtccttcccttctcaacatgcaacccttgctgcctttgcagctgtgtatgtttcgatgtacttcaattccacattaacggattcctctaagcttctgaaacctctcttggtcttcacatttatcatctgtggaataatctgcgggctaacacggataactcagtataagaaccacccagttgatgtctattgtggctttttaataggaggaggaattgcactgtacttgggcttgtatgctgtggggaatttcctgcccagtgatgagagtatgtttcagcacagagacgccctcaggtctctgacagacctcaatcaagatcccaaccgacttttatctgctaaaaatggtagcagcagtgatggaattgctcatacagaaggcatcctcaaccgaaaccacagagatgctagctctctgacaaatctcaaaagagcaaatgctgatgtggaaatcattactccacggagccccatggggaaggagaacatggttaccttcagcaataccttgccgcgagccaataccccatctgtagaagaccctgtcagaagaaatgcgagcattcatgcctctatggattccgctcgatcaaagcagctcctcacccagtggaagaataagaatgaaagtcgaaagttgtccttgcaagttatagagcctgagcctgggcagtcaccacccagatccatagaaatgaggtcaagctcagagccatcgagggtaggggtgaatggagaccaccatggtcctggcaatcagtacctcaaaatccagcctggcgctgtccccggatgtaacaacagcatgcctggagggccaagagtgtccattcagtcccgtcctgggtcctcacagttggtgcacatccctgaggagactcaggaaaacataagcacctcccccaaaagcagctctgctcgggccaagtggttaaaagctgctgaaaagactgtggcctgtaacagaagcaacagccagccccgaatcatgcaagtcatagccatgtccaagcagcagggtgtcctccaaagcagccccaagaacactgaaggcagcacggtctcctgcactggctccatccgctataaaaccttgacagaccatgagcccagtgggatagtgagggttgaggctcacccagagaacaacaggcccatcatacagatcccgtccactgaaggtgaaggcagtggctcctggaagtggaaagcccctgaaaagggcagccttcgccaaacttacgagctcaacgatctcaacagggactcagaaagctgtgagtctctgaaagacagctttggttctggagatcgcaagagaagcaacattgatagcaatgagcatcaccaccacggaattaccaccatccgcgtcaccccagtagagggcagcgaaattggctcagagacgctgtccatttcttcttcccgcgactccaccctgcggagaaagggcaatatcattctaatccctgaaagaagcaacagccccgaaaacactagaaatatcttctacaaaggaacctcccccacacgggcttataaggattgagtgatgtccattccatcattagggctactcgcaaaagaccatatgttgattctacctgtgttctgttccagcgaattgggaagtctcaccaagctagattgtctaccatcagcccagaactctgtaacttttcagaactgctatactcaaacttgcagatctcacatcaaggagagggaaaagcacaatgcaagaacctaactaacgtgatgatatgaagagttttcttaagacctgtcgtcaaacttaaaaggttttgcagagggcagtatcaaaagaaagtggttttcttcaaatgtatactattttacttcctgaatgtgccaactttggggatttttctttatagtgagctgtgggaacccagaacacacacgttttccctacagcagaggccatgcagtattatatattcattttgcagaatctgcacctacagctcaatacgggtggtgctgattattatagtacatataccatgtaaactctcaaactctatttagctgtgaaatagtggtgtgcaattccttgttaaagaaatgctactttattaagaagatgctggctgctttgtgttagaataggacaccccgcagcttctctgtagtggctctgtcacagtcaaaaaatgaaaaggtttttgtgcgtttcttcaaaattctgctttcttcaacatcaaaaattgtgtagaaatattttcagtgaaagggaataactagtacttttctgcatagtttttcttctgcttactttttatttaagtataggtactgctaatgaatctgttttcttagtgagtaaatttgcataattttataaatattattttagagaatcttttgaaattgttgtgatcatattttgctttctatggcttctccttaacttattgattaattttttgaagttatagatatgttctcctattttaaaagcaaaaataacaattgacattccttgagcaaaatatactgctgtgaatttgcaaacaagaaatctgagccaaaacttgacattgtgggttacattgccagaaatgttggtcaagtttgcccttagatgtctacaactagctggcataggttgccatcttaacaagtaatctaaaagtcccattcggttctacattattaactttttttttctatatcctgatgaccagtaaattagagccacactggttaagtttgactcgtctctaaaacgtttttgttaattggacaccaagaggaagaatctgaaaaaaaaatgcatgttggtaagtaaaagtatctcacggtacaaattaagaatgactttcttcaaaatatctgaataggtgcagttttagtttaacatgcaaacaaccattgttgctacctatcctgaatcaagccttgagcctaaatcaaagcaaaccaataccattgataagaagaagataaaaacaaaatattttggagtgttttccaacttaaagtatgaagacatactcagttcttggaacttagtattaaaccttttttatgccatttcataagaattccgatatatacttgatgattgccaaggggatgaaaggaaacaacagagatggttgatctgatcttagctcactttccaataacagaaggagttgtttacagatgaatagtatcacatcattatcaatttccacatgaaaaaggtggagctttctagaaaaaccaacctctaaggcattaggaatttagctgaaaccagcagaattgaaaactctggcaataaaacatggactcaaccatatcccttctggcaatttccttctcagagaggggagtgggaataaaatgttgccttccccacttctcaccaccaccgccatcatgacgctcatactggcttttgcctgtttgtagaggaaaaggtgggctggttttagtactctgaaggacaaaaacaagcaaacaaaaacccctgctgcagcatttcaggtgcagtatgatatttcctaatctttcctatttcttaacaaaagattttaaagtacttctctagtcattgaagtttttttttctttacataaatattgatatattctttttctactcaaagtgccaaaggctacagtttttaatgacttaacaaattgtaccacattgttaaggacatataatgatagacactagaactcagacctctgcatgtatatttgataacatgtcttttgtaaaacaaaaattacaaaaaaatttgtttacattccactggtaccttaatttaaaataaatcagactaaaaggtggtatctcttcttagtgttctatttatcttatttgctaatgggagcacttcttcctttgttaggctgtgctttactgataaaaccaagtattgaataaagagagttaattatctttttaaagtaaataaaattatgaaaatatatatagtatatataaagtactgtgtttaaaaaaatgttatgcaatgttttccaaactgataaagtttgtaaagtgctataaatgtattttgttaagtacagataaaagctattgtgtgagtatattgtgctaaaatcatagaaataaagattagatttcttcatcaaaattggaatagtttggtt

SEQ ID NO: 291776 - DNA, 4858 bp, Homo sapiens
ggccgcggggaatgtgacatcagcggcgccgggcgcttggggctggaggaggcagctcgcctcagctgcgctgtgcacacctcgcccgggggaggacgcagacccgggcaggcggcagggatgtcggcgaaggagaggccaaagggcaaagtgatcaaggacagcgtcaccctcctgccctgcttttatttcgtcgagttgcctatattggcatcatcggtggttagcctctatttcctcgaactcacagatgtcttcaaacctgtgcactctggatttagctgctatgaccggagtcttagcatgccgtacattgaaccaacccaggaggcaattccattcctcatgttgcttagcttggcttttgctggacctgcaattacgattatggtaggagaaggaattctctactgttgcctctccaaaagaagaaatggggtcggactagagcccaacattaatgctggaggctgcaacttcaattccttcctcagacgagctgtcagattcgttggtgttcatgtatttggattatgctctacagctctcattacagatatcatacagctgtccacaggatatcaagcaccttactttctgactgtgtgcaaaccaaactatacctctctgaatgtatcttgcaaagaaaattcctacattgtggaagatatttgctcaggatctgacctcacagttatcaacagtggcagaaagtccttcccttctcaacatgcaacccttgctgcctttgcagctgtgtatgtttcgatgtacttcaattccacattaacggattcctctaagcttctgaaacctctcttggtcttcacatttatcatctgtggaataatctgcgggctaacacggataactcagtataagaaccacccagttgatgtctattgtggctttttaataggaggaggaattgcactgtacttgggcttgtatgctgtggggaatttcctgcccagtgatgagagtatgtttcagcacagagacgccctcaggtctctgacagacctcaatcaagatcccaaccgacttttatctgctaaaaatggtagcagcagtgatggaattgctcatacagaaggcatcctcaaccgaaaccacagagatgctagctctctgacaaatctcaaaagagcaaatgctgatgtggaaatcattactccacggagccccatggggaaggagaacatggttaccttcagcaataccttgccgcgagccaataccccatctgtagaagaccctgtcagaagaaatgcgagcattcatgcctctatggattccgctcgatcaaagcagctcctcacccagtggaagaataagaatgaaagtcgaaagttgtccttgcaagttatagagcctgagcctgggcagtcaccacccagatccatagaaatgaggtcaagctcagagccatcgagggtaggggtgaatggagaccaccatggtcctggcaatcagtacctcaaaatccagcctggcgctgtccccggatgtaacaacagcatgcctggagggccaagagtgtccattcagtcccgtcctgggtcctcacagttggtgcacatccctgaggagactcaggaaaacataagcacctcccccaaaagcagctctgctcgggccaagtggttaaaagctgctgaaaagactgtggcctgtaacagaagcaacagccagccccgaatcatgcaagtcatagccatgtccaagcagcagggtgtcctccaaagcagccccaagaacactgaaggcagcacggtctcctgcactggctccatccgctataaaaccttgacagaccatgagcccagtgggatagtgagggttgaggctcacccagagaacaacaggcccatcatacagatcccgtccactgaaggtgaaggcagtggctcctggaagtggaaagcccctgaaaagggcagccttcgccaaacttacgagctcaacgatctcaacagggactcagaaagctgtgagtctctgaaagacagctttggttctggagatcgcaagagaagcaacattgatagcaatgagcatcaccaccacggaattaccaccatccgcgtcaccccagtagagggcagcgaaattggctcagagacgctgtccatttcttcttcccgcgactccaccctgcggagaaagggcaatatcattctaatccctgaaagaagcaacagccccgaaaacactagaaatatcttctacaaaggaacctcccccacacgggcttataaggattgagtgatgtccattccatcattagggctactcgcaaaagaccatatgttgattctacctgtgttctgttccagcgaattgggaagtctcaccaagctagattgtctaccatcagcccagaactctgtaacttttcagaactgctatactcaaacttgcagatctcacatcaaggagagggaaaagcacaatgcaagaacctaactaacgtgatgatatgaagagttttcttaagacctgtcgtcaaacttaaaaggttttgcagagggcagtatcaaaagaaagtggttttcttcaaatgtatactattttacttcctgaatgtgccaactttggggatttttctttatagtgagctgtgggaacccagaacacacacgttttccctacagcagaggccatgcagtattatatattcattttgcagaatctgcacctacagctcaatacgggtggtgctgattattatagtacatataccatgtaaactctcaaactctatttagctgtgaaatagtggtgtgcaattccttgttaaagaaatgctactttattaagaagatgctggctgctttgtgttagaataggacaccccgcagcttctctgtagtggctctgtcacagtcaaaaaatgaaaaggtttttgtgcgtttcttcaaaattctgctttcttcaacatcaaaaattgtgtagaaatattttcagtgaaagggaataactagtacttttctgcatagtttttcttctgcttactttttatttaagtataggtactgctaatgaatctgttttcttagtgagtaaatttgcataattttataaatattattttagagaatcttttgaaattgttgtgatcatattttgctttctatggcttctccttaacttattgattaattttttgaagttatagatatgttctcctattttaaaagcaaaaataacaattgacattccttgagcaaaatatactgctgtgaatttgcaaacaagaaatctgagccaaaacttgacattgtgggttacattgccagaaatgttggtcaagtttgcccttagatgtctacaactagctggcataggttgccatcttaacaagtaatctaaaagtcccattcggttctacattattaactttttttttctatatcctgatgaccagtaaattagagccacactggttaagtttgactcgtctctaaaacgtttttgttaattggacaccaagaggaagaatctgaaaaaaaaatgcatgttggtaagtaaaagtatctcacggtacaaattaagaatgactttcttcaaaatatctgaataggtgcagttttagtttaacatgcaaacaaccattgttgctacctatcctgaatcaagccttgagcctaaatcaaagcaaaccaataccattgataagaagaagataaaaacaaaatattttggagtgttttccaacttaaagtatgaagacatactcagttcttggaacttagtattaaaccttttttatgccatttcataagaattccgatatatacttgatgattgccaaggggatgaaaggaaacaacagagatggttgatctgatcttagctcactttccaataacagaaggagttgtttacagatgaatagtatcacatcattatcaatttccacatgaaaaaggtggagctttctagaaaaaccaacctctaaggcattaggaatttagctgaaaccagcagaattgaaaactctggcaataaaacatggactcaaccatatcccttctggcaatttccttctcagagaggggagtgggaataaaatgttgccttccccacttctcaccaccaccgccatcatgacgctcatactggcttttgcctgtttgtagaggaaaaggtgggctggttttagtactctgaaggacaaaaacaagcaaacaaaaacccctgctgcagcatttcaggtgcagtatgatatttcctaatctttcctatttcttaacaaaagattttaaagtacttctctagtcattgaagtttttttttctttacataaatattgatatattctttttctactcaaagtgccaaaggctacagtttttaatgacttaacaaattgtaccacattgttaaggacatataatgatagacactagaactcagacctctgcatgtatatttgataacatgtcttttgtaaaacaaaaattacaaaaaaatttgtttacattccactggtaccttaatttaaaataaatcagactaaaaggtggtatctcttcttagtgttctatttatcttatttgctaatgggagcacttcttcctttgttaggctgtgctttactgataaaaccaagtattgaataaagagagttaattatctttttaaagtaaataaaattatgaaaatatatatagtatatataaagtactgtgtttaaaaaaatgttatgcaatgttttccaaactgataaagtttgtaaagtgctataaatgtattttgttaagtacagataaaagctattgtgtgagtatattgtgctaaaatcatagaaataaagattagatttcttcatcaaaattggaatagtttggtt

SEQ ID NO: 291777 - DNA, 465 bp, Homo sapiens
gatgttgcagttcagctctgaggcagtttggaagcagaattcttcctccagtgatctcagtcttttttctcttaagaatttcaactgattggatgaggcctacccacattatggagggtaatctgctttactctctactgacttaaatattaatccatctaaaaaataggccaggcatggtggctcatgcctataattccaccactattgggaggctgaggcacctcacggcaacctctgaagaaggaattatagaaccaactttttattgttgaaaatggagtcttgtagagttcagtgatgggaaactaaagtagaaaaagcacatcacaaagaaacatatatagtacagtgtgatcccaattttgtaaaaatatctgtaatatgtaagcataggtatttgtatatcttaagaaaaaaagcctagaaataaagccacaaaaatattaaaaaaaaatatttgac

SEQ ID NO: 291778 - DNA, 2375 bp, Homo sapiens
gatgttgcagttcagctctgaggcagtttggaagcagaattcttcctccagtgatctcagtcttttttctcttaagaatttcaactgattggatgaggcctacccacattatggagggtaatctgctttactctctactgacttaaatattaatccatctaaaaaataggccaggcatggtggctcatgcctataattccaccactattgggaggctgaggcaggaggatcacttgagcccaggagttcaagaccagcctgggcaatgtagagacccccatctctagggggagaaaaaaaagccaggtatggtagtgcacacctatagtcccagctactcagaaggctgaggtgggaggatcgcttgaacctgggaggttgaggctgcagtcagccatggtcatgccactgtactccagcctgggtgacaagagggagaccctgtcttgaaaaaaagaaaccatcatcacagcaacatctagactagtgtttgactaaaaactggataccatggcctagccaaattgacacacaaaatagaccatcacagtcccaaggcctaaaatacttactatctgagcctttacaaaacaggattgccagccactgaagagaacaaatggtcccaccccctgctgagctcacagtctggctctcctgtgtgcagccacttcttggagctggcttctctccactccccctccagatgctggtcagccaggcggttataaagaatctcatctgctgaaggcttttagcagggactgagtcctgtagctgttggacacctcctgtgggttgggtcactcagaccattcagaatccactgagctgagcttttgcatcttggattgagatctggatgagccaggaggcaggagaggctaggtggtcctcatgaccctaggatagctcttgctgagggatggtggcattctgccctacctctggctcccaggtgccgactggactttgtgagctccagctgctacagttgactgagttcaggctccatgtagctgggatatactacatggttacccctcacccctatggagcttccaaaagagaccctccctcaaagcacagccccttctctgagtgcaaataatggccatcagaggtcagtcacaggtgttaggcaggcatctatgaagctggggatgatagcactgacttcagtgcttggacgagaaccaggagagagtgtgtagaaaaagcacagccagcctcccataaaaggacagactcctgtgacaaccttgtcactctgttcctccctgatactctgggggaggtggaggccagtgggcagttctgaaagctcagcaggtttggagccattgggtgtggactcctctcccagtgttcctcctgggtgttcacagatgttattgaatgcacactggaaccctgcacaggtaaactgaggctttattggcgtgactgccaaaggtcacacagggtggtttggcagagctgggattagaagcccagcctgtctctcttcagtagtaatggagtcctgggaggtttactaggctttagcctcaatctgtggcggcagggtccacagccctggggagtgacacagtcatggtccccatgattggccaggacctgtgtggagagacacaggagacaagaccctgctcttccaggccagaagggaggggagccccagagctgggcagtggcatgccccacagcctggccacctgcttcggctacgcaccatgcagcagctgcacctggctgcctcgggaaaactctgacctctctgggaagtggagccagtggctctgtgggcgtcctttcctgcagcctggagagcaaagcggctttccctgggactgtgtggctcctgtcccaactggcctccccattccacattcccattgctggaccagcaccaggactgggcacagggcttccttttgctgattcatttcccccctaactcattcagagttgagccccatctgagtccccacatgctggccctgaaacggttacaaaggctgaaaccagggatggcaggcccaggatcagtgctgtggctgttggagtgtcctctccaacagcatgacagccgcctccaggtgctcccagcatctgttgcagtcatggcagcctcacggcaacctctgaagaaggaattatagaaccaactttttattgttgaaaatggagtcttgtagagttcagtgatgggaaactaaagtagaaaaagcacatcacaaagaaacatatatagtacagtgtgatcccaattttgtaaaaatatctgtaatatgtaagcataggtatttgtatatcttaagaaaaaaagcctagaaataaagccacaaaaatattaaaaaaaaatatttgac

SEQ ID NO: 291779 - DNA, 1319 bp, Homo sapiens
gatgttgcagttcagctctgaggcagtttggaagcagaattcttcctccagtgatctcagtcttttttctcttaagaatttcaactgattggatgaggcctacccacattatggagggtaatctgctttactctctactgacttaaatattaatccatctaaaaaataggccaggcatggtggctcatgcctataattccaccactattgggaggctgaggcaggaggatcacttgagcccaggagttcaagaccagcctgggcaatgtagagacccccatctctagggggagaaaaaaaagccaggtatggtagtgcacacctatagtcccagctactcagaaggctgaggtgggaggatcgcttgaacctgggaggttgaggctgcagtcagccatggtcatgccactgtactccagcctgggtgacaagagggagaccctgtcttgaaaaaaagaaaccatcatcacagcaacatctagactagtgtttgactaaaaactggataccatggcctagccaaattgacacacaaaatagaccatcacagtcccaaggcctaaaatacttactatctgagcctttacaaaacaggattgccagccactgaagagaacaaatggtcccaccccctgctgagctcacagtctggctctcctgtgtgcagccacttcttggagctggcttctctccactccccctccagatgctggtcagccaggcggttataaagaatctcatctgctgaaggcttttagcagggactgagtcctgtagctgttggacacctcctgtgggttgggtcactcagaccattcagaatccactgagctgagcttttgcatcttggattgagatctggatgagccaggaggcaggagaggctaggtggtcctcatgaccctaggatagctcttgctgagggatggtggcattctgccctacctctggctcccaggtgccgactggactttgtgagctccagctgctacagttgactgagttcaggctccatgtagctgggatatactacatggttacccctcacccctatggagcttccaaaagagaccctccctcaaagcacagccccttctctgagtgcaaataatggccatcagaggtcagtcacaggtgttaggcaggcatctggagggggagtggagagaagccagctccaagaagtggctgcacacaggagagccagactgtgagctcagcagggggtgggaccatttgttctcttcagtggctggcaatcctgtttagtaaaggctcagatagcaactatccagagggcctttgcgcctgtgatggta

SEQ ID NO: 291780 - DNA, 488 bp, Homo sapiens
acccgaggtccctgtacctacttttcccatctgacagtcaggttttaccttccaggtgacaaggtcagtcgatcaccaagagcttcctcatttcctgatcctgggataggtagttgggatacaggaagtagatacaagtagaacacaaaagatgaccctttgactggagaagtttatgatctagttaataaagcaagaccaggccaggtgcggtggctcacgcctgtaatcccagcactttgggaggctgaggcgggtggatcacaaggtcaggagttcaagaccagcaggctggccaacatagtgaaacctcatctctactaaaaatacaaaaaattagccaggtgtggtggcaggcgcctgtagtcccagctacttggggagaatgaggcaggagaatcacttgaacctgggaggcagagattgcagtgagccgagatcacaccactgcactccgtcctgggcaacaagagtgaaactccatctcc

SEQ ID NO: 291781 - DNA, 3515 bp, Homo sapiens
agcggagcgccaggcagcgcggagcggaggtcgggcccacagccgctccgcctcccggcccgcagatccccgacggccgcaccgcgggctcctctggcccgcaagaacacgtgcatggcgtcctggggaaggcgctgagtgcggagtcgcggcgccgcacgcggcaccatggccctggagcaggcgctgcaggcggcgcggcagggcgagctggacgtgctgaggtcgctgcacgccgcaggcctcctggggccctcgctgcgcgacccgctggacgcgctgcccgtgcaccacgcggcccgcgctgggaagctgcactgtctgcgcttcctggtggaggaagccgccctccccgccgcggcccgcgcccgcaacggcgccacaccggcccacgacgcctccgccaccggccacctcgcctgcctgcagtggctgctgtcgcagggcggctgcagagtgcaggacaaagacaattctggtgccacagtcttgcatctggctgcccgcttcggccaccccgaggtggtgaactggctcttgcatcatggcggtggggaccccaccgcggccacagacatgggcgccctgcctatccactacgctgccgccaaaggagacttcccctccctgaggcttctcgtcgagcactaccctgagggagtgaatgcccaaaccaagaacggtgccacgcccctgtacctggcgtgccaggagggccacctggaggtgacccagtacctggtgcaggaatgcggcgcagacccgcacgcgcgcgcccacgacggcatgaccccgctgcacgccgcggcgcagatgggccacagcccagtcatcgtgtggttggtgagctgcaccgacgtgagcctgtccgagcaggacaaagacggcgccaccgccatgcacttcgcggcgagccgcggccacaccaaggtgctcagctggctgctgctgcacggcggggagatctcggctgacctgtggggcgggaccccgctgcacgacgccgccgagaacggggagctagagtgctgccagatcctggtagtgaacggcgcggagctggacgtccgcgaccgggacgggtacacggccgccgacctgtcggacttcaacggccacagccactgcacccgctacctgcgcacggtggagaacctgagcgtggagcaccgcgtgctttcccgggatccatccgcagagctggaggctaagcagccggattcaggcatgtcctcacccaataccacggtgtcggtccagccgctgaactttgacctcagctcgcctaccagcaccctctccaactacgactcctgctcctccagccactccagcatcaagggccagcaccctccatgtgggctttccagcgctagagctgcagacatacagagctacatggacatgctgaacccggagctgggcctgcctcggggcacgattgggaagcccacacccccaccacccccacccagcttccccccgccacccccgcccccaggcacccaactgcccccacccccacctggctacccagctcccaagcctcctgtaggaccacaggcagctgacatctacatgcagaccaagaacaaactccgccacgtggagacagaggccctcaagaaggagctgagctcctgtgacggccacgacgggctgcggaggcaggactccagccgcaagccccgcgccttcagcaagcagcccagcacgggggactactaccggcagctgggccgctgccccggcgagacgctggccgcacgcccgggcatggcgcacagcgaggaggtgcgtgcccgccagcccgcgcgcgccggctgcccgcgcctcggccctgccgcccgcggctcactcgaaggcccctccgctcccccgcaggcggcgctgcttcctgggaaccatgttcctaacggctgcgccgcggaccccaaggcgtccagggagctgccactgccgcccccaccgccgccgccgcccctgccggaggccgcgagttcgccaccgccggccccgcctctgcccctcgagagcgctggccctggctgcgggcagcgccgctcctcctcgtccaccggcagcaccaagtctttcaacatgatgtccccgacgggcgacaactcggagctactggctgagattaaggcaggcaagagcctgaagccgacgccccagagcaaggggctgaccacagtgttctcaggcatcgggcagccggccttccagcccgattcgccgctgccttctgtgtcacctgcactgtcaccagtccggagccccacaccgccagctgcggggtttcagccgctgctcaatggaagcttggttcccgtgccgcccactactcctgcgccgggagtgcagctggacgtggaggctctcatccccacgcacgatgagcagggccggcccatccccgagtggaagcgccaggtgatggtgcgcaagatgcagctgaagatgcaggaggaggaggagcagaggcggaaggaggaggaggaggaggcccggctggccagcatgcccgcctggaggcgggacctcctgcggaagaagctggaagaagagagggagcagaagcggaaagaggaggagcgacagaagcaggaggagctgcggcgggagaaggaacagtcagagaagctgcggacgctgggctacgatgagagcaagctggcgccctggcagcgacaggtcatcctgaagaagggggacatcgctaagtactagaggccgcagactcctgtccgcagcctcgcagctccgtggggccctccgccccagccccagccagccaggccctggtggaaaggctgggagccgcacagccctcccctcctgcgctggaaaccctccctgacccccaccctggccccccgtatccccagcccttggcaacactggagtgcacacgccgccacggttgcccagaaaaagtgcccaagctgctgacgcaaacaacaacaaatgctgcttatttgcatgccgacttacatatatttgcatgttcgttgactatcaaagagtgcagagctctccccagccccgtgggtggtgactttgttttcctgcggggctcagcccctccaggatgcagccccctcccccgcaccccggaaccggcgtcgctggcgcatcctgggtggaggcaggccccgagctcggggaaggggttttcccttcctctctgacccagatctgcgcgcggcctagcccgggcctcatttcttatccccgccaagggtttcctctcagtcatttgtttaccagaaacatgaaaactgcctgtctggccgggccgcacttgtggcccccgggaccccacctctggccccacctccctcaagtctgcgccccgtccccagccagacccactcgctgccgggaccctttcactgccccggtggagtgaatagaggatgaggggccctgaccctgtgtctccaactgctgcaccccatcccgaccctgtctccgccacctcgcagccccattaaagcgctctcatctgg

SEQ ID NO: 291782 - DNA, 3945 bp, Homo sapiens
agcggagcgccaggcagcgcggagcggaggtcgggcccacagccgctccgcctcccggcccgcagatccccgacggccgcaccgcgggctcctctggcccgcaagaacacgtgcatggcgtcctggggaaggcgctgagtgcggagtcgcggcgccgcacgcggcaccatggccctggagcaggcgctgcaggcggcgcggcagggcgagctggacgtgctgaggtcgctgcacgccgcaggcctcctggggccctcgctgcgcgacccgctggacgcgctgcccgtgcaccacgcggcccgcgctgggaagctgcactgtctgcgcttcctggtggaggaagccgccctccccgccgcggcccgcgcccgcaacggcgccacaccggcccacgacgcctccgccaccggccacctcgcctgcctgcagtggctgctgtcgcagggcggctgcagagtgcaggacaaagacaattctggtgccacagtcttgcatctggctgcccgcttcggccaccccgaggtggtgaactggctcttgcatcatggcggtggggaccccaccgcggccacagacatgggcgccctgcctatccactacgctgccgccaaaggagacttcccctccctgaggcttctcgtcgagcactaccctgagggagtgaatgcccaaaccaagaacggtgccacgcccctgtacctggcgtgccaggagggccacctggaggtgacccagtacctggtgcaggaatgcggcgcagacccgcacgcgcgcgcccacgacggcatgaccccgctgcacgccgcggcgcagatgggccacagcccagtcatcgtgtggttggtgagctgcaccgacgtgagcctgtccgagcaggacaaagacggcgccaccgccatgcacttcgcggcgagccgcggccacaccaaggtgctcagctggctgctgctgcacggcggggagatctcggctgacctgtggggcgggaccccgctgcacgacgccgccgagaacggggagctagagtgctgccagatcctggtagtgaacggcgcggagctggacgtccgcgaccgggacgggtacacggccgccgacctgtcggacttcaacggccacagccactgcacccgctacctgcgcacggtggagaacctgagcgtggagcaccgcgtgctttcccgggatccatccgcagagctggaggctaagcagccggattcaggcatgtcctcacccaataccacggtgtcggtccagccgctgaactttgacctcagctcgcctaccagcaccctctccaactacgactcctgctcctccagccactccagcatcaagggccagcaccctccatgtgggctttccagcgctagagctgcagacatacagagctacatggacatgctgaacccggagctgggcctgcctcggggcacgattgggaagcccacacccccaccacccccacccagcttccccccgccacccccgcccccaggcacccaactgcccccacccccacctggctacccagctcccaagcctcctgtaggaccacaggcagctgacatctacatgcagaccaagaacaaactccgccacgtggagacagaggccctcaagaaggagctgagctcctgtgacggccacgacgggctgcggaggcaggactccagccgcaagccccgcgccttcagcaagcagcccagcacgggggactactaccggcagctgggccgctgccccggcgagacgctggccgcacgcccgggcatggcgcacagcgaggaggtgcgtgcccgccagcccgcgcgcgccggctgcccgcgcctcggccctgccgcccgcggctcactcgaaggcccctccgctcccccgcaggcggcgctgcttcctgggaaccatgttcctaacggctgcgccgcggaccccaaggcgtccagggagctgccactgccgcccccaccgccgccgccgcccctgccggaggccgcgagttcgccaccgccggccccgcctctgcccctcgagagcgctggccctggctgcgggcagcgccgctcctcctcgtccaccggcagcaccaagtctttcaacatgatgtccccgacgggcgacaactcggagctactggctgagattaaggcaggcaagagcctgaagccgacgccccagagcaaggggctgaccacagtgttctcaggcatcgggcagccggccttccagcccgattcgccgctgccttctgtgtcacctgcactgtcaccagtccggagccccacaccgccagctgcggggtttcagccgctgctcaatggaagcttggttcccgtgccgcccactactcctgcgccgggagtgcagctggacgtggaggctctcatccccacgcacgatgagcagggccggcccatccccgagtggaagcgccaggtgatggtgcgcaagatgcagctgaagatgcaggaggaggaggagcagaggcggaaggaggaggaggaggaggcccggctggccagcatgcccgcctggaggcgggacctcctgcggaagaagctggaagaagagagggagcagaagcggaaagaggaggagcgacagaagcaggaggagctgcggcgggagaaggaacagtcagagaagctgcggacgctgggctacgatgagagcaagctggcgccctggcagcgacaggtcatcctgaagaagggggacatcgctaagtactagaggccgcagactcctgtccgcagcctcgcagctccgtggggccctccgccccagccccagccagccaggccctggtggaaaggctgggagccgcacagccctcccctcctgcgctggaaaccctccctgacccccaccctggccccccgtatccccagcccttggcaacactggagtgcacacgccgccacggttgcccagaaaaagtgcccaagctgctgacgcaaacaacaacaaatgctgcttatttgcatgccgacttacatatatttgcatgttcgttgactatcaaagagtgcagagctctccccagccccgtgggtggtgactttgttttcctgcggggctcagcccctccaggatgcagccccctcccccgcaccccggaaccggcgtcgctggcgcatcctgggtggaggcaggccccgagctcggggaaggggttttcccttcctctctgacccagatctgcgcgcggcctagcccgggcctcatttcttatccccgccaagggtttcctctcagtcatttgtttaccagaaacatgaaaactgcctgtctggccgggccgcacttgtggcccccgggaccccacctctggccccacctccctcaagtctgcgccccgtccccagccagacccactcgctgccgggaccctttcactgccccggtggagtgaatagaggatgaggggccctgaccctgtgtctccaactgctgcaccccatcccgaccctgtctccgccacctcgcagccccattaaagcgctctcatctgggctccggttcactcactcgctgtggccgcgacttgctctctccttctcgggatttaataccgcgatctcagccaaactccggccgagaagttgagaaatgtcttcaccccctctcgacattcgttcgtgcttcttcgccttggctggagcgataggggcgagcaggggtggggccggctggtgctgctacgcagggccgtgccagcggcttaataagtgacataaaatgtctacacgcataaagtaaccgtacttagggcttctgcaagggccaccagagcgcctaggtggcaagtgggcgccgtgtcacgggccgcgctgcaggcggctgcgcaagtcttccacgcagccgtccagccccatgcgctccagggccgcgtaaacggctccgaggcccgcgggctgctgctggcgccagcgcttgagcatc

SEQ ID NO: 291783 - DNA, 2119 bp, Homo sapiens
catgaccctcgcccgctgcccactgtgagaaccagggggtctaggaagtcagctgctgcacccctcgacggccgctggccgcgagtccccaggagctgagctcctgtgacggccacgacgggctgcggaggcaggactccagccgcaagccccgcgccttcagcaagcagcccagcacgggggactactaccggcagctgggccgctgccccggcgagacgctggccgcacgcccgggcatggcgcacagcgaggaggcaccaagtctttcaacatgatgtccccgacgggcgacaactcggagctactggctgagattaaggcaggcaagagcctgaagccgacgccccagagcaaggggctgaccacagtgttctcaggcatcgggcagccggccttccagcccgattcgccgctgccttctgtgtcacctgcactgtcaccagtccggagccccacaccgccagctgcggggtttcagccgctgctcaatggaagcttggttcccgtgccgcccactactcctgcgccgggagtgcagctggacgtggaggctctcatccccacgcacgatgagcagggccggcccatccccgagtggaagcgccaggtgatggtgcgcaagatgcagctgaagatgcaggaggaggaggagcagaggcggaaggaggaggaggaggaggcccggctggccagcatgcccgcctggaggcgggacctcctgcggaagaagctggaagaagagagggagcagaagcggaaagaggaggagcgacagaagcaggaggagctgcggcgggagaaggaacagtcagagaagctgcggacgctgggctacgatgagagcaagctggcgccctggcagcgacaggtcatcctgaagaagggggacatcgctaagtactagaggccgcagactcctgtccgcagcctcgcagctccgtggggccctccgccccagccccagccagccaggccctggtggaaaggctgggagccgcacagccctcccctcctgcgctggaaaccctccctgacccccaccctggccccccgtatccccagcccttggcaacactggagtgcacacgccgccacggttgcccagaaaaagtgcccaagctgctgacgcaaacaacaacaaatgctgcttatttgcatgccgacttacatatatttgcatgttcgttgactatcaaagagtgcagagctctccccagccccgtgggtggtgactttgttttcctgcggggctcagcccctccaggatgcagccccctcccccgcaccccggaaccggcgtcgctggcgcatcctgggtggaggcaggccccgagctcggggaaggggttttcccttcctctctgacccagatctgcgcgcggcctagcccgggcctcatttcttatccccgccaagggtttcctctcagtcatttgtttaccagaaacatgaaaactgcctgtctggccgggccgcacttgtggcccccgggaccccacctctggccccacctccctcaagtctgcgccccgtccccagccagacccactcgctgccgggaccctttcactgccccggtggagtgaatagaggatgaggggccctgaccctgtgtctccaactgctgcaccccatcccgaccctgtctccgccacctcgcagccccattaaagcgctctcatctgggctccggttcactcactcgctgtggccgcgacttgctctctccttctcgggatttaataccgcgatctcagccaaactccggccgagaagttgagaaatgtcttcaccccctctcgacattcgttcgtgcttcttcgccttggctggagcgataggggcgagcaggggtggggccggctggtgctgctacgcagggccgtgccagcggcttaataagtgacataaaatgtctacacgcataaagtaaccgtacttagggcttctgcaagggccaccagagcgcctaggtggcaagtgggcgccgtgtcacgggccgcgctgcaggcggctgcgcaagtcttccacgcagccgtccagccccatgcgctccagggccgcgtaaacggctccgaggcccgcgggctgctgctggcgccagcgcttgagcatc

SEQ ID NO: 291784 - DNA, 1959 bp, Homo sapiens
gctgtcccagtctcatcctgccccccctccctcctaactccgctgtcacttctctcctcttggtccctagaagtgagagtcctgaggcacaggaagagcaccaagtctttcaacatgatgtccccgacgggcgacaactcggagctactggctgagattaaggcaggcaagagcctgaagccgacgccccagagcaaggggctgaccacagtgttctcaggcatcgggcagccggccttccagcccgattcgccgctgccttctgtgtcacctgcactgtcaccagtccggagccccacaccgccagctgcggggtttcagccgctgctcaatggaagcttggttcccgtgccgcccactactcctgcgccgggagtgcagctggacgtggaggctctcatccccacgcacgatgagcagggccggcccatccccgagtggaagcgccaggtgatggtgcgcaagatgcagctgaagatgcaggaggaggaggagcagaggcggaaggaggaggaggaggaggcccggctggccagcatgcccgcctggaggcgggacctcctgcggaagaagctggaagaagagagggagcagaagcggaaagaggaggagcgacagaagcaggaggagctgcggcgggagaaggaacagtcagagaagctgcggacgctgggctacgatgagagcaagctggcgccctggcagcgacaggtcatcctgaagaagggggacatcgctaagtactagaggccgcagactcctgtccgcagcctcgcagctccgtggggccctccgccccagccccagccagccaggccctggtggaaaggctgggagccgcacagccctcccctcctgcgctggaaaccctccctgacccccaccctggccccccgtatccccagcccttggcaacactggagtgcacacgccgccacggttgcccagaaaaagtgcccaagctgctgacgcaaacaacaacaaatgctgcttatttgcatgccgacttacatatatttgcatgttcgttgactatcaaagagtgcagagctctccccagccccgtgggtggtgactttgttttcctgcggggctcagcccctccaggatgcagccccctcccccgcaccccggaaccggcgtcgctggcgcatcctgggtggaggcaggccccgagctcggggaaggggttttcccttcctctctgacccagatctgcgcgcggcctagcccgggcctcatttcttatccccgccaagggtttcctctcagtcatttgtttaccagaaacatgaaaactgcctgtctggccgggccgcacttgtggcccccgggaccccacctctggccccacctccctcaagtctgcgccccgtccccagccagacccactcgctgccgggaccctttcactgccccggtggagtgaatagaggatgaggggccctgaccctgtgtctccaactgctgcaccccatcccgaccctgtctccgccacctcgcagccccattaaagcgctctcatctgggctccggttcactcactcgctgtggccgcgacttgctctctccttctcgggatttaataccgcgatctcagccaaactccggccgagaagttgagaaatgtcttcaccccctctcgacattcgttcgtgcttcttcgccttggctggagcgataggggcgagcaggggtggggccggctggtgctgctacgcagggccgtgccagcggcttaataagtgacataaaatgtctacacgcataaagtaaccgtacttagggcttctgcaagggccaccagagcgcctaggtggcaagtgggcgccgtgtcacgggccgcgctgcaggcggctgcgcaagtcttccacgcagccgtccagccccatgcgctccagggccgcgtaaacggctccgaggcccgcgggctgctgctggcgccagcgcttgagcatc

SEQ ID NO: 291785 - DNA, 3853 bp, Homo sapiens
agcggagcgccaggcagcgcggagcggaggtcgggcccacagccgctccgcctcccggcccgcagatccccgacggccgcaccgcgggctcctctggcccgcaagaacacgtgcatggcgtcctggggaaggcgctgagtgcggagtcgcggcgccgcacgcggcaccatggccctggagcaggcgctgcaggcggcgcggcagggcgagctggacgtgctgaggtcgctgcacgccgcaggcctcctggggccctcgctgcgcgacccgctggacgcgctgcccgtgcaccacgcggcccgcgctgggaagctgcactgtctgcgcttcctggtggaggaagccgccctccccgccgcggcccgcgcccgcaacggcgccacaccggcccacgacgcctccgccaccggccacctcgcctgcctgcagtggctgctgtcgcagggcggctgcagagtgcaggacaaagacaattctggtgccacagtcttgcatctggctgcccgcttcggccaccccgaggtggtgaactggctcttgcatcatggcggtggggaccccaccgcggccacagacatgggcgccctgcctatccactacgctgccgccaaaggagacttcccctccctgaggcttctcgtcgagcactaccctgagggagtgaatgcccaaaccaagaacggtgccacgcccctgtacctggcgtgccaggagggccacctggaggtgacccagtacctggtgcaggaatgcggcgcagacccgcacgcgcgcgcccacgacggcatgaccccgctgcacgccgcggcgcagatgggccacagcccagtcatcgtgtggttggtgagctgcaccgacgtgagcctgtccgagcaggacaaagacggcgccaccgccatgcacttcgcggcgagccgcggccacaccaaggtgctcagctggctgctgctgcacggcggggagatctcggctgacctgtggggcgggaccccgctgcacgacgccgccgagaacggggagctagagtgctgccagatcctggtagtgaacggcgcggagctggacgtccgcgaccgggacgggtacacggccgccgacctgtcggacttcaacggccacagccactgcacccgctacctgcgcacggtggagaacctgagcgtggagcaccgcgtgctttcccgggatccatccgcagagctggaggctaagcagccggattcaggcatgtcctcacccaataccacggtgtcggtccagccgctgaactttgacctcagctcgcctaccagcaccctctccaactacgactcctgctcctccagccactccagcatcaagggccagcaccctccatgtgggctttccagcgctagagctgcagacatacagagctacatggacatgctgaacccggagctgggcctgcctcggggcacgattgggaagcccacacccccaccacccccacccagcttccccccgccacccccgcccccaggcacccaactgcccccacccccacctggctacccagctcccaagcctcctgtaggaccacaggcagctgacatctacatgcagaccaagaacaaactccgccacgtggagacagaggccctcaagaaggagctgagctcctgtgacggccacgacgggctgcggaggcaggactccagccgcaagccccgcgccttcagcaagcagcccagcacgggggactactaccggcagctgggccgctgccccggcgagacgctggccgcacgcccgggcatggcgcacagcgaggaggtgcgtgcccgccagcccgcgcgcgccggctgcccgcgcctcggccctgccgcccgcggctcactcgaaggcccctccgctcccccgcaggcggcgctgcttcctgggaaccatgttcctaacggctgcgccgcggaccccaaggcgtccagggagctgccactgccgcccccaccgccgccgccgcccctgccggaggccgcgagttcgccaccgccggccccgcctctgcccctcgagagcgctggccctggctgcgggcagcgccgctcctcctcgtccaccggcagcaccaagtctttcaacatgatgtccccgacgggcgacaactcggagctactggctgagattaaggcaggcaagagcctgaagccgacgccccagagcaaggggctgaccacagtgttctcaggcatcgggcagccggccttccagcccgattcgccgctgccttctgtgtcacctgcactgtcaccagtccggagccccacaccgccagctgcggggtttcagccgctgctcaatggaagcttggttcccgtgccgcccactactcctgcgccgggagtgcagctggacgtggaggctctcatccccacgcacgatgagcagggccggcccatccccgagtggaagcgccaggtgatggtgcgcaagatgcagctgaagatgcaggaggaggaggagcagaggcggaaggaaagaggaggagcgacagaagcaggaggagctgcggcgggagaaggaacagtcagagaagctgcggacgctgggctacgatgagagcaagctggcgccctggcagcgacaggtcatcctgaagaagggggacatcgctaagtactagaggccgcagactcctgtccgcagcctcgcagctccgtggggccctccgccccagccccagccagccaggccctggtggaaaggctgggagccgcacagccctcccctcctgcgctggaaaccctccctgacccccaccctggccccccgtatccccagcccttggcaacactggagtgcacacgccgccacggttgcccagaaaaagtgcccaagctgctgacgcaaacaacaacaaatgctgcttatttgcatgccgacttacatatatttgcatgttcgttgactatcaaagagtgcagagctctccccagccccgtgggtggtgactttgttttcctgcggggctcagcccctccaggatgcagccccctcccccgcaccccggaaccggcgtcgctggcgcatcctgggtggaggcaggccccgagctcggggaaggggttttcccttcctctctgacccagatctgcgcgcggcctagcccgggcctcatttcttatccccgccaagggtttcctctcagtcatttgtttaccagaaacatgaaaactgcctgtctggccgggccgcacttgtggcccccgggaccccacctctggccccacctccctcaagtctgcgccccgtccccagccagacccactcgctgccgggaccctttcactgccccggtggagtgaatagaggatgaggggccctgaccctgtgtctccaactgctgcaccccatcccgaccctgtctccgccacctcgcagccccattaaagcgctctcatctgggctccggttcactcactcgctgtggccgcgacttgctctctccttctcgggatttaataccgcgatctcagccaaactccggccgagaagttgagaaatgtcttcaccccctctcgacattcgttcgtgcttcttcgccttggctggagcgataggggcgagcaggggtggggccggctggtgctgctacgcagggccgtgccagcggcttaataagtgacataaaatgtctacacgcataaagtaaccgtacttagggcttctgcaagggccaccagagcgcctaggtggcaagtgggcgccgtgtcacgggccgcgctgcaggcggctgcgcaagtcttccacgcagccgtccagccccatgcgctccagggccgcgtaaacggctccgaggcccgcgggctgctgctggcgccagcgcttgagcatc

SEQ ID NO: 291786 - DNA, 1689 bp, Homo sapiens
cgctctttttttctgtttaatttttttgttttagattttcttgtttttttttgcacaaaacaaaaatttattgggagaaagatggctgatgggaggcaagatctggattcaggaatcctcaattttagctctcgctctgtcaccaaaaccctccgtccctcccagagcctcgaggagtttccccttgtgtaaaccggtatcgcgtcccttccagctctgacatcctgcggttctagaatacccattgattgaaagagctgtggccaaacaggaaggacagagcaagagccgctgacaaaggattctgccaagacagaatcccaaggtcacaggagagaggcttggggcagtgaaagccctctcgggtcttggctttggaagtgtggactgtaccagcagatgggcccttgggaagccaacagggaacaattcaaggctggagagaaaaaggccacctttgacccagcagaaggcagaggcgggagaggagggtgaggatgtacaaggagcatcgcaggcgaggaaacaatggccaggacctaactgtggtgggaactgcctttgtctccacacactcgcaatcaacatgcgtatttgctattctcaaacaactcccttccacccccttaggctgaaaggacaaactcatcagagttgaggagtacctacctgatgaagctgttcatgcttccagcatcaaactggacgtttactgtctgcccaaaagccagtttccaaaaggtttgcttccctctgttcagtggattcttgactacatataggtcatatatttcaaaaaataatgcctagctatttctactttgaaatcatgactaaagccaaaccacaaccacagcaaagataacctaaggatttgtttaccagaaatacctacaaaaaagtttgcaggccgggcgcgatggctcacacttgtaatcccagcactttgagaggccgagatgggcagatcacctgaggtcaggggttcaagaccatcctgcccaacatgatgaaacctggtctctactaaaaatacaaaaattaaccgggtgtggtggcgcatgcctgtaatcccagctactcaggagactgaggcggaattgccagaaccctggagggcagaggttgcagtaagctgagatcgggccactgcactccagcctgggtgacagaatgagactcagtctcccaccctgccaaaaagtttgcaatgtcggcagcaaagtgcaaacagagccggctctgggtgaaagctttagttatgaaaaataagaaaaaaaaaatccctaagcatttcttaacactagttttaaagaaaaccccctctccaaaggtatgtttctccttcaactttcttgactttgccaggctgtcaggatgcaagctacctactcttttctggatggatcgggacaaagtttttaaacaaagactgtgtcctctccacaagcccttcccaccaccaccaccccagccccccgccgccataattacaggggctgtgaaatggctgttgagtgatggtcacacaaccagaaggcagatgaaaaggtcaggctctaagaggggttcagcctcccagtaccagcctgctgtgcccaggggtgggagtgctgggagaactgtcttccccagacaggcagctatgccgcctcccactgcaaaggcaccaaaaggcaacatccgtcc

SEQ ID NO: 291787 - DNA, 1062 bp, Homo sapiens
cgctctttttttctgtttaatttttttgttttagattttcttgtttttttttgcacaaaacaaaaatttattgggagaaagatggctgatgggaggcaagatctggattcaggaatcctcaattttagctctcgctctgtcaccaaaaccctccgtccctcccagagcctcgaggagtttccccttgtgtaaaccggtatcgcgtcccttccagctctgacatcctgcggttctagaatacccattgattgaaagagctgtggccaaacaggaaggacagagcaagagccgctgacaaaggattctgccaagacagaatcccaaggtcacaggagagaggcttggggcagtgaaagccctctcgggtcttggctttggaagtgtggactgtaccagcagatgggcccttgggaagccaacagggaacaattcaaggctggagagaaaaaggccacctttgacccagcagaaggcagaggcgggagaggagggtgaggatgtacaaggagcatcgcaggcgaggaaacaatggccaggacctaactgtggtgggaactgcctttgtctccacacactcgcaatcaacatgcgtatttgctattctcaaacaactcccttccacccccttaggctgaaaggacaaactcatcagagttgaggagtacctacctgatgaagctgttcatgcttccagcatcaaactggacgtttactgtctgcccaaaagccagtttccaaaaggctgtcaggatgcaagctacctactcttttctggatggatcgggacaaagtttttaaacaaagactgtgtcctctccacaagcccttcccaccaccaccaccccagccccccgccgccataattacaggggctgtgaaatggctgttgagtgatggtcacacaaccagaaggcagatgaaaaggtcaggctctaagaggggttcagcctcccagtaccagcctgctgtgcccaggggtgggagtgctgggagaactgtcttccccagacaggcagctatgccgcctcccactgcaaaggcaccaaaaggcaacatccgtcc

SEQ ID NO: 291788 - DNA, 1620 bp, Homo sapiens
cgtcgacgggatggagggttttggtgacagagcgagagctaaaattgaggattcctgaatccagatcttgcctcccatcagccatctttctcccagagcctcgaggagtttccccttgtgtaaaccggtatcgcgtcccttccagctctgacatcctgcggttctagaatacccattgattgaaagagctgtggccaaacaggaaggacagagcaagagccgctgacaaaggattctgccaagacagaatcccaaggtcacaggagagaggcttggggcagtgaaagccctctcgggtcttggctttggaagtgtggactgtaccagcagatgggcccttgggaagccaacagggaacaattcaaggctggagagaaaaaggccacctttgacccagcagaaggcagaggcgggagaggagggtgaggatgtacaaggagcatcgcaggcgaggaaacaatggccaggacctaactgtggtgggaactgcctttgtctccacacactcgcaatcaacatgcgtatttgctattctcaaacaactcccttccacccccttaggctgaaaggacaaactcatcagagttgaggagtacctacctgatgaagctgttcatgcttccagcatcaaactggacgtttactgtctgcccaaaagccagtttccaaaaggtttgcttccctctgttcagtggattcttgactacatataggtcatatatttcaaaaaataatgcctagctatttctactttgaaatcatgactaaagccaaaccacaaccacagcaaagataacctaaggatttgtttaccagaaatacctacaaaaaagtttgcaggccgggcgcgatggctcacacttgtaatcccagcactttgagaggccgagatgggcagatcacctgaggtcaggggttcaagaccatcctgcccaacatgatgaaacctggtctctactaaaaatacaaaaattaaccgggtgtggtggcgcatgcctgtaatcccagctactcaggagactgaggcggaattgccagaaccctggagggcagaggttgcagtaagctgagatcgggccactgcactccagcctgggtgacagaatgagactcagtctcccaccctgccaaaaagtttgcaatgtcggcagcaaagtgcaaacagagccggctctgggtgaaagctttagttatgaaaaataagaaaaaaaaaatccctaagcatttcttaacactagttttaaagaaaaccccctctccaaaggtatgtttctccttcaactttcttgactttgccaggctgtcaggatgcaagctacctactcttttctggatggatcgggacaaagtttttaaacaaagactgtgtcctctccacaagcccttcccaccaccaccaccccagccccccgccgccataattacaggggctgtgaaatggctgttgagtgatggtcacacaaccagaaggcagatgaaaaggtcaggctctaagaggggttcagcctcccagtaccagcctgctgtgcccaggggtgggagtgctgggagaactgtcttccccagacaggcagctatgccgcctcccactgcaaaggcaccaaaaggcaacatccgtcc

SEQ ID NO: 291789 - DNA, 1546 bp, Homo sapiens
cacagagcttcaaaaaaagagcgggacagggacaagcgtatctaagaggctgaacatgaatccacagatcagaaatccgatggagcggatgtatcgagacacattctacgacaactttgaaaacgaacccatcctctatggtcggagctacacttggctgtgctatgaagtgaaaataaagaggggccgctcaaatctcctttgggacacaggggtctttcgaggccaggtacccaggtgtatttcaagcctcagtaccacgcagaaatgtgcttcctctcttggttctgtggcaaccagctgcctgcttacaagtgtttccagatcacctggtttgtatcctggaccccctgcccggactgtgtggcgaagctggccgaattcctgtctgagcaccccaatgtcaccctgaccatctctgccgcccgcctctactactactgggaaagagattaccgaagggcgctctgcaggctgagtcaggcaggagcccgcgtgaagatcatggactatgaagaatttgcatactgctgggaaaactttgtgtacaatgaaggtcagcaattcatgccttggtacaaattcgatgaaaattatgcattcctgcaccgcacgctaaaggagattctcagatacctgatggatccagacacattcactttcaactttaataatgaccctttggtccttcgacggcgccagacctacttgtgctatgaggtggagcgcctggacaatggcacctgggtcctgatggaccagcacatgggctttctatgcaacgaggctaagaatcttctctgtggcttttacggccgccatgcggagctgcgcttcttggacctggttccttctttgcagttggacccggcccagatctacagggtcacttggttcatctcctggagcccctgcttctcctggggctgtgccggggaagtgcgtgcgttccttcaggagaacacacacgtgagactgcgcatcttcgctgcccgcatctatgattacgaccccctatataaggaggcgctgcaaatgctgcgggatgctggggcccaagtctccatcatgacctacgatgagtttgagtactgctgggacacctttgtgtaccgccagggatgtcccttccagccctgggatggactagaggagcacagccaagccctgagtgggaggctgcgggccattctccagaatcagggaaactgaaggatgggcctcagtctctaaggaaggcagagacctgggttgagcagcagaataaaagatcttcttccaagaaatgcaaacagaccgttcaccaccatctccagctgctcacagacaccagcaaagcaatgtgctcctgatcaagtagattttttaaaaatcagagtcaattaattttaattgaaaatttctcttatgttccaagtgtacaagagtaagattatgctcaatattcccagaatagttttcaatgtattaatgaagtgattaattggctccatatttagactaataaaacattaagaatcttccataattgtttccacaaacacta

SEQ ID NO: 291790 - DNA, 1827 bp, Homo sapiens
cacagagcttcaaaaaaagagcgggacagggacaagcgtatctaagaggctgaacatgaatccacagatcagaaatccgatggagcggatgtatcgagacacattctacgacaactttgaaaacgaacccatcctctatggtcggagctacacttggctgtgctatgaagtgaaaataaagaggggccgctcaaatctcctttgggacacaggggtctttcgaggccaggtacccaggtgtatttcaagcctcagtaccacgcagaaatgtgcttcctctcttggttctgtggcaaccagctgcctgcttacaagtgtttccagatcacctggtttgtatcctggaccccctgcccggactgtgtggcgaagctggccgaattcctgtctgagcaccccaatgtcaccctgaccatctctgccgcccgcctctactactactgggaaagagattaccgaagggcgctctgcaggctgagtcaggcaggagcccgcgtgaagatcatggactatgaagaatttgcatactgctgggaaaactttgtgtacaatgaaggtcagcaattcatgccttggtacaaattcgatgaaaattatgcattcctgcaccgcacgctaaaggagattctcagatacctgatggatccagacacattcactttcaactttaataatgaccctttggtccttcgacggcgccagacctacttgtgctatgaggtggagcgcctggacaatggcacctgggtcctgatggaccagcacatgggctttctatgcaacgaggctaagaatcttctctgtggcttttacggccgccatgcggagctgcgcttcttggacctggttccttctttgcagttggacccggcccagatctacagggtcacttggttcatctcctggagcccctgcttctcctggggctgtgccggggaagtgcgtgcgttccttcaggagaacacacacgtgagactgcgcatcttcgctgcccgcatctatgattacgaccccctatataaggaggcgctgcaaatgctgcgggatgctggggcccaagtctccatcatgacctacgatgagtttgagtactgctgggacacctttgtgtaccgccagggatgtcccttccagccctgggatggactagaggagcacagccaagccctgagtgggaggctgcgggccattctccaggtgagggcttcctccctctgcctggtgccccatcggcctccccctcctccccgctcccctgtgccttgccttcccctctgctcagagcctcctctgggttccctgctccccacagggcgcccagctccgtccctccctttccttctcacagcctccttctctttcccacctcccgcatccctccctcctctcccgtcattgtcactgtccccaggccacctccctgtgccctctttccactctctcacctcctgctccattcaacccccctgctcttccagaatcagggaaactgaaggatgggcctcagtctctaaggaaggcagagacctgggttgagcagcagaataaaagatcttcttccaagaaatgcaaacagaccgttcaccaccatctccagctgctcacagacaccagcaaagcaatgtgctcctgatcaagtagattttttaaaaatcagagtcaattaattttaattgaaaatttctcttatgttccaagtgtacaagagtaagattatgctcaatattcccagaatagttttcaatgtattaatgaagtgattaattggctccatatttagactaataaaacattaagaatcttccataattgtttccacaaacacta

SEQ ID NO: 291791 - DNA, 380 bp, Homo sapiens
  misc_feature (91)..(91): n is a, c, g, or t
  misc_feature (109)..(109): n is a, c, g, or t
gggcccccatgcccccccccacaccccggggagcccagcattcctctgtttgtgttgtacagttcctgttggttttgacagatgtataatncccatggtactaccgttnccattagtgtatcatacagaatcgttcaccaccatctccagctgctcacagacaccagcaaagcaatgtgctcctgatcaagtagattttttaaaaatcagagtcaattaattttaattgaaaatttctcttatgttccaagtgtacaagagtaagattatgctcaatattcccagaatagttttcaatgtattaatgaagtgattaattggctccatatttagactaataaaacattaagaatcttccataattgtttccacaaacacta

SEQ ID NO: 291792 - DNA, 1190 bp, Homo sapiens
cgctcgtgctgttgctggaaagcgagctcgctgtagaccggccgcgacaccatgtagctgcagctgtactcggggagctgcggcggctccgacctgccgcctggcgctgccatgacctgcgagccagaggacagcgaggagggaggacacgcgggaaggaataaactggactacatggaaatcaagactagaagagagggaggaggagctggagctatcctacctcatcagtgttttgtcttctgttgggatgaactttgttaaaactaatgcatggttaagatgaaaggcagaaggaagggtttgataaaccagaacattctcgcctgattgttagtgttctgaagtaaatacagaagaggctccaaaatacagacctctgtacatcaaccttccgtaatccacctgccttgcatatgcagaccatgacaattctacgagctcctggaaacagaactcagaacgcctccccagagaaccctgatgcaaattctctgaaatggtagtcagcatgtgcgttttcctgagaagtgaatgagtcaacagctttcaacagatcttcaaaggcttacttcacccaatgaagttaagaaccactaaagaagaaacctaaaaggaaaatccaggtcatgaactttgcaatttttattcacatacagagaagaggggaggaatctcttgtgtatgttttacttatgtataccactggttcttaataaagggctttttttgcctccagaggtcaatgcctggagacatttttggttgtcacacctagggagatgctattgggatctagtgagtagagaccagagatgctgctaaacatcctacaatgaagtttgctatcactccaaggttttgcatgcgacttaaactgtacatttattaatcaattgctacatgtactaaaatatgtatctctctccaaaaaaaaaaaaaaaaaaaaaaaacaaaaaaggggggggcggtacaaaaagtatcccccgcggggggggcccaacctgtaacgcgcacccaaggattgtcagtgggcacaaggggttccccccaagaaggggggccgaagaataagcagaggcaagagacggcgattcacaaggtgtgactgcgcaaaaccggccagcgcgaactctggcaaaagagcccctaacatcgggggggggcaacaactgggacaaagacaacta

SEQ ID NO: 291793 - DNA, 707 bp, Homo sapiens
tgctgttgctggaaagcgagctcgctgtagaccggccgcgacaccatgtagctgcagctgtactcggggagctgcggcggctccgacctgccgcctggcgctgccatgacctgcgagccagaggacagcgaggagggaggacacgcggtaagcgaggacgatcggaggggaagagcgaggaacagaaagaacgggatcacctgttagctgcagccaggcccccctgcaccgcgagtctggtccgcgtcctgcagccctcggcgctcgcgacaagcgccccacggcgcgcacggccagcctgcaggggggcacctgagaaccttcgggtctcgtggcctgcacccgctgcccggggttccccaaacttgaagcgagtaagcccctgctctgggggcttcccgagttccacccagtcccctatggcccgcagccagggcgctgtccgcgttctgaaatctcccccaaaccgaggggctggggcaggggccaaaggcgcttgcaaggctggaaggggacactgagattccctccctccccgcacctgacccgggacgcagctccaggtgcgcactggaggagaggtgcagacccccgggccaggcgtggaaccgtcagggcgcgctccgcgggtccccaagaggcggacgctgcaggcacattccagcagctgtcgcagccctctcgggggcagaactttcagcttattg

SEQ ID NO: 291794 - DNA, 3074 bp, Homo sapiens
gaattcgcggccgctcgacgctcagcagagctaccagctgccctgttggcttcgctggtcggatcgtcctcctggccccgccaaacaggcggggggagcggccccgactgtggggccatggcagtagtctcctcgttctccgccgccgctagcctagctgagtcgccggcttctgcgctaggggctcccaccgcctccgcaggctaaggagccgctgccaccaacgagctgtgagggttactatgctccctctttgccgccgtctcctcctcttgcccgcgcaggcacccctctggctgctcagtcctgcctcagtgtcaaaccagaagagaagtaaaattcaacaaaaatttatgtgtggagttccttcttaaaagaagaaaaaagtgattatttagactatggatcggagcaaacggaattcaattgcaggatttcctccacgtgtggagcgtcttgaagagtttgaaggaggtggtggaggagaaggaaatgtgagccaggtgggaagagtttggccatcttcgtatcgagctcttataagtgccttttccagactgacgcgtttggatgatttcacctgtgaaaaaatagggtctggcttcttttctgaagtgttcaaggtacgacaccgagcttctggtcaggtgatggctcttaagatgaacacattgagcagtaaccgggcaaacatgctgaaagaagtacagctcatgaatagactctcccatcccaacatccttaggttcatgggtgtatgtgttcatcaaggacaattgcatgcacttacagagtatatcaactccgggaacctggaacagttgctagacagtaacctgcatttgccttggactgtgagggtaaaactggcctatgacatagcagtgggcctcagctaccttcacttcaaaggcatttttcatcgggacctcacatctaagaactgcctgataaagagggatgagaatggttactctgcagtggtagctgactttggcctggctgagaagatccccgatgtcagcatggggagtgagaagctggccgtggtgggttccccattctggatggcacctgaggttctccgagatgagccctataatgaaaaggcagatgtgttctcttatggtatcatcctctgcgagatcatcgcccgcatccaggccgatccggactatcttccccgcacagagaatttcgggctggactatgatgctttccagcacatggtgggagactgtcccccagattttctgcaacttactttcaactgctgtaacatggatcccaaactgcgcccatcttttgtggagattgggaagaccctggaggaaattctgagccgcctacaggaagaagagcaggagagggataggaagctgcagcccacagccaggggactcttggagaaagcacctggggtgaagcgactaagctcactggatgacaagatcccccacaagtcaccatgcccaagacgtaccatctggctgtctcgaagccagtcagatatcttttcccgtaagcccccacgtacagtgagtgtcttggacccatactaccggccacgagatggtgctgcccgcacccccaaagtcaacccttttagtgctcgccaggacctcatggggggcaagatcaagttttttgacctgcccagcaagtctgtcatctctctggtatttgacctggatgcaccagggcccggaactatgcccctggctgactggcaggagcccctggccccacctattcgccggtggcgttccttgcctggttcgcctgagttcttgcatcaagaggcttgtccatttgtgggccgggaagaatcgctatctgatgggcccccaccacgcctaagtagtctcaagtacagagttaaagagatcccaccattccgggcatctgccctaccagctgctcaagcccatgaggctatggactgctccattctccaggaagaaaatggttttgggtccaggccccaggggaccagtccatgccctgcgggtgcttctgaggagatggaggtagaagaaaggccagcaggctcaactccagccaccttctccacctcaggcataggcctgcaaacccagggaaagcaggatgggtgagggggtttagtccctgcctcaccttggggatggaccttcagctgaaaccatatggccccctaggtgcacagccttgattcttccctggagcctacagagcaggcaggctaggccaagccaggctcaacttctgggctcccagtgcccattggctgtgtatgacgggaggcagcagtgagaggccttcctagttagggccaacagctgataccaagcctctgaaatccagcaaggaggtctgcctcccaccagaccctctccagtgtacttccccagataggaccagaggatgtctagttctaggctgagctggcaggcagctattaccccggttctttccccaccccaggtctgtctcttgccttttcttggggcatataagctactgagtggaacatggagctgatcaagaggccgtaatggtcatggctgtttcccagacctgaatattggggtgcttcttgccagtattctaagacatttgagtaattgctgtttgcacttactgcatggtcagaccacgtcactacatttctatgcaaggggacagcaaggcagcgtggtggtcatggctcttagctaacctattcaaagaccttttcctgttgattaatctattttcatatttataaaggagtcttaatgttctgccccataagactttcaaccttgtggttgggagtggggctggttttgtaggccctagggcctgcttctatgtatttatcaacatgtgatacattcaattggttaaatggtttatacagggactgatttgcttcccttcctgccatggctggagctttgggaacagtctgtccttacagagctgcaataagaaataaccaaagatgaagctggtcaaatattttcataacttgcttctgttgatttttttttttgtaaaactttcccaagacattttcagacttaaaaataaagtcagtgttacaggtg

SEQ ID NO: 291795 - DNA, 3025 bp, Homo sapiens
gaattcgcggccgctcgacgctcagcagagctaccagctgccctgttggcttcgctggtcggatcgtcctcctggccccgccaaacaggcggggggagcggccccgactgtggggccatggcagtagtctcctcgttctccgccgccgctagcctagctgagtcgccggcttctgcgctaggggctcccaccgcctccgcaggctaaggagccgctgccaccaacgagctgtgagggttactatgctccctctttgccgccgtctcctcctcttgcccgcgcaggcacccctctggctgctcagtcctgcctcagtgtcaaaccagaagagaagtaaaattcaacaaaaatttatgtgtggagttccttcttaaaagaagaaaaaagtgattatttagactatggatcggagcaaacggaattcaattgcaggatttcctccacgtgtggagcgtcttgaagagtttgaaggaggtggtggaggagaaggaaatgtgagccaggtgggaagagtttggccatcttcgtatcgagctcttataagtgccttttccagactgacgcgtttggatgatttcacctgtgaaaaaatagggtctggcttcttttctgaagtgttcaaggtacgacaccgagcttctggtcaggtgatggctcttaagatgaacacattgagcagtaaccgggcaaacatgctgaaagaagtacagctcatgaatagactctcccatcccaacatccttagtatatcaactccgggaacctggaacagttgctagacagtaacctgcatttgccttggactgtgagggtaaaactggcctatgacatagcagtgggcctcagctaccttcacttcaaaggcatttttcatcgggacctcacatctaagaactgcctgataaagagggatgagaatggttactctgcagtggtagctgactttggcctggctgagaagatccccgatgtcagcatggggagtgagaagctggccgtggtgggttccccattctggatggcacctgaggttctccgagatgagccctataatgaaaaggcagatgtgttctcttatggtatcatcctctgcgagatcatcgcccgcatccaggccgatccggactatcttccccgcacagagaatttcgggctggactatgatgctttccagcacatggtgggagactgtcccccagattttctgcaacttactttcaactgctgtaacatggatcccaaactgcgcccatcttttgtggagattgggaagaccctggaggaaattctgagccgcctacaggaagaagagcaggagagggataggaagctgcagcccacagccaggggactcttggagaaagcacctggggtgaagcgactaagctcactggatgacaagatcccccacaagtcaccatgcccaagacgtaccatctggctgtctcgaagccagtcagatatcttttcccgtaagcccccacgtacagtgagtgtcttggacccatactaccggccacgagatggtgctgcccgcacccccaaagtcaacccttttagtgctcgccaggacctcatggggggcaagatcaagttttttgacctgcccagcaagtctgtcatctctctggtatttgacctggatgcaccagggcccggaactatgcccctggctgactggcaggagcccctggccccacctattcgccggtggcgttccttgcctggttcgcctgagttcttgcatcaagaggcttgtccatttgtgggccgggaagaatcgctatctgatgggcccccaccacgcctaagtagtctcaagtacagagttaaagagatcccaccattccgggcatctgccctaccagctgctcaagcccatgaggctatggactgctccattctccaggaagaaaatggttttgggtccaggccccaggggaccagtccatgccctgcgggtgcttctgaggagatggaggtagaagaaaggccagcaggctcaactccagccaccttctccacctcaggcataggcctgcaaacccagggaaagcaggatgggtgagggggtttagtccctgcctcaccttggggatggaccttcagctgaaaccatatggccccctaggtgcacagccttgattcttccctggagcctacagagcaggcaggctaggccaagccaggctcaacttctgggctcccagtgcccattggctgtgtatgacgggaggcagcagtgagaggccttcctagttagggccaacagctgataccaagcctctgaaatccagcaaggaggtctgcctcccaccagaccctctccagtgtacttccccagataggaccagaggatgtctagttctaggctgagctggcaggcagctattaccccggttctttccccaccccaggtctgtctcttgccttttcttggggcatataagctactgagtggaacatggagctgatcaagaggccgtaatggtcatggctgtttcccagacctgaatattggggtgcttcttgccagtattctaagacatttgagtaattgctgtttgcacttactgcatggtcagaccacgtcactacatttctatgcaaggggacagcaaggcagcgtggtggtcatggctcttagctaacctattcaaagaccttttcctgttgattaatctattttcatatttataaaggagtcttaatgttctgccccataagactttcaaccttgtggttgggagtggggctggttttgtaggccctagggcctgcttctatgtatttatcaacatgtgatacattcaattggttaaatggtttatacagggactgatttgcttcccttcctgccatggctggagctttgggaacagtctgtccttacagagctgcaataagaaataaccaaagatgaagctggtcaaatattttcataacttgcttctgttgatttttttttttgtaaaactttcccaagacattttcagacttaaaaataaagtcagtgttacaggtg

SEQ ID NO: 291796 - DNA, 2043 bp, Homo sapiens
  misc_feature (9)..(9): n is a, c, g, or t
ctaccgggnttcgagtgaagcgactaagctcactggatggcacctgaggttctccgagatgagccctataatgaaaaggcagatgtgttctcttatggtatcatcctctgcgagatcatcgcccgcatccaggccgatccggactatcttccccgcacagagaatttcgggctggactatgatgctttccagcacatggtgggagactgtcccccagattttctgcaacttactttcaactgctgtaacatggatcccaaactgcgcccatcttttgtggagattgggaagaccctggaggaaattctgagccgcctacaggaagaagagcaggagagggataggaagctgcagcccacagccaggggactcttggagaaagcacctggggtgaagcgactaagctcactggatgacaagatcccccacaagtcaccatgcccaagacgtaccatctggctgtctcgaagccagtcagatatcttttcccgtaagcccccacgtacagtgagtgtcttggacccatactaccggccacgagatggtgctgcccgcacccccaaagtcaacccttttagtgctcgccaggacctcatggggggcaagatcaagttttttgacctgcccagcaagtctgtcatctctctggtatttgacctggatgcaccagggcccggaactatgcccctggctgactggcaggagcccctggccccacctattcgccggtggcgttccttgcctggttcgcctgagttcttgcatcaagaggcttgtccatttgtgggccgggaagaatcgctatctgatgggcccccaccacgcctaagtagtctcaagtacagagttaaagagatcccaccattccgggcatctgccctaccagctgctcaagcccatgaggctatggactgctccattctccaggaagaaaatggttttgggtccaggccccaggggaccagtccatgccctgcgggtgcttctgaggagatggaggtagaagaaaggccagcaggctcaactccagccaccttctccacctcaggcataggcctgcaaacccagggaaagcaggatgggtgagggggtttagtccctgcctcaccttggggatggaccttcagctgaaaccatatggccccctaggtgcacagccttgattcttccctggagcctacagagcaggcaggctaggccaagccaggctcaacttctgggctcccagtgcccattggctgtgtatgacgggaggcagcagtgagaggccttcctagttagggccaacagctgataccaagcctctgaaatccagcaaggaggtctgcctcccaccagaccctctccagtgtacttccccagataggaccagaggatgtctagttctaggctgagctggcaggcagctattaccccggttctttccccaccccaggtctgtctcttgccttttcttggggcatataagctactgagtggaacatggagctgatcaagaggccgtaatggtcatggctgtttcccagacctgaatattggggtgcttcttgccagtattctaagacatttgagtaattgctgtttgcacttactgcatggtcagaccacgtcactacatttctatgcaaggggacagcaaggcagcgtggtggtcatggctcttagctaacctattcaaagaccttttcctgttgattaatctattttcatatttataaaggagtcttaatgttctgccccataagactttcaaccttgtggttgggagtggggctggttttgtaggccctagggcctgcttctatgtatttatcaacatgtgatacattcaattggttaaatggtttatacagggactgatttgcttcccttcctgccatggctggagctttgggaacagtctgtccttacagagctgcaataagaaataaccaaagatgaagctggtcaaatattttcataacttgcttctgttgatttttttttttgtaaaactttcccaagacattttcagacttaaaaataaagtcagtgttacaggtg

SEQ ID NO: 291797 - DNA, 1043 bp, Homo sapiens
ggctttttaaatgacccaggcgtggggcagccaccttctccacctcaggcataggcctgcaaacccagggaaagcaggatgggtgagggggtttagtccctgcctcaccttggggatggaccttcagctgaaaccatatggccccctaggtgcacagccttgattcttccctggagcctacagagcaggcaggctaggccaagccaggctcaacttctgggctcccagtgcccattggctgtgtatgacgggaggcagcagtgagaggccttcctagttagggccaacagctgataccaagcctctgaaatccagcaaggaggtctgcctcccaccagaccctctccagtgtacttccccagataggaccagaggatgtctagttctaggctgagctggcaggcagctattaccccggttctttccccaccccaggtctgtctcttgccttttcttggggcatataagctactgagtggaacatggagctgatcaagaggccgtaatggtcatggctgtttcccagacctgaatattggggtgcttcttgccagtattctaagacatttgagtaattgctgtttgcacttactgcatggtcagaccacgtcactacatttctatgcaaggggacagcaaggcagcgtggtggtcatggctcttagctaacctattcaaagaccttttcctgttgattaatctattttcatatttataaaggagtcttaatgttctgccccataagactttcaaccttgtggttgggagtggggctggttttgtaggccctagggcctgcttctatgtatttatcaacatgtgatacattcaattggttaaatggtttatacagggactgatttgcttcccttcctgccatggctggagctttgggaacagtctgtccttacagagctgcaataagaaataaccaaagatgaagctggtcaaatattttcataacttgcttctgttgatttttttttttgtaaaactttcccaagacattttcagacttaaaaataaagtcagtgttacaggtg

SEQ ID NO: 291798 - DNA, 994 bp, Homo sapiens
gaattcgcggccgctcgacgctcagcagagctaccagctgccctgttggcttcgctggtcggatcgtcctcctggccccgccaaacaggcggggggagcggccccgactgtggggccatggcagtagtctcctcgttctccgccgccgctagcctagctgagtcgccggcttctgcgctaggggctcccaccgcctccgcaggctaaggagccgctgccaccaacgagctgtgagggttactatgctccctctttgccgccgtctcctcctcttgcccgcgcaggcacccctctggctgctcagtcctgcctcagtgtcaaaccagaagagaagtaaaattcaacaaaaatttatgtgtggagttccttcttaaaagaagaaaaaagtgattatttagactatggatcggagcaaacggaattcaattgcaggatttcctccacgtgtggagcgtcttgaagagtttgaaggaggtggtggaggagaaggaaatgtgagccaggtgggaagagtttggccatcttcgtatcgagctcttataagtgccttttccagactgacgcgtttggatgatttcacctgtgaaaaaatagggtctggcttcttttctgaagtgttcaaggtacgacaccgagcttctggtcaggtgatggctcttaagatgaacacattgagcagtaaccgggcaaacatgctgaaagaagtacagctcatgaatagactctcccatcccaacatccttaggtcctagtccaatggaggttgggtagaggtggaaggagagctcattttcacctagaagagggcctcaggttcctccactggatcttctgcatctgctggcagatgaaggaagaagctgtggaaaatagtgttgaggttttatggaacaggcctagaaatgacataatcacttctgcccatataccactggccagaacttagtgttacagtcttaaccaactataataaacactgggaaatgtaatctac

SEQ ID NO: 291799 - DNA, 338 bp, Homo sapiens
ctgttctgtccctgggatggacttgctggaactctctgttgctggttgtcaggggcagctcccaaccacttctactgagcaggctaggatgggtggggggattaatgaactgtctacctatgctttccatacccatccacagaatttcgggctggactatgatgctttccagcacatggtgggagactgtcccccagattttctgcaacttactttcaactgctgtaacgtgagtgtctttctccctctgcctttcatcaggggctggctgaacccttttcacctggttaggactgtacagagaggctgctaattagcttcatgagggacctcatttt

SEQ ID NO: 291800 - DNA, 477 bp, Homo sapiens
cccctatattgcaagctccaagaggacaagggttttggttgttttcatctagctatttctagcacttaaaattatgcctagcacttagaaagcaaagatgagtaattgtgtttggaatgtgaagtgtatcctaggacagccacccaagacccaggactaactcatctcacctggctgtcttagagcccctgacctgaccagtggggtcagcttgagtgcggttcaccaaggagcagaggacaaggtgccctgtgataggaaggggggaatgggtggtaactctatggctgatccccgcttctgagccacattattttctcttccttcctgggaaccctagaactgcctgataaagagggatgagaatggttactctgcagtggtagctgactttggcctggctgagaagatccccgatgtcaggtgtgtagccctactggatgctggggtccaagggacagggggctgaagctaagg

SEQ ID NO: 291801 - DNA, 356 bp, Homo sapiens
tttttttttttcaaaagattctgaattgttccctttacaccttttctgttgtagaaggattcatgaaccagcgtggagccagggtgtcttctcccatcctcatcatttcctatgagaccttccgccttcatgttggagtcctccagaaaggaagtgttggtctggtcatatgtgacgaggtacttgactctcagcagttggacagcttgaacaccagccggcgggtgctcatctccggaactcccatccagaatgatctgcttgagtatttcagcttggtacattttgttaattccggcatcctaggtaagaatctagccttgtttgccacatcagagaggagccctgccttgtct

SEQ ID NO: 291802 - DNA, 3230 bp, Homo sapiens
agccaatgggtgatacgacggcagcgcggcgggaggttcgattgacccggtcttggcgggtcggtgagtcttggcggctgttaacgcgcgctttgggaacaggaaggttgagagagaggtgctggggtctgcgtctatctctgtcgctcttttcagcccctcctggtattcccctcctaacctgggttttttacacgcccgcgtggcttcctgctcgacctccctgagtctgatcctggtttccacctccagccctgggaaatttcctttctccagactcgccctccccacccgggcctcggactttcaccccagcttctctctcctggccagtgattacccacccccgaatcccaccccgccccgccgcgcaactacctcctcccttcacccggactgggaccatcatccccactccactccgcccagtctgggactccacctgcctcctccccaatcccacactaatctctgcttggtctcttcctctttggcctaatctctcgtctcggcttattggggacggccactctcacagtttggttccaaacaccagttcctggatggattcccgccatccatgccccctctttaattagccggtcctctcaataatgtagcagccccctctacagattagaccctggtcctacactcttagccgctgcctgcttttgacctttggctcatgggtacttgacgttttaaactcctaggcccaggatgaggaggagcttggctcccagccagctggccaagagaaaacctgaaggcaggtcctgtgatgatgaagactggcaacctggcctagtgactcctaggaaacggaaatccagcagtgagacccagatccaggagtgtttcctgtctccttttcggaaacctttgagtcagctaaccaatcaaccaccttgtctggacagcagtcagcatgaagcatttattcgaagcattttgtcaaagcctttcaaagtccccattccaaattatcaaggtcctctgggctctcgagcattgggcctgaaaagggctggggtccgccgggccctccatgaccccctggaaaaagatgccttggttctgtatgagcctcccccgctgagcgctcatgaccagctgaagcttgacaaggagaaactccctgtccatgtggttgttgaccctattctcagtaaggttttgcggcctcatcagagagagggagtgaaattcctgtgggagtgtgtcaccagtcggcgcatccctggcagccatggctgcatcatggctgatgagatgggcctaggaaagacgctgcagtgcatcacattgatgtggacacttttacgccagagtccagagtgcaagccagaaattgacaaggcagtggtggtgtcgccttccagcctggtgaagaactggtacaatgaggttgggaaatggctcggagggaggatccaacctctggccatcgatggaggatctaaggatgaaatagaccaaaagctggaaggattcatgaaccagcgtggagccagggtgtcttctcccatcctcatcatttcctatgagaccttccgccttcatgttggagtcctccagaaaggaagtgttggtctggtcatatgtgacgagggacacaggctcaagaactctgagaatcagacttaccaagccctggacagcttgaacaccagccggcgggtgctcatctccggaactcccatccagaatgatctgcttgagtatttcagcttggtacattttgttaattccggcatcctagggactgcccatgaattcaagaagcattttgaattgccaattttgaagggtcgagacgctgctgctagtgaggcagacaggcagctaggagaggagcggctgcgggagctcaccagcattgtgaatagatgcctgatacggaggacttctgatatcctttctaaatatctgcctgtgaagattgagcaggtcgtttgttgtaggctgacaccccttcagactgagttatacaagaggtttctgagacaagccaaaccggcagaagaattgcttgagggcaagatgagtgtgtcttccctttcttccatcacctcgctaaagaagctttgtaatcatccagctctaatctatgataagtgtgtggaagaggaggatggctttgtgggtgccttggacctcttccctcctggttacagctctaaggccctggagccccagctgtcaggtaagatgctggtcctggattatattctggcggtgacccgaagccgtagcagtgacaaagtagtgctggtgtcgaattacacccagactttggatctctttgagaagctgtgccgtgcccgaaggtacttatacgtccgcctggatggcacgatgtccattaagaagcgagccaaggttgtagaacgcttcaatagtccatcgagccctgactttgtcttcatgctgagcagcaaagctgggggctgtggcctcaatctcattggggctaaccggctggtcatgtttgaccctgactggaacccagccaatgatgaacaagccatggcccgggtctggcgagatggtcaaaagaagacttgctatatctaccgcctgctgtctgcagggaccattgaggagaagatcttccagcgtcagagccacaagaaggcactgagcagctgtgtggtggatgaggagcaggatgtagagcgccacttctctctgggcgagttgaaggagctgtttatcctggatgaagctagcctcagtgacacacatgacaggttgcactgccgacgttgtgtcaacagccgtcagatccggccaccccctgatggttctgactgcacttcagacctggcagggtggaaccactgcactgataagtgggggctccgggatgaggtactccaggctgcctgggatgctgcctccactgccatcaccttcgtcttccaccagcgttctcatgaggagcagcggggcctccgctgataaccagctggtctgggtgtagctcttagaggaaggagatagggaaaaggggctccttgctccacagggccctgttgaattttgttctctgggagaaaatcatcaagaagggctgcatgatgtttgcccaaaatttattttataagaaaaacttttttggttaaaaaaaagaataaaggtatgaaagggctggtgacagtcagggatgcccccggcacacagggactaggtctagtgagaacatcaggagcagccagggatcc

SEQ ID NO: 291803 - DNA, 2572 bp, Homo sapiens
accacgcgtcgcggacgcgtgggtcgacccacgcgtcggaacaggaaggttgagagagaggtgctgggaggaggagcttggctcccagccagctggccaagagaaaacctgaaggcaggtcctgtgatgatgaagactggcaacctggcctagtgactcctaggaaacggaaatccagcagtgagacccagatccaggagtgtttcctgtctccttttcggaaacctttgagtcagctaaccaatcaaccaccttgtctggacagcagtcagcatgaagcatttattcgaagcattttgtcaaagcctttcaaagtccccattccaaattatcaaggtcctctgggctctcgagcattgggcctgaaaagggctggggtccgccgggccctccatgaccccctggaaaaagatgccttggttctgtatgagcctcccccgctgagcgctcatgaccagctgaagcttgacaaggagaaactccctgtccatgtggttgttgaccctattctcagtaaggttttgcggcctcatcagagagagggagtgaaattcctgtgggagtgtgtcaccagtcggcgcatccctggcagccatggctgcatcatggctgatgagatgggcctaggaaagacgctgcagtgcatcacattgatgtggacacttttacgccagagtccagagtgcaagccagaaattgacaaggcagtggtggtgtcgccttccagcctggtgaagaactggtacaatgaggttgggaaatggctcggagggaggatccaacctctggccatcgatggaggatctaaggatgaaatagaccaaaagctggaaggattcatgaaccagcgtggagccagggtgtcttctcccatcctcatcatttcctatgagaccttccgccttcatgttggagtcctccagaaaggaagtgttggtctggtcatatgtgacgagggacacaggctcaagaactctgagaatcagacttaccaagccctggacagcttgaacaccagccggcgggtgctcatctccggaactcccatccagaatgatctgcttgagtatttcagcttggtacattttgttaattccggcatcctagggactgcccatgaattcaagaagcattttgaattgccaattttgaagggtcgagacgctgctgctagtgaggcagacaggcagctaggagaggagcggctgcgggagctcaccagcattgtgaatagatgcctgatacggaggacttctgatatcctttctaaatatctgcctgtgaagattgagcaggtcgtttgttgtaggctgacaccccttcagactgagttatacaagaggtttctgagacaagccaaaccggcagaagaattgcttgagggcaagatgagtgtgtcttccctttcttccatcacctcgctaaagaagctttgtaatcatccagctctaatctatgataagtgtgtggaagaggaggatggctttgtgggtgccttggacctcttccctcctggttacagctctaaggccctggagccccagctgtcaggtaagatgctggtcctggattatattctggcggtgacccgaagccgtagcagtgacaaagtagtgctggtgtcgaattacacccagactttggatctctttgagaagctgtgccgtgcccgaaggtacttatacgtccgcctggatggcacgatgtccattaagaagcgagccaaggttgtagaacgcttcaatagtccatcgagccctgactttgtcttcatgctgagcagcaaagctgggggctgtggcctcaatctcattggggctaaccggctggtcatgtttgaccctgactggaacccagccaatgatgaacaagccatggcccgggtctggcgagatggtcaaaagaagacttgctatatctaccgcctgctgtctgcagggaccattgaggagaagatcttccagcgtcagagccacaagaaggcactgagcagctgtgtggtggatgaggagcaggatgtagagcgccacttctctctgggcgagttgaaggagctgtttatcctggatgaagctagcctcagtgacacacatgacaggttgcactgccgacgttgtgtcaacagccgtcagatccggccaccccctgatggttctgactgcacttcagacctggcagggtggaaccactgcactgataagtgggggctccgggatgaggtactccaggctgcctgggatgctgcctccactgccatcaccttcgtcttccaccagcgttctcatgaggagcagcggggcctccgctgataaccagctggtctgggtgtagctcttagaggaaggagatagggaaaaggggctccttgctccacagggccctgttgaattttgttctctgggagaaaatcatcaagaagggctgcatgatgtttgcccaaaatttattttataagaaaaacttttttggttaaaaaaaagaataaaggtatgaaagggctggtgacagtcagggatgcccccggcacacagggactaggtctagtgagaacatcaggagcagccagggatcc

SEQ ID NO: 291804 - DNA, 2365 bp, Homo sapiens
agccaatgggtgatacgacggcagcgcggcgggaggttcgattgacccggtcttggcgggtcgaggaggagcttggctcccagccagctggccaagagaaaacctgaaggcaggtcctgtgatgatgaagactggcaacctggcctagtgactcctaggaaacggaaatccagcagtgagacccagatccaggagtgtttcctgtctccttttcggaaacctttgagtcagctaaccaatcaaccaccttgtctggacagcagtcagcatgaagcatttattcgaagcattttgtcaaagcctttcaaagtccccattccaaattatcaaggtcctctgggctctcgagcattgggcctgaaaagggctggggtccgccgggccctccatgaccccctggaaaaagatgccttggttctgtatgagcctcccccgctgagcgctcatgaccagctgaagcttgacaaagtccagagtgcaagccagaaattgacaaggcagtggtggtgtcgccttccagcctggtgaagaactggtacaatgaggttgggaaatggctcggagggaggatccaacctctggccatcgatggaggatctaaggatgaaatagaccaaaagctggaaggattcatgaaccagcgtggagccagggtgtcttctcccatcctcatcatttcctatgagaccttccgccttcatgttggagtcctccagaaaggaagtgttggtctggtcatatgtgacgagggacacaggctcaagaactctgagaatcagacttaccaagccctggacagcttgaacaccagccggcgggtgctcatctccggaactcccatccagaatgatctgcttgagtatttcagcttggtacattttgttaattccggcatcctagggactgcccatgaattcaagaagcattttgaattgccaattttgaagggtcgagacgctgctgctagtgaggcagacaggcagctaggagaggagcggctgcgggagctcaccagcattgtgaatagatgcctgatacggaggacttctgatatcctttctaaatatctgcctgtgaagattgagcaggtcgtttgttgtaggctgacaccccttcagactgagttatacaagaggtttctgagacaagccaaaccggcagaagaattgcttgagggcaagatgagtgtgtcttccctttcttccatcacctcgctaaagaagctttgtaatcatccagctctaatctatgataagtgtgtggaagaggaggatggctttgtgggtgccttggacctcttccctcctggttacagctctaaggccctggagccccagctgtcaggtaagatgctggtcctggattatattctggcggtgacccgaagccgtagcagtgacaaagtagtgctggtgtcgaattacacccagactttggatctctttgagaagctgtgccgtgcccgaaggtacttatacgtccgcctggatggcacgatgtccattaagaagcgagccaaggttgtagaacgcttcaatagtccatcgagccctgactttgtcttcatgctgagcagcaaagctgggggctgtggcctcaatctcattggggctaaccggctggtcatgtttgaccctgactggaacccagccaatgatgaacaagccatggcccgggtctggcgagatggtcaaaagaagacttgctatatctaccgcctgctgtctgcagggaccattgaggagaagatcttccagcgtcagagccacaagaaggcactgagcagctgtgtggtggatgaggagcaggatgtagagcgccacttctctctgggcgagttgaaggagctgtttatcctggatgaagctagcctcagtgacacacatgacaggttgcactgccgacgttgtgtcaacagccgtcagatccggccaccccctgatggttctgactgcacttcagacctggcagggtggaaccactgcactgataagtgggggctccgggatgaggtactccaggctgcctgggatgctgcctccactgccatcaccttcgtcttccaccagcgttctcatgaggagcagcggggcctccgctgataaccagctggtctgggtgtagctcttagaggaaggagatagggaaaaggggctccttgctccacagggccctgttgaattttgttctctgggagaaaatcatcaagaagggctgcatgatgtttgcccaaaatttattttataagaaaaacttttttggttaaaaaaaagaataaaggtatgaaagggctggtgacagtcagggatgcccccggcacacagggactaggtctagtgagaacatcaggagcagccagggatcc

SEQ ID NO: 291805 - DNA, 2062 bp, Homo sapiens
ctttccggtacccgggtttctcgagttttctccgcgtgtcttttgggggctcccctgttttcccctttgtcacgagaccttgtgtcctggaccccgtttggcgcccgtgcgcccttctcttgcccctcgttttcccgcccccccttttgttcctcccgagtttttttttttttttttttttttttttgagatggagtcttgctcttgttgcccaagctggaatgcaatggggcgatctcggctcactgcaacctccacctcctgggttcaagtgattctcctgcctcagcttcccgagtagctgggtttacaggtgcctgccaccacacttggctaattttcgtatttttagtagagatggggtttctccattttggccaggctggtcttgaactcctgaccacaggtgatccgcccgcctcagcttcccaaagtgctgggattactggcgtgagccactgcgcctggccgagtctctgacatttaatactgtaaaagagggctagtcttggtcctttgggtggtagcttttattccagtagttagcatggcaattttaccagcctcttgcctttttatcctgttttctctagatgcctgatacggaggacttctgatatcctttctaaatatctgcctgtgaagattgagcaggtcgtttgttgtaggtactgaactcaactgaaagatgtggagtgggtcaaagcctagctcctgaagcatggctgggctctcaaggtgttctcagagggcaggagggtggtctagctttttccactgacccagctgccttttttaggctgacaccccttcagactgagttatacaagaggtttctgagacaagccaaaccggcagaagaattgcttgagggcaagatgagtgtgtcttccctttcttccatcacctcgctaaagaagctttgtaatcatccagctctaatctatgataagtgtgtggaagaggaggatggctttgtgggtgccttggacctcttccctcctggttacagctctaaggccctggagccccagctgtcaggtaagatgctggtcctggattatattctggcggtgacccgaagccgtagcagtgacaaagtagtgctggtgtcgaattacacccagactttggatctctttgagaagctgtgccgtgcccgaaggtacttatacgtccgcctggatggcacgatgtccattaagaagcgagccaaggttgtagaacgcttcaatagtccatcgagccctgactttgtcttcatgctgagcagcaaagctgggggctgtggcctcaatctcattggggctaaccggctggtcatgtttgaccctgactggaacccagccaatgatgaacaagccatggcccgggtctggcgagatggtcaaaagaagacttgctatatctaccgcctgctgtctgcagggaccattgaggagaagatcttccagcgtcagagccacaagaaggcactgagcagctgtgtggtggatgaggagcaggatgtagagcgccacttctctctgggcgagttgaaggagctgtttatcctggatgaagctagcctcagtgacacacatgacaggttgcactgccgacgttgtgtcaacagccgtcagatccggccaccccctgatggttctgactgcacttcagacctggcagggtggaaccactgcactgataagtgggggctccgggatgaggtactccaggctgcctgggatgctgcctccactgccatcaccttcgtcttccaccagcgttctcatgaggagcagcggggcctccgctgataaccagctggtctgggtgtagctcttagaggaaggagatagggaaaaggggctccttgctccacagggccctgttgaattttgttctctgggagaaaatcatcaagaagggctgcatgatgtttgcccaaaatttattttataagaaaaacttttttggttaaaaaaaagaataaaggtatgaaagggctggtgacagtcagggatgcccccggcacacagggactaggtctagtgagaacatcaggagcagccagggatcc

SEQ ID NO: 291806 - DNA, 2040 bp, Homo sapiens
agccaatgggtgatacgacggcagcgcggcgggaggttcgattgacccggtcttggcgggtcgaggaggagcttggctcccagccagctggccaagagaaaacctgaaggcaggtcctgtgatgatgaagactggcaacctggcctagtgactcctaggaaacggaaatccagcagtgagacccagatccaggagtgtttcctgtctccttttcggaaacctttgagtcagctaaccaatcaaccaccttgtctggacagcagtcagcatgaagcatttattcgaagcattttgtcaaagcctttcaaagtccccattccaaattatcaaggtcctctgggctctcgagcattgggcctgaaaagggctggggtccgccgggccctccatgaccccctggaaaaagatgccttggttctgtatgagcctcccccgctgagcgctcatgaccagctgaagcttgacaatggacagcttgaacaccagccggcgggtgctcatctccggaactcccatccagaatgatctgcttgagtatttcagcttggtacattttgttaattccggcatcctagggactgcccatgaattcaagaagcattttgaattgccaattttgaagggtcgagacgctgctgctagtgaggcagacaggcagctaggagaggagcggctgcgggagctcaccagcattgtgaatagatgcctgatacggaggacttctgatatcctttctaaatatctgcctgtgaagattgagcaggtcgtttgttgtaggctgacaccccttcagactgagttatacaagaggtttctgagacaagccaaaccggcagaagaattgcttgagggcaagatgagtgtgtcttccctttcttccatcacctcgctaaagaagctttgtaatcatccagctctaatctatgataagtgtgtggaagaggaggatggctttgtgggtgccttggacctcttccctcctggttacagctctaaggccctggagccccagctgtcaggtaagatgctggtcctggattatattctggcggtgacccgaagccgtagcagtgacaaagtagtgctggtgtcgaattacacccagactttggatctctttgagaagctgtgccgtgcccgaaggtacttatacgtccgcctggatggcacgatgtccattaagaagcgagccaaggttgtagaacgcttcaatagtccatcgagccctgactttgtcttcatgctgagcagcaaagctgggggctgtggcctcaatctcattggggctaaccggctggtcatgtttgaccctgactggaacccagccaatgatgaacaagccatggcccgggtctggcgagatggtcaaaagaagacttgctatatctaccgcctgctgtctgcagggaccattgaggagaagatcttccagcgtcagagccacaagaaggcactgagcagctgtgtggtggatgaggagcaggatgtagagcgccacttctctctgggcgagttgaaggagctgtttatcctggatgaagctagcctcagtgacacacatgacaggttgcactgccgacgttgtgtcaacagccgtcagatccggccaccccctgatggttctgactgcacttcagacctggcagggtggaaccactgcactgataagtgggggctccgggatgaggtactccaggctgcctgggatgctgcctccactgccatcaccttcgtcttccaccagcgttctcatgaggagcagcggggcctccgctgataaccagctggtctgggtgtagctcttagaggaaggagatagggaaaaggggctccttgctccacagggccctgttgaattttgttctctgggagaaaatcatcaagaagggctgcatgatgtttgcccaaaatttattttataagaaaaacttttttggttaaaaaaaagaataaaggtatgaaagggctggtgacagtcagggatgcccccggcacacagggactaggtctagtgagaacatcaggagcagccagggatcc

SEQ ID NO: 291807 - DNA, 2343 bp, Homo sapiens
agccaatgggtgatacgacggcagcgcggcgggaggttcgattgacccggtcttggcgggtcggtgagtcttggcggctgttaacgcgcgctttgggaacaggaaggttgagagagaggtgctggggtctgcgtctatctctgtcgctcttttcagcccctcctggtattcccctcctaacctgggttttttacacgcccgcgtggcttcctgctcgacctccctgagtctgatcctggtttccacctccagccctgggaaatttcctttctccagactcgccctccccacccgggcctcggactttcaccccagcttctctctcctggccagtgattacccacccccgaatcccaccccgccccgccgcgcaactacctcctcccttcacccggactgggaccatcatccccactccactccgcccagtctgggactccacctgcctcctccccaatcccacactaatctctgcttggtctcttcctctttggcctaatctctcgtctcggcttattggggacggccactctcacagtttggttccaaacaccagttcctggatggattcccgccatccatgccccctctttaattagccggtcctctcaataatgtagcagccccctctacagattagaccctggtcctacactcttagccgctgcctgcttttgacctttggctcatgggtacttgacgttttaaactcctaggcccaggatgaggaggagcttggctcccagccagctggccaagagaaaacctgaaggcaggtcctgtgatgatgaagactggcaacctggcctagtgactcctaggaaacggaaatccagcagtgagacccagatccaggagtgtttcctgtctccttttcggaaacctttgagtcagctaaccaatcaaccaccttgtctggacagcagtcagcatgaagcatttattcgaagcattttgtcaaagcctttcaaagtccccattccaaattatcaaggtcctctgggctctcgagcattgggcctgaaaagggctggggtccgccgggccctccatgaccccctggaaaaagatgccttggttctgtatgagcctcccccgctgagcgctcatgaccagctgaagcttgacaaggagaaactccctgtccatgtggttgttgaccctattctcagtaaggttttgcggcctcatcagagagagggagtgaaattcctgtgggagtgtgtcaccagtcggcgcatccctggcagccatggctgcatcatggctgatgagatgggcctaggaaagacgctgcagtgcatcacattgatgtggacacttttacgccagagtccagagtgcaagccagaaattgacaaggcagtggtggtgtcgccttccagcctggtgaagaactggtacaatgaggttgggaaatggctcggagggaggatccaacctctggccatcgatggaggatctaaggatgaaatagaccaaaagctggaaggattcatgaaccagcgtggagccagggtgtcttctcccatcctcatcatttcctatgagaccttccgccttcatgttggagtcctccagaaaggaagtgttggtctggtcatatgtgacgagggacacaggctcaagaactctgagaatcagacttaccaagccctggacagcttgaacaccagccggcgggtgctcatctccggaactcccatccagaatgatctgcttgagtatttcagcttggtacattttgttaattccggcatcctagggactgcccatgaattcaagaagcattttgaattgccaattttgaagggtcgagacgctgctgctagtgaggcagacaggcagctaggagaggagcggctgcgggagctcaccagcattgtgaatagatgcctgatacggaggacttctgatatcctttctaaatatctgcctgtgaagattgagcaggtcgtttgttgtaggctgacaccccttcagactgagttatacaagaggtttctgggatgctgcctccactgccatcaccttcgtcttccaccagcgttctcatgaggagcagcggggcctccgctgataaccagctggtctgggtgtagctcttagaggaaggagatagggaaaaggggctccttgctccacagggccctgttgaattttgttctctgggagaaaatcatcaagaagggctgcatgatgtttgcccaaaatttattttataagaaaaacttttttggttaaaaaaaagaataaaggtatgaaagggctggtgacagtcagggatgcccccggcacacagggactaggtctagtgagaacatcaggagcagccagggatcc

SEQ ID NO: 291808 - DNA, 3172 bp, Homo sapiens
accacgcgtcgcggacgcgtgggtcgacccacgcgtcggaacaggaaggttgagagagaggtgctggggtctgcgtctatctctgtcgctcttttcagcccctcctggtattcccctcctaacctgggttttttacacgcccgcgtggcttcctgctcgacctccctgagtctgatcctggtttccacctccagccctgggaaatttcctttctccagactcgccctccccacccgggcctcggactttcaccccagcttctctctcctggccagtgattacccacccccgaatcccaccccgccccgccgcgcaactacctcctcccttcacccggactgggaccatcatccccactccactccgcccagtctgggactccacctgcctcctccccaatcccacactaatctctgcttggtctcttcctctttggcctaatctctcgtctcggcttattggggacggccactctcacagtttggttccaaacaccagttcctggatggattcccgccatccatgccccctctttaattagccggtcctctcaataatgtagcagccccctctacagattagaccctggtcctacactcttagccgctgcctgcttttgacctttggctcatgggtacttgacgttttaaactcctaggcccaggatgaggaggagcttggctcccagccagctggccaagagaaaacctgaaggcaggtcctgtgatgatgaagactggcaacctggcctagtgactcctaggaaacggaaatccagcagtgagacccagatccaggagtgtttcctgtctccttttcggaaacctttgagtcagctaaccaatcaaccaccttgtctggacagcagtcagcatgaagcatttattcgaagcattttgtcaaagcctttcaaagtccccattccaaattatcaaggtcctctgggctctcgagcattgggcctgaaaagggctggggtccgccgggccctccatgaccccctggaaaaagatgccttggttctgtatgagcctcccccgctgagcgctcatgaccagctgaagcttgacaaggagaaactccctgtccatgtggttgttgaccctattctcagtaaggttttgcggcctcatcagagagagggagtgaaattcctgtgggagtgtgtcaccagtcggcgcatccctggcagccatggctgcatcatggctgatgagatgggcctaggaaagacgctgcagtgcatcacattgatgtggacacttttacgccagagtccagagtgcaagccagaaattgacaaggcagtggtggtgtcgccttccagcctggtgaagaactggtacaatgaggttgggaaatggctcggagggaggatccaacctctggccatcgatggaggatctaaggatgaaatagaccaaaagctggaaggattcatgaaccagcgtggagccagggtgtcttctcccatcctcatcatttcctatgagaccttccgccttcatgttggagtcctccagaaaggaagtgttggtctggtcatatgtgacgagggacacaggctcaagaactctgagaatcagacttaccaagccctggacagcttgaacaccagccggcgggtgctcatctccggaactcccatccagaatgatctgcttgagtatttcagcttggtacattttgttaattccggcatcctagggactgcccatgaattcaagaagcattttgaattgccaattttgaagggtcgagacgctgctgctagtgaggcagacaggcagctaggagaggagcggctgcgggagctcaccagcattgtgaatagatgcctgatacggaggacttctgatatcctttctaaatatctgcctgtgaagattgagcaggtcgtttgttgtaggctgacaccccttcagactgagttatacaagaggtttctgagacaagccaaaccggcagaagaattgcttgagggcaagatgagtgtgtcttccctttcttccatcacctcgctaaagaagctttgtaatcatccagctctaatctatgataagtgtgtggaagaggaggatggctttgtgggtgccttggacctcttccctcctggttacagctctaaggccctggagccccagctgtcaggtaagatgctggtcctggattatattctggcggtgacccgaagccgtagcagtgacaaagtagtgctggtgtcgaattacacccagactttggatctctttgagaagctgtgccgtgcccgaaggtacttatacgtccgcctggatggcacgatgtccattaagaagcgagccaaggttgtagaacgcttcaatagtccatcgagccctgactttgtcttcatgctgagcagcaaagctgggggctgtggcctcaatctcattggggctaaccggctggtcatgtttgaccctgactggaacccagccaatgatgaacaagccatggcccgggtctggcgagatggtcaaaagaagacttgctatatctaccgcctgctgtctgcagggaccattgaggagaagatcttccagcgtcagagccacaagaaggcactgagcagctgtgtggtggatgaggagcaggatgtagagcgccacttctctctgggcgagttgaaggagctgtttatcctggatgaagctagcctcagtgacacacatgacaggttgcactgccgacgttgtgtcaacagccgtcagatccggccaccccctgatggttctgactgcacttcagacctggcagggtggaaccactgcactgataagtgggggctccgggatgaggtactccaggctgcctgggatgctgcctccactgccatcaccttcgtcttccaccagcgttctcatgaggagcagcggggcctccgctgataaccagctggtctgggtgtagctcttagaggaaggagatagggaaaaggggctccttgctccacagggccctgttgaattttgttctctgggagaaaatcatcaagaagggctgcatgatgtttgcccaaaatttattttataagaaaaacttttttggttaaaaaaaagaataaaggtatgaaagggctggtgacagtcagggatgcccccggcacacagggactaggtctagtgagaacatcaggagcagccagggatcc

SEQ ID NO: 291809 - DNA, 2400 bp, Homo sapiens
gggcggacgcgtgggccggtcttggcgggtcgaggaggagcttggctcccagccagctggccaagagaaaacctgaaggcaggtcctgtgatgatgaagactggcaacctggcctagtgactcctaggaaacggaaatccagcagtgagacccagatccaggagtgtttcctgtctccttttcggaaacctttgagtcagctaaccaatcaaccaccttgtctggacagcagtcagcatgaagcatttattcgaagcattttgtcaaagcctttcaaagtccccattccaaattatcaagggagaaactccctgtccatgtggttgttgaccctattctcagtaaggttttgcggcctcatcagagagagggagtgaaattcctgtgggagtgtgtcaccagtcggcgcatccctggcagccatggctgcatcatggctgatgagatgggcctaggaaagacgctgcagtgcatcacattgatgtggacacttttacgccagagtccagagtgcaagccagaaattgacaaggcagtggtggtgtcgccttccagcctggtgaagaactggtacaatgaggttgggaaatggctcggagggaggatccaacctctggccatcgatggaggatctaaggatgaaatagaccaaaagctggaaggattcatgaaccagcgtggagccagggtgtcttctcccatcctcatcatttcctatgagaccttccgccttcatgttggagtcctccagaaaggaagtgttggtctggtcatatgtgacgagggacacaggctcaagaactctgagaatcagacttaccaagccctggacagcttgaacaccagccggcgggtgctcatctccggaactcccatccagaatgatctgcttgagtatttcagcttggtacattttgttaattccggcatcctagggactgcccatgaattcaagaagcattttgaattgccaattttgaagggtcgagacgctgctgctagtgaggcagacaggcagctaggagaggagcggctgcgggagctcaccagcattgtgaatagatgcctgatacggaggacttctgatatcctttctaaatatctgcctgtgaagattgagcaggtcgtttgttgtaggctgacaccccttcagactgagttatacaagaggtttctgagacaagccaaaccggcagaagaattgcttgagggcaagatgagtgtgtcttccctttcttccatcacctcgctaaagaagctttgtaatcatccagctctaatctatgataagtgtgtggaagaggaggatggctttgtgggtgccttggacctcttccctcctggttacagctctaaggccctggagccccagctgtcaggtaagatgctggtcctggattatattctggcggtgacccgaagccgtagcagtgacaaagtagtgctggtgtcgaattacacccagactttggatctctttgagaagctgtgccgtgcccgaaggtacttatacgtccgcctggatggcacgatgtccattaagaagcgagccaaggttgtagaacgcttcaatagtccatcgagccctgactttgtcttcatgctgagcagcaaagctgggggctgtggcctcaatctcattggggctaaccggctggtcatgtttgaccctgactggaacccagccaatgatgaacaagccatggcccgggtctggcgagatggtcaaaagaagacttgctatatctaccgcctgctgtctgcagggaccattgaggagaagatcttccagcgtcagagccacaagaaggcactgagcagctgtgtggtggatgaggagcaggatgtagagcgccacttctctctgggcgagttgaaggagctgtttatcctggatgaagctagcctcagtgacacacatgacaggttgcactgccgacgttgtgtcaacagccgtcagatccggccaccccctgatggttctgactgcacttcagacctggcagggtggaaccactgcactgataagtgggggctccgggatgaggtactccaggctgcctgggatgctgcctccactgccatcaccttcgtcttccaccagcgttctcatgaggagcagcggggcctccgctgataaccagctggtctgggtgtagctcttagaggaaggagatagggaaaaggggctccttgctccacagggccctgttgaattttgttctctgggagaaaatcatcaagaagggctgcatgatgtttgcccaaaatttattttataagaaaaacttttttggttaaaaaaaagaataaaggtatgaaagggctggtgacagtcagggatgcccccggcacacagggactaggtctagtgagaacatcaggagcagccagggatcc

SEQ ID NO: 291810 - DNA, 1741 bp, Homo sapiens
taggctaggtacgaggccgggtgtgtgctccgagataagacatcctcatcatttcctatgagaccttccgccttcatgttggagtcctccagaaaggaagtgttggtctggtcatatgtgacgagggacacaggctcaagaactctgagaatcagacttaccaagccctggacagcttgaacaccagccggcgggtgctcatctccggaactcccatccagaatgatctgcttgagtatttcagcttggtacattttgttaattccggcatcctagggactgcccatgaattcaagaagcattttgaattgccaattttgaagggtcgagacgctgctgctagtgaggcagacaggcagctaggagaggagcggctgcgggagctcaccagcattgtgaatagatgcctgatacggaggacttctgatatcctttctaaatatctgcctgtgaagattgagcaggtcgtttgttgtaggctgacaccccttcagactgagttatacaagaggtttctgagacaagccaaaccggcagaagaattgcttgagggcaagatgagtgtgtcttccctttcttccatcacctcgctaaagaagctttgtaatcatccagctctaatctatgataagtgtgtggaagaggaggatggctttgtgggtgccttggacctcttccctcctggttacagctctaaggccctggagccccagctgtcaggtaagatgctggtcctggattatattctggcggtgacccgaagccgtagcagtgacaaagtagtgctggtgtcgaattacacccagactttggatctctttgagaagctgtgccgtgcccgaaggtacttatacgtccgcctggatggcacgatgtccattaagaagcgagccaaggttgtagaacgcttcaatagtccatcgagccctgactttgtcttcatgctgagcagcaaagctgggggctgtggcctcaatctcattggggctaaccggctggtcatgtttgaccctgactggaacccagccaatgatgaacaagccatggcccgggtctggcgagatggtcaaaagaagacttgctatatctaccgcctgctgtctgcagggaccattgaggagaagatcttccagcgtcagagccacaagaaggcactgagcagctgtgtggtggatgaggagcaggatgtagagcgccacttctctctgggcgagttgaaggagctgtttatcctggatgaagctagcctcagtgacacacatgacaggttgcactgccgacgttgtgtcaacagccgtcagatccggccaccccctgatggttctgactgcacttcagacctggcagggtggaaccactgcactgataagtgggggctccgggatgaggtactccaggctgcctgggatgctgcctccactgccatcaccttcgtcttccaccagcgttctcatgaggagcagcggggcctccgctgataaccagctggtctgggtgtagctcttagaggaaggagatagggaaaaggggctccttgctccacagggccctgttgaattttgttctctgggagaaaatcatcaagaagggctgcatgatgtttgcccaaaatttattttataagaaaaacttttttggttaaaaaaaagaataaaggtatgaaagggctggtgacagtcagggatgcccccggcacacagggactaggtctagtgagaacatcaggagcagccagggatcc

SEQ ID NO: 291811 - DNA, 1749 bp, Homo sapiens
atccactctggccatgtttgtctttttagtggactattcaatccatttacatttactctaagtaattatatatttggattttaacctatcatctcacttttggcctttcaagtcttcactgctttgatacctctctgatctgttaaacagaaattggcctatattttgtttagccttgttcttggtaggaaggctggtttgtgagaaggtagtctgccatcactagctgtgggaaaatcattccttttccacattcttctgttttccttctctcctgtgtttagggactgcccatgaattcaagaagcattttgaattgccaattttgaagggtcgagacgctgctgctagtgaggcagacaggcagctaggagaggagcggctgcgggagctcaccagcattgtgaatagatgcctgatacggaggacttctgatatcctttctaaatatctgcctgtgaagattgagcaggtcgtttgttgtaggctgacaccccttcagactgagttatacaagaggtttctgagacaagccaaaccggcagaagaattgcttgagggcaagatgagtgtgtcttccctttcttccatcacctcgctaaagaagctttgtaatcatccagctctaatctatgataagtgtgtggaagaggaggatggctttgtgggtgccttggacctcttccctcctggttacagctctaaggccctggagccccagctgtcaggtaagatgctggtcctggattatattctggcggtgacccgaagccgtagcagtgacaaagtagtgctggtgtcgaattacacccagactttggatctctttgagaagctgtgccgtgcccgaaggtacttatacgtccgcctggatggcacgatgtccattaagaagcgagccaaggttgtagaacgcttcaatagtccatcgagccctgactttgtcttcatgctgagcagcaaagctgggggctgtggcctcaatctcattggggctaaccggctggtcatgtttgaccctgactggaacccagccaatgatgaacaagccatggcccgggtctggcgagatggtcaaaagaagacttgctatatctaccgcctgctgtctgcagggaccattgaggagaagatcttccagcgtcagagccacaagaaggcactgagcagctgtgtggtggatgaggagcaggatgtagagcgccacttctctctgggcgagttgaaggagctgtttatcctggatgaagctagcctcagtgacacacatgacaggttgcactgccgacgttgtgtcaacagccgtcagatccggccaccccctgatggttctgactgcacttcagacctggcagggtggaaccactgcactgataagtgggggctccgggatgaggtactccaggctgcctgggatgctgcctccactgccatcaccttcgtcttccaccagcgttctcatgaggagcagcggggcctccgctgataaccagctggtctgggtgtagctcttagaggaaggagatagggaaaaggggctccttgctccacagggccctgttgaattttgttctctgggagaaaatcatcaagaagggctgcatgatgtttgcccaaaatttattttataagaaaaacttttttggttaaaaaaaagaataaaggtatgaaagggctggtgacagtcagggatgcccccggcacacagggactaggtctagtgagaacatcaggagcagccagggatcc

SEQ ID NO: 291812 - DNA, 820 bp, Homo sapiens
tggggagccccacttatacttggaggtgtcctggcaccctacccactttttggtaggtgtttgggtgtccaaggctttgcagaagaagcaggcagggagtctatggtggagtaacgtggtggagaggcctggagaggtgtcattctagctgggcaacgggtgacacgcagtcatcccctcagtgaacgctggacgtgctctgtggctccctgcaggcctgcggatccaccagggggctccgttccttctgggccaaagctgaagaagcggctgctgcaccagagaagtgcatctggatgaaggtggaagcacacgcgggcccgcagaaccgcctaagatatcttcaggtgtgggcttggaactggcaggctttcatttctgcttcattccatggccaaagcaagccacatgggcaagtctgaagccggggcaagaaagtatcctccacccacaacgaaaccatggcaagcgggtagaatggaggttgcactattcgggccggccactctcctactggctgacaggatgctgcccgagatgaaacagggtgtgtgtgcaccacggagtcagtccaagactcctgttctcactcagggattcttcatttcttcttcctattgcctccacttcatgttattttcttcccttcccatttacaagtaaaactgaccagagccccaggaataaatggttttcttggcttcctccttgctcccatctggacccagtcccctggttcctgttggtcatttgcaaaccaagaggaccacaataaacaaatctctattttttttttaaatattaaagcattcactctgca

SEQ ID NO: 291813 - DNA, 441 bp, Homo sapiens
caatactcattggcatacattaacggtctgcagtcagctctcttagtctctgtgatggctattgcaaacttctgctggattcctttagccttgactatcatcagtatgaattgaagaaacaagattgtcctttgaactaaaatcctgttcatcctcattgtcactaccaacgactggaattcctgcaagatccccagagttcaaaaaataatcatcttcatccagcaatgaattttcagatcctgtttgattcggcattccataagacatgctgtcaagggtaggagttaagttgtggtctatatcttcagacatttctgtatccatgataccaccaccttaaaaagtaaaatactgtttagacaaatgatagtgctaaagatgaccacaatgataaggtcagtctggtatttaaccaaataaatattttttcaaacaaaa

SEQ ID NO: 291814 - DNA, 712 bp, Homo sapiens
ctttaacatggattgaagtaaaaatccaacaagagttaaataataacgatgacatccgcaacttgtattcttttagtaatattaacagaagatttccatcattttacttcaacttcaataactgttactgatctgaagtagtagttccttactatgatcaagaaaaaatctattctaagaaatgtctgaattacatgagatgtcttttggcatctaataaagtgactattacagatacccttatttgacctgctgatgaaatatatgtattaaaagattttctaacatcgactaatcatgacattccttcattatatagtgtattaaagaaaatttccttaaatatttttattttaatctcagaaaactccagaaacaaccaatactcattggcatacattaacggtctgcagtcagctctcttagtctctgtgatggctattgcaaacttctgctggattcctttagccttgagtacgtattatttatgtaatatagtaaaatagtatacatcttaagtactgtttgtatggtccacaatgccttcaaggcacaatcatgtttggtttatgtttggatcctcccatgatcactaattttacaagtatttgataaacaaatcaatgagtagccaaatactaataaatattttctgagaagtaaatatctaattggtaacccaaaagctttcagaagcagaaaaacacatgcc

SEQ ID NO: 291815 - DNA, 1740 bp, Homo sapiens
cctgaacgttgttattgtcacaaggctggctagatctccggcatctgcacactcagtctgaccatttgggaagctttcatgaaaaagcacagtcagcgagaatgagacgagagaacccatttccacaaccattttaatctgcgcatcggtcccagacgtagggattcctcgtctcatcttggaaacattgccagcagtggttctgatttggaagcctgcgtctgtcacgtgacaccgtctgagcctgtgcctgcctctctttcttccggcagtgccctgtactctgtggggatgacggcagtgggcctggccatcctgtgaatcagcttaaaatggctcgtttcaccattgtggatgggaagatggggaaaggagtcagcttcaaagacgtggcaggaatgcacgaagccaaactggaagtccgcgagtttgtggattatctgaagagcccagaacgcttcctccagcttggcgccaaggtcccaaagggcgcactgctgctcggcccccccggctgtgggaagacgctgctggccaaggcggtggccacggaggctcaggtgcccttcctggcgatggccggcccagagttcgtggaggtcattggaggcctcggcgctgcccgtgtgcggagcctctttaaggaagcccgagcccgggccccctgcatcgtctacatcgatgagatcgacgcggtgggcaagaagcgctccaccaccatgtccggcttctccaacacggaggaggagcagacgctcaaccagcttctggtagaaatggatggtgcctctcttgaccagctaccctcccaggggaccatgaggaagctcagaggaaagacccccgcctgctcctgtctcacggagcccacagggtcacggagggcaatggagggtcattcgctctgctggggttgccttttgcactgaagatagagaccacctttttgagtgacttgagcccaaaggcaagcgtatatcaaacgatcttctccacataacctctctgtgccatcataagaatagctgcttccgcccccggatttgctcaggcctgggaatccgctgactgaaggcctcttgttgagtgccagctctaaacaagtccctttatgcagagccacagctgtgcatgctcagccctgccgaggtcccaggccaggctttgttgcttccgttcatggaagcgcacaggatagggccgacgctgtgccggtcgtggggaaatctcactggggaagagaaaagcccaagccttgttggttacgtcagccggtccatggcggtgtcctgcggaccccagagcccccgggaagggcgcaagtcaaagagcactggaggcaccgccggcgatggacgtccaggtcccggctcctgtgctggaaagcgttgatggggagcgtcggcgctgaccacacgcgggagctgcggaagcccagcggttcacacaggcctcccttcaacgtagtcatcccctggtggtggaagcaagacgacggcccctgacgtgcagccacacacagaaaaggctgctgtgaacattttatgcttcgactttttttttcttcagagacagggtgtcgttctgtcgcccaggctggagtgcagtgccaccatcatagctcactgcagcctccacctcctaggctcaagcttcctaagtagttgggactcaaggcttgagtcaccatgccaggctctgttttttcagtctgtgaaaaataaagtcatcagcatgtga

SEQ ID NO: 291816 - DNA, 2324 bp, Homo sapiens
aacttagctaggtagagctggtttgaatcggacgagggccaacatggccgtgctgctgctgctgctccgtgccctccgccggggtccaggcccgggtcctcggccgctgtggggcccaggcccggcctggagtccagggttccccgccaggcccgggagggggcggccgtacatggccagcaggcctccgggggacctcgccgaggctgtaggccgagctctgcagagcttacaattgagactgctaacccctacctttgaagggatcaacggattgttgttgaaacaacatttagttcagaatccagtcagactctggcaacttttaggtggtactttctattttaacacctcaaggttgaagcagaagaataaggagaaggataagtcgaaggggaaggcgcctgaagaggacgaagaggagaggagacgccgtgagcgggacgaccagatgtaccgagagcggctgcgcaccttgctggtcatcgcggttgtcatgagcctcctgaatgctctcagcaccagcggaggcagcatttcctggaacgactttgtccacgagatgctggccaagggcgaggtgcagcgcgtccaggtggtgcctgagagcgacgtggtggaagtctacctgcaccctggagccgtggtgtttgggcggcctcggctagccttgatgtaccgaatgcaggttgcaaatattgacaagtttgaagagaagcttcgagcagctgaagatgagctgaatatcgaggccaaggacaggatcccagtttcctacaagcgaacaggattctttggaaatgccctgtactctgtggggatgacggcagtgggcctggccatcctgtggtatgttttccgtctggccgggatgactggaagggaaggtggattcagtgcttttaatcagcttaaaatggctcgtttcaccattgtggatgggaagatggggaaaggagtcagcttcaaagacgtggcaggaatgcacgaagccaaactggaagtccgcgagtttgtggattatctgaagagcccagaacgcttcctccagcttggcgccaaggtcccaaagggcgcactgctgctcggcccccccggctgtgggaagacgctgctggccaaggcggtggccacggaggctcaggtgcccttcctggcgatggccggcccagagttcgtggaggtcattggaggcctcggcgctgcccgtgtgcggagcctctttaaggaagcccgagcccgggccccctgcatcgtctacatcgatgagatcgacgcggtgggcaagaagcgctccaccaccatgtccggcttctccaacacggaggaggagcagacgctcaaccagcttctggtagaaatggatggtgcctctcttgaccagctaccctcccaggggaccatgaggaagctcagaggaaagacccccgcctgctcctgtctcacggagcccacagggtcacggagggcaatggagggtcattcgctctgctggggttgccttttgcactgaagatagagaccacctttttgagtgacttgagcccaaaggcaagcgtatatcaaacgatcttctccacataacctctctgtgccatcataagaatagctgcttccgcccccggatttgctcaggcctgggaatccgctgactgaaggcctcttgttgagtgccagctctaaacaagtccctttatgcagagccacagctgtgcatgctcagccctgccgaggtcccaggccaggctttgttgcttccgttcatggaagcgcacaggatagggccgacgctgtgccggtcgtggggaaatctcactggggaagagaaaagcccaagccttgttggttacgtcagccggtccatggcggtgtcctgcggaccccagagcccccgggaagggcgcaagtcaaagagcactggaggcaccgccggcgatggacgtccaggtcccggctcctgtgctggaaagcgttgatggggagcgtcggcgctgaccacacgcgggagctgcggaagcccagcggttcacacaggcctcccttcaacgtagtcatcccctggtggtggaagcaagacgacggcccctgacgtgcagccacacacagaaaaggctgctgtgaacattttatgcttcgactttttttttcttcagagacagggtgtcgttctgtcgcccaggctggagtgcagtgccaccatcatagctcactgcagcctccacctcctaggctcaagcttcctaagtagttgggactcaaggcttgagtcaccatgccaggctctgttttttcagtctgtgaaaaataaagtcatcagcatgtga

SEQ ID NO: 291817 - DNA, 585 bp, Homo sapiens
cgagggaccctgaccgcgccccgcttcctttccataacgagtggacccctcccggagcaccttcagcccttcctccacgggagacccccccagcgccggcacgagagatgccagcggacccccacccctgacacacctgcgccgcctccgaaacgcgatctgtccggcgcctcccctcgggcgccttctcccccgagccggccgggagccgggacgggggcgcgcagggtccgggagagttacaggcttcagactttatctcgttgtggaaagcaagagaccaagccaaaaactttggtcgtgcttttcaacatctccggtcaaaagaggtcgccaatctgcttttctcccattgctgcgtcttagaggggtgtggtgccatgataccacttttgaaaatcctgttgaatgcaagtcctctttgttgctcattgaacaatgaggatatttagctcccctcagagctaccctcagagttggatgagctatcctcagagttggatgccaccaccgggagcagcaaaagcgaaggcaactcatgattctgcctcagaagcaatcgaataaaatattttgaaaatgaaa

SEQ ID NO: 291818 - DNA, 509 bp, Homo sapiens
tggccgcgggaaggctggagccgttctggctggcaccggggtctacgccctcctgccggaggctggctctcgcctctgctcccttcctgggttctgcgccgccacccctcacccacgccgcttatcttccctccctttgcacgctcccgcgggacagggagagttacaggcttcagactttatctcgttgtggaaagcaagagaccaagccaaaaactttggtcgtgcttttcaacatctccggtcaaaagaggtcgccaatctgcttttctcccattgctgcgtcttagaggggtgtggtgccatgataccacttttgaaaatcctgttgaatgcaagtcctctttgttgctcattgaacaatgaggatatttagctcccctcagagctaccctcagagttggatgagctatcctcagagttggatgccaccaccgggagcagcaaaagcgaaggcaactcatgattctgcctcagaagcaatcgaataaaatattttgaaaatgaaa

SEQ ID NO: 291819 - DNA, 489 bp, Homo sapiens
cgagggaccctgaccgcgccccgcttcctttccataacgagtggacccctcccggagcaccttcagcccttcctccacgggagacccccccagcgccggcacgagagatgccagcggacccccacccctgacacacctgcgccgcctccgaaacgcgatctgtccggcgcctcccctcgggcgccttctcccccgagccggccgggagccgggacgggggcgcgcagggtccggtcgccaatctgcttttctcccattgctgcgtcttagaggggtgtggtgccatgataccacttttgaaaatcctgttgaatgcaagtcctctttgttgctcattgaacaatgaggatatttagctcccctcagagctaccctcagagttggatgagctatcctcagagttggatgccaccaccgggagcagcaaaagcgaaggcaactcatgattctgcctcagaagcaatcgaataaaatattttgaaaatgaaa

SEQ ID NO: 291820 - DNA, 714 bp, Homo sapiens
gtatttttggtagagatggggtttcgccatgctggccaggctggcctcgaactcctggcctcaagtgatctgcccacctagcccaaccaaagtgttgggattacaggtgtgagccaccgtacttggcttccttttctatttttgagacagagtctcactctgtcactcaggctggagtgcagtggcacgatcttggctcactgcaacctctgcctcccaggttcaagtgatccttctgcctcaccctcccaagtagctgggattacaggtgtgcacctccgtggctagccctccttttcaattggttagtgtcttgtggttttcccacctttccacagtggaaaatggctcaggactgactgacatgaagacaagcccaggggtctacactcaactcaacccttgcacccaagctctgggctaagattttggcgtgctgagcaccacccattttgtaaggaattttgtaaaattttatctgaagcatcactcacaactccactttctttacttaaataaggatttccgccccatttctgccaggcatactgagcttcacagtccctgtttctttttcctggtgcctaggcctggttctctgagcctggtggtcacaccaatggcatctggcacacagttctccgataatggggatacctaggaggttccgagacaccttacagtcctgggttagtaacctggatctctttttcc

SEQ ID NO: 291821 - DNA, 899 bp, Homo sapiens
tgcctcatagtgcgcatgcttgagcccacttacctaacacctgagatcttattgggacgctgctgataaccagtttcagagatgctcaagcactgaattgtcttaagaaaacaagtaaggttttgtcacctatcctatttctcactgcaagttgaaaaaaatcaaatccaaacaccaccaccccttctatgacaacaaacggctgtggaggtaatcttattttcctaagggtagtttcatgatgacagtgtcaaaaaattactgtggataaagaaaaaattgtctcaatgaaatagaatttttcactgaacacagaaaccatctcaatagttgctgctccctggtttccaggccacgcaacagacatcaaaccaggaagccaaactttcatggacctgtgttaagaaaaacacacatacatgggcatactactttttccagaaaaacggaattaggcagagaaggaagtgtgggtgtacaactgatccacaagctattgggaaatcaatagctaaaaaatgtcaacaccctggcttccttttatcaggaactccaggaggctgaaggaatgtgagtgcatgagataagcaagacagatcttaacggtcccctcacatccctttctgggcaatctccagaatgcctagttttgtggagacaccatgtactatctggctgcagagactttcttaggtcccgtgttagaccccatggggtctcagcatgtggtcatgtggtaatgcattcctttcaaaggctttgggttgaactcaagttggaaatacctggaaaagaccaagcttctcctttgggtgtctgcggatcctattaaaaatattcgtgatgttttaagttctccaatacaattttctccatgaaaacaagcatcagatacacta

SEQ ID NO: 291822 - DNA, 1132 bp, Homo sapiens
actgcactcttaatacttatctttattatgaaagtgtttccaaagtaaaatgatcctcataataatgattgcttccagagatcaagaatgaataattatattttcatataaaaatcagcaaaacacaataacaatacataaaataattctaattggctaacagtatttcattccatttctgacagagatgctcaagcactgaattgtcttaagaaaacaagtaaggttttgtcacctatcctatttctcactgcaagttgaaaaaaatcaaatccaaacaccaccaccccttctatgacaacaaacggctgtggaggtaaatgactatgtgggcaaagagttgatgaaaatcatgagcttaggggctttatgaaactttgggaaatcaaactcagaggttgttttccattcttaaagtaatgaagctctaagttaaagtttcagaatcatcacataactgttcctattccataactcatttcttttttttttttgcaggtaatcttattttcctaagggtagtttcatgatgacagtgtcaaaaaattactgtggataaagaaaaaattgtctcaatgaaatagaatttttcactgaacacagaaaccatctcaatagttgctgctccctggtttccaggccacgcaacagacatcaaaccaggaagccaaactttcatggacctgtgttaagaaaaacacacatacatgggcatactactttttccagaaaaacggaattaggcagagaaggaagtgtgggtgtacaactgatccacaagaactccaggaggctgaaggaatgtgagtgcatgagataagcaagacagatcttaacggtcccctcacatccctttctgggcaatctccagaatgcctagttttgtggagacaccatgtactatctggctgcagagactttcttaggtcccgtgttagaccccatggggtctcagcatgtggtcatgtggtaatgcattcctttcaaaggctttgggttgaactcaagttggaaatacctggaaaagaccaagcttctcctttgggtgtctgcggatcctattaaaaatattcgtgatgttttaagttctccaatacaattttctccatgaaaacaagcatcagatacacta

SEQ ID NO: 291823 - DNA, 1187 bp, Homo sapiens
actgcactcttaatacttatctttattatgaaagtgtttccaaagtaaaatgatcctcataataatgattgcttccagagatcaagaatgaataattatattttcatataaaaatcagcaaaacacaataacaatacataaaataattctaattggctaacagtatttcattccatttctgacagagatgctcaagcactgaattgtcttaagaaaacaagtaaggttttgtcacctatcctatttctcactgcaagttgaaaaaaatcaaatccaaacaccaccaccccttctatgacaacaaacggctgtggaggtaaatgactatgtgggcaaagagttgatgaaaatcatgagcttaggggctttatgaaactttgggaaatcaaactcagaggttgttttccattcttaaagtaatgaagctctaagttaaagtttcagaatcatcacataactgttcctattccataactcatttcttttttttttttgcaggtaatcttattttcctaagggtagtttcatgatgacagtgtcaaaaaattactgtggataaagaaaaaattgtctcaatgaaatagaatttttcactgaacacagaaaccatctcaatagttgctgctccctggtttccaggccacgcaacagacatcaaaccaggaagccaaactttcatggacctgtgttaagaaaaacacacatacatgggcatactactttttccagaaaaacggaattaggcagagaaggaagtgtgggtgtacaactgatccacaagctattgggaaatcaatagctaaaaaatgtcaacaccctggcttccttttatcaggaactccaggaggctgaaggaatgtgagtgcatgagataagcaagacagatcttaacggtcccctcacatccctttctgggcaatctccagaatgcctagttttgtggagacaccatgtactatctggctgcagagactttcttaggtcccgtgttagaccccatggggtctcagcatgtggtcatgtggtaatgcattcctttcaaaggctttgggttgaactcaagttggaaatacctggaaaagaccaagcttctcctttgggtgtctgcggatcctattaaaaatattcgtgatgttttaagttctccaatacaattttctccatgaaaacaagcatcagatacacta

SEQ ID NO: 291824 - DNA, 786 bp, Homo sapiens
gcggcggcagcggccggaggaggcggaggaggcggaggaggcggaggtggaagaggaagccggcgtggacgaggcggaggagagagaggcgggccgcgggcgcaggctgtccggcggaggctcagcgcgctccgggggcgggggcggcggcggcggctgaagaggctgcggcgcgctcaggagaccagcggcgccgctgcccttgagcgggcctgcgcctccgtgagggaagagttgctgccagtgctgcagttttctgaacctgggaaacgtgctgttcagacttcatccgggtctcattcaggatgcttcgatgttggttggaagagagttagaccgaaaatgttttgactggcgtcgttatgacaaggtcatccgtcattgttggatagattgatagcacccaagtttaaggcagacaccacgagggaaagcccacggcgctgtggtcccggaggctaaccaggcagtgtccgcagacctccagcaactccatcgggaggagaggatgaagttccaggcccgtttcaattaatctgctcgcagaactgccgaagagtggcttgtcgggccacgggagaagaaacaaatgctctttctcacactctcctggttcattgctgagaaaccaggacactcctctgttccctgggagagacagtgaactccagggatggaagtccggactccggcggcggtcccgtcatttgccttcttgtttctgcccaaacccagctagttccaagcgcttggtccccaagactggaagtccccaagaacctacct

SEQ ID NO: 291825 - DNA, 803 bp, Homo sapiens
tttgcaggaagtttgatggcatgtctttatatcatggccatgggcaggacttggaaaaagttttaccactaaagcatctatgaactcaagaaagaaaacactggctatgtacaatgatgactgtgatcttttaaatttatctcaaatagcgaacctaccagtcatacaatcttattggaggaagtgatttaaccaactcacagttaagtgtccttcatgatgatctgggaaatgaatgaataagtactctgtggctaccagttgcattatggagtcacctaggaattccattctctgattgtggcctctggaaaaagaaacatcaaagtaaagaaatcaataaccatttatggatttccaaaaaaacacccagaattttaaaaaaggaatgacttaaaaagacaatgtgttcattttgttttaaagcacaaaaccaaatacaattccctaaggcccctcgattgagaagagatctgagttaatataggctgagttttaaagaagaataaagtgaatattatctaaggattaaacgattgccaaaataaagactggtaaacactgcctggtcagaagctgaagagcataaattgaaaaatcaagcataatacaaacaacaatcttgaaagaaagcaaacaggtccaagacttttctttgctaaatttattgaaatatatactctggccggctgcagtggctcatgcctctaatcccagtgctttgtgaggctgaggcaggtggatcacttgagcccaggagtttgagaccagcctggcaacatgaagaaaccccatctctacaa

SEQ ID NO: 291826 - DNA, 639 bp, Homo sapiens
agtcagggaacatctgtcccttcttcgtgaatatctgtgttcaagtctcttgctcatttgttaaattgggcttttcatcttaattttggtttgcagttttctcccctatatccgaggtctgagtcctttgtcaggacacacagtgtgatttcttgcctggcattccgttccttgcttgtccattttcaagagcagaacattttcacgttgatggaagcccgatgtctttcttctacgacacaggtggtggccagacctggcacacggatgcagctgaccctggaagctgaagggcagtgaaacccatctgattaagatgctcaacttttctgaagaaaaagctgacaccaagacctgcctaaggtcacaccatcatgagtggctgagttgggctgtgatgagccacccggctggagagcttgtgccctggttacacgattgccagtgagatgcctatggactcgcatgtagaggtgggtacccagacagctcagagtgagctgcctgcgggcccagcatgcagaggtgtgtactcagtgctgtgtgagatgcctgtgggcccaggcacggagggatgcatgcgtgcccagaaagcaaaaggctgtgcagaggacctgctaggaggtaatgactagagaa

SEQ ID NO: 291827 - DNA, 984 bp, Homo sapiens
agtcagggaacatctgtcccttcttcgtgaatatctgtgttcaagtctcttgctcatttgttaaattgggcttttcatcttaattttggtttgcagttttctcccctatatccgaggtctgagtcctttgtcaggacacacagtgtgatttcttgcctggcattccgttccttgcttgtccattttcaagagcagaacattttcacgttgatggaagcccgatgtctttcttctacggtatgtgctctgcatccaaagcagccttcgcccatcccacattttagataattttttcttctaaaaacttcactgtttaagcgctcatgtttggatctgcaatctattttggatgaattcttgtgtatgacgtgcagtaggaataaaggctcatgtctttccatacggatagccagttttattcacagacacaggtggtggccagacctggcacacggatgcagctgaccctggaagctgaagggcagtgaaacccatctgattaagatgctcaacttttctgaagaaaaagctgacaccaagacctgcctaaggtcacaccatcatgagtggctgagttgggctgtgatgagccacccggctggagagcttgtgccctggttacacgattgccagtgagatgcctatggactcgcatgtagagagtgagtgcagcagtgacagcttggtgggctccagctgacccctccagagcccctgagtggtggcggtctgcagtcctcagtcagcagcagcagacgtcacccgtcatacagggccattcactgaagtgtcacctggtgcgcttggttggccagtcctaaggagcaacagacaggcatcggaggcacttgcagcagaaatatgaaaaacaaaacctacttagctgagctccccaagggcagggacaacttattttaacattgttttgaacttagtaagtttttaataaaatgatatgtaaatgaatggagcaaaagctctaga

SEQ ID NO: 291828 - DNA, 827 bp, Homo sapiens
agtcagggaacatctgtcccttcttcgtgaatatctgtgttcaagtctcttgctcatttgttaaattgggcttttcatcttaattttggtttgcagttttctcccctatatccgaggtctgagtcctttgtcaggacacacagtgtgatttcttgcctggcattccgttccttgcttgtccattttcaagagcagaacattttcacgttgatggaagcccgatgtctttcttctacggtatgtgctctgcatccaaagcagccttcgcccatcccacattttagataattttttcttctaaaaacttcactgtttaagcgctcatgtttggatctgcaatctattttggatgaattcttgtgtatgacgtgcagtaggaataaaggctcatgtctttccatacggatagccagttttattcacagacacaggtggtggccagacctggcacacggatgcagctgaccctggaagctgaagggcagtgaaacccatctgattaagatgctcaacttttctgaagaaaaagctgacaccaagacctgcctaaggtcacaccatcatgagtggctgagttgggctgtgatgagccacccggctggagagcttgtgccctggttacacgattgccagtgagatgcctatggactcgcatgtagaggtgggtacccagacagctcagagtgagctgcctgcgggcccagcatgcagaggtgtgtactcagtgctgtgtgagatgcctgtgggcccaggcacggagggatgcatgcgtgcccagaaagcaaaaggctgtgcagaggacctgctaggaggtaatgactagagaa

SEQ ID NO: 291829 - DNA, 867 bp, Homo sapiens
ctaatttttgtattttttttagagacagggtttcaccatgttgcccaggctggtcttgaacctctgggctcaagcaatctgcccaccttggcctcccaaagatctaggattataagtgtgagccacagtgcccagcctacatgctagagcatgtgactaaccctgtgactttacattggaattgcactttaacctgtttttaatgtttcttctgcattaacctgatatatctttattataatgctttattttcttcatgttagcttgcatttgaacatagataccttagtggtgtagtttgcttggctctgtggaagtagaataatatctccacgttcttattgttgatggttctgttgaagtatgtaatgttatatgtgactcatagatgaaccataatgacactgtagaaaaatggtggttttcttcacttttccaccatccacatttcttactatccctttagcttatccttcagtgacttaggtttttgtttgatggcaatccttaccattttttaagcctaattttagctgaatttaaaaggaggggtgaagagggtgaatgagatagaaaaacaagacatgatttttctgggtactctccctctagtctccatccttaacaagagtcttgcttatgacattattcaaaaagccagatacaacatccattacaaagtgacacacatctttggatggctgtttttgaagtatttcataaatctttttatactctctggatggagaaggcctttttaaacatgatactaaagttggaaaccaagaaaaaaagttggatggatttgattacataaaaatacagacttccttatggcaagaagaaaaaaaaaaaagaaacaaagtc

SEQ ID NO: 291830 - DNA, 410 bp, Homo sapiens
ggtatcgagctcggtaccagtgctactccacatacaggaattagggcctagattgtaagctcttgcagcagtcacatttgttcccgggctttggtggttatttctaaatttttgaggtgctttgctatttcttgtgtgacctgatagctccctggaactttgggtctgtgtgtgacacatgagactcacagttggagttctccagctctggaggtgctgaaggagctgcattaattctggaagacgactccatgcagcaactactgaagaaaggaccagacttcaacggggagtgtggatgggccgacctggctgggactcgtgaatctggagaagagctggagaatggatagtattgtctgtatttggaggtagcactctgtttgtggagtagcactggaccgagctga

SEQ ID NO: 291831 - DNA, 427 bp, Homo sapiens
ctgatctagaggacccgagttatccacatacaggaattagggcctagattgtaagctcttgcagcagtcacatttgttcccgggctttggtggttatttctaaatttttgaggtgctttgctatttcttgtgtgacctgatagctccctggaactttgggtctgtgtgtgacacatgagactcacagttggagttctccagctctggaggtgctgaaggagctgcattaattctggaagacgactccatgcagcaactactgaagaaaggaccagacttcaacggggagtgtggatgggccgacctggctgggactcgtgaatctggagaagagctggagaatggatagtattgtctgtatttggagactttaatttctgtgtgagaccaatagcactctgtttgtggaggtagcacgctgtttgtg

SEQ ID NO: 291832 - DNA, 468 bp, Homo sapiens
  misc_feature (133)..(133): n is a, c, g, or t
  misc_feature (135)..(136): n is a, c, g, or t
tgacacgttccacccgccacctccccctcaaaacactgatcgggcgacgatcgctgggccggcagtggagcccagccgtgccctgcctgagccagtccagttttaaaataaatagcaagcgttgccggtcttntnncccgaattctaaaatagaagataagatcttgatattctgtacaagttgatgtaataccctgatgcgttttagaggacttggcataaaatgaaagattggcaaaggcccttgaggggcttggggatgagagtatggaactgtctgcattggaccctaaactggactagaagaggcatcttcaaggttcatacgttgtccagctgtaagttcatttgagtagcagacctaacaaatatttgaggtcaaaaccctaccatgttaaaacaaacaaaaacttaccatgttaataaaagtattcatttgcttgaaaagacgaaagacctaaaaaaaat

SEQ ID NO: 291833 - DNA, 1600 bp, Homo sapiens
actcgattttgttcgccgttactctgcgcgtaagtcgcttgtccgtggcttctctgagaagaaaagttgaaaaagggtaaaagttttcaggaatattcgggctctctattgctaagcatagcgagtgtcggttttctctctccaacagacatcgctattgcggttccgaggcagtgggaagagatgcggcccctggacatcgtcgagctggcggaaccggaggaagtggaggtgctggagcccgaggaggatttcgagcagtttctgctcccggtcatcaacgagatgcgcgaggacatcgcgtcgctgacgcgcgagcacgggcgggcgtacctgcggaaccggagcaagctgtgggagatggacaatatgctcatccagatcaaaacgcaggtggaggcctcggaggagagcgccctcaaccacctccagaacccgggcgacgcggccgagggccgggcggccaagaggtgcgagaaggccgaggagaaggccaaggagattgcgaagatggcagagatgctggtggagctggtccggcggatagagaagagcgagtcgtcgtgagcgcggtcggcggtttccagccaatggattctggtcaactggtggagattggctgacaccctggagaagccgaaaccagagagccttttgttttctcttttttcctgtctatgctctgtctcacttaacactacgttttctgctatggtctgtggttgatgacctcaatatgagtttcgattgttaacgtgtttttgtttgggaagtaattttgtttgaaaatgctctcacatacaggaattagggcctagattgtaagctcttgcagcagtcacatttgttcccgggctttggtggttatttctaaatttttgaggtgctttgctatttcttgtgtgacctgatagctccctggaactttgggtctgtgtgtgacacatgagactcacagttggagttctccagctctggaggtgctgaaggagctgcattaattctggaagacgactccatgcagcaactactgaagaaaggaccagacttcaacggggagtgtggatgggccgacctggctgggactcgtgaatctggagaagagctggagaatggatagtattgtctgtatttggagactttaatttctgtgtgagaccaaaggaggagagatgtgttttgttcaaaatttaaatttgttgtggtacactatcttatgtaacctgtctggtgagtttgtttggacaacctaactcagctttatttgacatggaacctaaaatagaagataagatcttgatattctgtacaagttgatgtaataccctgatgcgttttagaggacttggcataaaatgaaagattggcaaaggcccttgaggggcttggggatgagagtatggaactgtctgcattggaccctaaactggactagaagaggcatcttcaaggttcatacgttgtccagctgtaagttcatttgagtagcagacctaacaaatatttgaggtcaaaaccctaccatgttaaaacaaacaaaaacttaccatgttaataaaagtattcatttgcttgaaaagacgaaagacctaaaaaaaat

SEQ ID NO: 291834 - DNA, 1573 bp, Homo sapiens
  misc_feature (1568)..(1569): n is a, c, g, or t
actcgattttgttcgccgttactctgcgcgtaagtcgcttgtccgtggcttctctgagaagaaaagttgaaaaagggtaaaagttttcaggaatattcgggctctctattgctaagcatagcgagtgtcggttttctctctccaacagacatcgctattgcggttccgaggcagtgggaagagatgcggcccctggacatcgtcgagctggcggaaccggaggaagtggaggtgctggagcccgaggaggatttcgagcagtttctgctcccggtcatcaacgagatgcgcgaggacatcgcgtcgctgacgcgcgagcacgggcgggcgtacctgcggaaccggagcaagctgtgggagatggacaatatgctcatccagatcaaaacgcaggtggaggcctcggaggagagcgccctcaaccacctccagaacccgggcgacgcggccgagggccgggcggccaagaggtgcgagaaggccgaggagaaggccaaggagattgcgaagatggcagagatgctggtggagctggtccggcggatagagaagagcgagtcgtcgtgagcgcggtcggcggtttccagccaatggattctggtcaactggtggagattggctgacaccctggagaagccgaaaccagagagccttttgttttctcttttttcctgtctatgctctgtctcacttaacactacgttttctgctatggtctgtggttgatgacctcaatatgagtttcgattgttaacgtgtttttgtttgggaagtaattttgtttgaaaatgctctcacatacaggaattagggcctagattgtaagctcttgcagcagtcacatttgttcccgggctttggtggttatttctaaatttttgaggtgctttgctatttcttgtgtgacctgatagctccctggaactttgggtctgtgtgtgacacatgagactcacagttggagttctccagctctggaggtgctgaaggagctgcattaattctggaagacgactccatgcagcaactactgaagaaaggaccagacttcaacggggagtgtggatgggccgacctggctgggactcgtgaatctggagaagagctggagaatggatagtattgtctgtatttggagactttaatttctgtgtgagaccaaaggaggagagatgtgttttgttcaaaatttaaatttgttgtggtacactatcttatgtaacctgtctggtgagtttgtttggacaacctaactcagctttatttgacatggaacctaaaatagaagataagatcttgatattctgtacaagttgatgtaataccctgatgcgttttagaggacttggcataaaatgaaagattggcaaaggcccttgaggggcttggggatgagagtatggaactgtctgcattggaccctaaactggactagaagaggcatcttcaaggttcatacgttgtccagctgtaagttcatttgagtagcagacctaacaaatatttgaggtcaaaaccctaccatgttaaaactgatacttttattaacatggtaagtttttgttgtnnagcc

SEQ ID NO: 291835 - DNA, 1480 bp, Homo sapiens
agcggatttgttcgccgttactctgcgcacatcgctattgcggttccgaggcagtgggaagagatgcggcccctggacatcgtcgagctggcggaaccggaggaagtggaggtgctggagcccgaggaggatttcgagcagtttctgctcccggtcatcaacgagatgcgcgaggacatcgcgtcgctgacgcgcgagcacgggcgggcgtacctgcggaaccggagcaagctgtgggagatggacaatatgctcatccagatcaaaacgcaggtggaggcctcggaggagagcgccctcaaccacctccagaacccgggcgacgcggccgagggccgggcggccaagaggtgcgagaaggccgaggagaaggccaaggagattgcgaagatggcagagatgctggtggagctggtccggcggatagagaagagcgagtcgtcgtgagcgcggtcggcggtttccagccaatggattctggtcaactggtggagattggctgacaccctggagaagccgaaaccagagagccttttgttttctcttttttcctgtctatgctctgtctcacttaacactacgttttctgctatggtctgtggttgatgacctcaatatgagtttcgattgttaacgtgtttttgtttgggaagtaattttgtttgaaaatgctctcacatacaggaattagggcctagattgtaagctcttgcagcagtcacatttgttcccgggctttggtggttatttctaaatttttgaggtgctttgctatttcttgtgtgacctgatagctccctggaactttgggtctgtgtgtgacacatgagactcacagttggagttctccagctctggaggtgctgaaggagctgcattaattctggaagacgactccatgcagcaactactgaagaaaggaccagacttcaacggggagtgtggatgggccgacctggctgggactcgtgaatctggagaagagctggagaatggatagtattgtctgtatttggagactttaatttctgtgtgagaccaaaggaggagagatgtgttttgttcaaaatttaaatttgttgtggtacactatcttatgtaacctgtctggtgagtttgtttggacaacctaactcagctttatttgacatggaacctaaaatagaagataagatcttgatattctgtacaagttgatgtaataccctgatgcgttttagaggacttggcataaaatgaaagattggcaaaggcccttgaggggcttggggatgagagtatggaactgtctgcattggaccctaaactggactagaagaggcatcttcaaggttcatacgttgtccagctgtaagttcatttgagtagcagacctaacaaatatttgaggtcaaaaccctaccatgttaaaacaaacaaaaacttaccatgttaataaaagtattcatttgcttgaaaagacgaaagacctaaaaaaaat

SEQ ID NO: 291836 - DNA, 1634 bp, Homo sapiens
accccaacgccgttccccggtttaaccttcctgccgccgttaaaagttcgcctttgttcccggtgggcctttcttcttgcaagaaaagaaaaccacgtttgcacccaagggtaaaagttttcaggaatattcgggctctctattgctaagcatagcgagtgtcggttttctctctccaacagacatcgctattgcggttccgaggcagtgggaagagatgcggcccctggacatcgtcgagctggcggaaccggaggaagtggaggtgctggagcccgaggaggatttcgagcagtttctgctcccggtcatcaacgagatgcgcgaggacatcgcgtcgctgacgcgcgagcacgggcgggcgtacctgcggaaccggagcaagctgtgggagatggacaatatgctcatccagatcaaaacgcaggtggaggcctcggaggagagcgccctcaaccacctccagaacccgggcgacgcggccgagggccgggcggccaagaggtgcgagaaggccgaggagaaggccaaggagattgcgaagatggcagagatgctggtggagctggtccggcggatagagaagagcgagtcgtcgtgagcgcggtcggcggtttccagccaatggattctggtcaactggtggagattggctgacaccctggagaagccgaaaccagagagccttttgttttctcttttttcctgtctatgctctgtctcacttaacactacgttttctgctatggtctgtggttgatgacctcaatatgagtttcgattgttaacgtgtttttgtttgggaagtaattttgtttgaaaatgctctcacatacaggaattagggcctagattgtaagctcttgcagcagtcacatttgttcccgggctttggtggttatttctaaatttttgaggtgctttgctatttcttgtgtgacctgatagctccctggaactttgggtctgtgtgtgacacatgagactcacagttggagttctccagctctggaggtgctgaaggagctgcattaattctggaagacgactccatgcagcaactactgaagaaaggaccagacttcaacggggagtgtggatgggccgacctggctgggactcgtgaatctggagaagagctggagaatggatagtattgtctgtatttggagactttaatttctgtgtgagaccaaaggaggagagatgtgttttgttcaaaatttaaatttgttgtggtacactatcttatgtaacctgtctggtgagtttgtttggacaacctaactcagctttatttgacatggaacctaaaatagaagataagatcttgatattctgtacaagttgatgtaataccctgatgcgttttagaggacttggcataaaatgaaagattggcaaaggcccttgaggggcttggggatgagagtatggaactgtctgcattggaccctaaactggactagaagaggcatcttcaaggttcatacgttgtccagctgtaagttcatttgagtagcagacctaacaaatatttgaggtcaaaaccctaccatgttaaaacaaacaaaaacttaccatgttaataaaagtattcatttgcttgaaaagacgaaagacctaaaaaaaat

SEQ ID NO: 291837 - DNA, 1473 bp, Homo sapiens
taacgggaacgcgaccacgcgacatcgctattgcggttccgaggcagtgggaagagatgcggcccctggacatcgtcgagctggcggaaccggaggaagtggaggtgctggagcccgaggaggatttcgagcagtttctgctcccggtcatcaacgagatgcgcgaggacatcgcgtcgctgacgcgcgagcacgggcgggcgtacctgcggaaccggagcaagctgtgggagatggacaatatgctcatccagatcaaaacgcaggtggaggcctcggaggagagcgccctcaaccacctccagaacccgggcgacgcggccgagggccgggcggccaagaggtgcgagaaggccgaggagaaggccaaggagattgcgaagatggcagagatgctggtggagctggtccggcggatagagaagagcgagtcgtcgtgagcgcggtcggcggtttccagccaatggattctggtcaactggtggagattggctgacaccctggagaagccgaaaccagagagccttttgttttctcttttttcctgtctatgctctgtctcacttaacactacgttttctgctatggtctgtggttgatgacctcaatatgagtttcgattgttaacgtgtttttgtttgggaagtaattttgtttgaaaatgctctcacatacaggaattagggcctagattgtaagctcttgcagcagtcacatttgttcccgggctttggtggttatttctaaatttttgaggtgctttgctatttcttgtgtgacctgatagctccctggaactttgggtctgtgtgtgacacatgagactcacagttggagttctccagctctggaggtgctgaaggagctgcattaattctggaagacgactccatgcagcaactactgaagaaaggaccagacttcaacggggagtgtggatgggccgacctggctgggactcgtgaatctggagaagagctggagaatggatagtattgtctgtatttggagactttaatttctgtgtgagaccaaaggaggagagatgtgttttgttcaaaatttaaatttgttgtggtacactatcttatgtaacctgtctggtgagtttgtttggacaacctaactcagctttatttgacatggaacctaaaatagaagataagatcttgatattctgtacaagttgatgtaataccctgatgcgttttagaggacttggcataaaatgaaagattggcaaaggcccttgaggggcttggggatgagagtatggaactgtctgcattggaccctaaactggactagaagaggcatcttcaaggttcatacgttgtccagctgtaagttcatttgagtagcagacctaacaaatatttgaggtcaaaaccctaccatgttaaaacaaacaaaaacttaccatgttaataaaagtattcatttgcttgaaaagacgaaagacctaaaaaaaat

SEQ ID NO: 291838 - DNA, 1474 bp, Homo sapiens
tgggcggacgcgtgggctgcgcacatcgctattgcggttccgaggcagtgggaagagatgcggcccctggacatcgtcgagctggcggaaccggaggaagtggaggtgctggagcccgaggaggatttcgagcagtttctgctcccggtcatcaacgagatgcgcgaggacatcgcgtcgctgacgcgcgagcacgggcgggcgtacctgcggaaccggagcaagctgtgggagatggacaatatgctcatccagatcaaaacgcaggtggaggcctcggaggagagcgccctcaaccacctccagaacccgggcgacgcggccgagggccgggcggccaagaggtgcgagaaggccgaggagaaggccaaggagattgcgaagatggcagagatgctggtggagctggtccggcggatagagaagagcgagtcgtcgtgagcgcggtcggcggtttccagccaatggattctggtcaactggtggagattggctgacaccctggagaagccgaaaccagagagccttttgttttctcttttttcctgtctatgctctgtctcacttaacactacgttttctgctatggtctgtggttgatgacctcaatatgagtttcgattgttaacgtgtttttgtttgggaagtaattttgtttgaaaatgctctcacatacaggaattagggcctagattgtaagctcttgcagcagtcacatttgttcccgggctttggtggttatttctaaatttttgaggtgctttgctatttcttgtgtgacctgatagctccctggaactttgggtctgtgtgtgacacatgagactcacagttggagttctccagctctggaggtgctgaaggagctgcattaattctggaagacgactccatgcagcaactactgaagaaaggaccagacttcaacggggagtgtggatgggccgacctggctgggactcgtgaatctggagaagagctggagaatggatagtattgtctgtatttggagactttaatttctgtgtgagaccaaaggaggagagatgtgttttgttcaaaatttaaatttgttgtggtacactatcttatgtaacctgtctggtgagtttgtttggacaacctaactcagctttatttgacatggaacctaaaatagaagataagatcttgatattctgtacaagttgatgtaataccctgatgcgttttagaggacttggcataaaatgaaagattggcaaaggcccttgaggggcttggggatgagagtatggaactgtctgcattggaccctaaactggactagaagaggcatcttcaaggttcatacgttgtccagctgtaagttcatttgagtagcagacctaacaaatatttgaggtcaaaaccctaccatgttaaaacaaacaaaaacttaccatgttaataaaagtattcatttgcttgaaaagacgaaagacctaaaaaaaat

SEQ ID NO: 291839 - DNA, 1492 bp, Homo sapiens
cggacgcgtgggtcgacggacgcgtgggcgacccacgcgtacatcgctattgcggttccgaggcagtgggaagagatgcggcccctggacatcgtcgagctggcggaaccggaggaagtggaggtgctggagcccgaggaggatttcgagcagtttctgctcccggtcatcaacgagatgcgcgaggacatcgcgtcgctgacgcgcgagcacgggcgggcgtacctgcggaaccggagcaagctgtgggagatggacaatatgctcatccagatcaaaacgcaggtggaggcctcggaggagagcgccctcaaccacctccagaacccgggcgacgcggccgagggccgggcggccaagaggtgcgagaaggccgaggagaaggccaaggagattgcgaagatggcagagatgctggtggagctggtccggcggatagagaagagcgagtcgtcgtgagcgcggtcggcggtttccagccaatggattctggtcaactggtggagattggctgacaccctggagaagccgaaaccagagagccttttgttttctcttttttcctgtctatgctctgtctcacttaacactacgttttctgctatggtctgtggttgatgacctcaatatgagtttcgattgttaacgtgtttttgtttgggaagtaattttgtttgaaaatgctctcacatacaggaattagggcctagattgtaagctcttgcagcagtcacatttgttcccgggctttggtggttatttctaaatttttgaggtgctttgctatttcttgtgtgacctgatagctccctggaactttgggtctgtgtgtgacacatgagactcacagttggagttctccagctctggaggtgctgaaggagctgcattaattctggaagacgactccatgcagcaactactgaagaaaggaccagacttcaacggggagtgtggatgggccgacctggctgggactcgtgaatctggagaagagctggagaatggatagtattgtctgtatttggagactttaatttctgtgtgagaccaaaggaggagagatgtgttttgttcaaaatttaaatttgttgtggtacactatcttatgtaacctgtctggtgagtttgtttggacaacctaactcagctttatttgacatggaacctaaaatagaagataagatcttgatattctgtacaagttgatgtaataccctgatgcgttttagaggacttggcataaaatgaaagattggcaaaggcccttgaggggcttggggatgagagtatggaactgtctgcattggaccctaaactggactagaagaggcatcttcaaggttcatacgttgtccagctgtaagttcatttgagtagcagacctaacaaatatttgaggtcaaaaccctaccatgttaaaacaaacaaaaacttaccatgttaataaaagtattcatttgcttgaaaagacgaaagacctaaaaaaaat

SEQ ID NO: 291840 - DNA, 1533 bp, Homo sapiens
actcgattttgttcgccgttactctgcgcgtaagtcgcttgtccgtggcttctctgagaagaaaagttgaaaaagggtaaaagttttcaggaatattcgggctctctattgctaagcatagcgagtgtcggttttctctctccaacagacatcgctattgcggttccgaggcagtgggaagagatgcggcccctggacatcgtcgagctggcggaaccggaggaagtggaggtgctggagcccgaggaggatttcgagcagtttctgctcccggtcatcaacgagatgcgcgaggacatcgcgtcgctgacgcgcgagcacgggcgggcgtacctgcggaaccggagcaagctgtgggagatggacaatatgctcatccagatcaaaacgcaggtggaggcctcggaggagagcgccctcaaccacctccagaacccgggcgacgcggccgagggccgggcggccaagaggtgcgagaaggccgaggagaaggccaaggagattgcgaagatggcagagatgctggtggagctggtccggcggatagagaagagcgagtcgtcgtgagcgcggtcggcggtttccagccaatggattctggtcaactggtggagattggctgacaccctggagaagccgaaaccagagagccttttgttttctcttttttcctgtctatgctctgtctcacttaacactacgttttctgctatggtctgtggttgatgacctcaatatgagtttcgattgttaacgtgtttttgtttgggaagtaattttgtttgaaaatgctctcacatacaggaattagggcctagattgtaagctcttgcagcagtcacatttgttcccgggctttggtggttatttctaaatttttgaggtgctttgctatttcttgtgtgacctgatagctccctggaactttgggtctgtgtgtgacacatgagactcacagttggagttctccagctctggaggtgctgaaggagctgcattaattctggaagacgactccatgcagcaactactgaagaaaggaccagacttcaacggggagtgtggatgggccgacctggctgggactcgtgaatctggagaagagctggagaatggatagtattgtctgtatttggagactttaatttctgtgtgagaccaaaggaggagagatgtgttttgttcaaaatttaaatttgttgtggtacactaaaatagaagataagatcttgatattctgtacaagttgatgtaataccctgatgcgttttagaggacttggcataaaatgaaagattggcaaaggcccttgaggggcttggggatgagagtatggaactgtctgcattggaccctaaactggactagaagaggcatcttcaaggttcatacgttgtccagctgtaagttcatttgagtagcagacctaacaaatatttgaggtcaaaaccctaccatgttaaaacaaacaaaaacttaccatgttaataaaagtattcatttgcttgaaaagacgaaagacctaaaaaaaat

SEQ ID NO: 291841 - DNA, 1339 bp, Homo sapiens
actcgattttgttcgccgttactctgcgcgtaagtcgcttgtccgtggcttctctgagaagaaaagttgaaaaagggtaaaagttttcaggaatattcgggctctctattgctaagcatagcgagtgtcggttttctctctccaacagacatcgctattgcggttccgaggcagtgggaagagatgcggcccctggacatcgtcgagctggcggaaccggaggaagtggaggtgctggagcccgaggaggatttcgagcagtttctgctcccggtcatcaacgagatgcgcgaggacatcgcgtcgctgacgcgcgagcacgggcgggcgtacctgcggaaccggagcaagctgtgggagatggacaatatgctcatccagatcaaaacgcaggtggaggcctcggaggagagcgccctcaaccacctccagaacccgggcgacgcggccgagggccgggcggccaagaggtgcgagaaggccgaggagaaggccaaggagattgcgaagatggcagagatgctggtggagctggtccggcggatagagaagagcgagtcgtcgtgagcgcggtcggcggtttccagccaatggattctggtcaactggtggagattggctgacaccctggagaagccgaaaccagagagccttttgttttctcttttttcctgtctatgctctgtctcacttaacactacgttttctgctatggtctgtggttgatgacctcaatatgagtttcgattgttaacgtgtttttgtttgggaagtaattttgtttgaaaatgctctcacatacaggaattagggcctagattgtaagctcttgcagcagtcacatttgttcccgggctttggtggttatttctaaatttttgaggtgctttgctatttcttgtgtgacctgatagctccctggaactttgggtctgtgtgtgacacatgagactcacagttggagttctccagctctggaggtgctgaaggagctgcattaattctggaagacgactccatgcagcaactactgaagaaaggaccagacttcaacggggagtgtggatgggccgacctggctgggactcgtgaatctggagaagagctggagaatggatagtattgtctgtatttggagactttaatttctgtgtgagaccaacttgtattgactttgaacatttttgacttggttcccatgcttgaaattctttattcatggttattatgtttttaccttgtgaaaataggttttctcttacatatttctcattacattttattcctgatactttaaattttaatccttggggtcctaataagtttgcctaattctctg

SEQ ID NO: 291842 - DNA, 1243 bp, Homo sapiens
tcagctcggtaccatctttgaatcatcaaaacgcaggtggaggcctcggaggagagcgccctcaaccacctccagaacccgggcgacgcggccgagggccgggcggccaagaggtgcgagaaggccgaggagaaggccaaggagattgcgaagatggcagagatgctggtggagctggtccggcggatagagaagagcgagtcgtcgtgagcgcggtcggcggtttccagccaatggattctggtcaactggtggagattggctgacaccctggagaagccgaaaccagagagccttttgttttctcttttttcctgtctatgctctgtctcacttaacactacgttttctgctatggtctgtggttgatgacctcaatatgagtttcgattgttaacgtgtttttgtttgggaagtaattttgtttgaaaatgctctcacatacaggaattagggcctagattgtaagctcttgcagcagtcacatttgttcccgggctttggtggttatttctaaatttttgaggtgctttgctatttcttgtgtgacctgatagctccctggaactttgggtctgtgtgtgacacatgagactcacagttggagttctccagctctggaggtgctgaaggagctgcattaattctggaagacgactccatgcagcaactactgaagaaaggaccagacttcaacggggagtgtggatgggccgacctggctgggactcgtgaatctggagaagagctggagaatggatagtattgtctgtatttggagactttaatttctgtgtgagaccaaaggaggagagatgtgttttgttcaaaatttaaatttgttgtggtacactatcttatgtaacctgtctggtgagtttgtttggacaacctaactcagctttatttgacatggaacctaaaatagaagataagatcttgatattctgtacaagttgatgtaataccctgatgcgttttagaggacttggcataaaatgaaagattggcaaaggcccttgaggggcttggggatgagagtatggaactgtctgcattggaccctaaactggactagaagaggcatcttcaaggttcatacgttgtccagctgtaagttcatttgagtagcagacctaacaaatatttgaggtcaaaaccctaccatgttaaaacaaacaaaaacttaccatgttaataaaagtattcatttgcttgaaaagacgaaagacctaaaaaaaat

SEQ ID NO: 291843 - DNA, 1471 bp, Homo sapiens
actcgattttgttcgccgttactctgcgcgtaagtcgcttgtccgtggcttctctgagaagaaaagttgaaaaagggtaaaagttttcaggaatattcgggctctctattgctaagcatagcgagtgtcggttttctctctccaacagacatcgctattgcggttccgaggcagtgggaagagatgcggcccctggacatcgtcgagctggcggaaccggaggaagtggaggtgctggagcccgaggaggatttcgagcagtttctgctcccggtcatcaacgagatgcgcgaggacatcgcgtcgctgacgcgcgagcacgggcgggcgtacctgcggaaccggagcaagctgtgggagatggacaatatgctcatccagatcaaaacgcaggtggaggcctcggaggagagcgccctcaaccacctccagaacccgggcgacgcggccgagggccgggcggccaagaggtgcgagaaggccgaggagaaggccaaggagattgcgaagatggcagagatgctggtggagctggtccggcggatagagaagagcgagtcgtcgtgagcgcggtcggcggtttccagccaatggattctggtcaactggtggagattggctgacaccctggagaagccgaaaccagagagccttttgttttctcttttttcctgtctatgctctgtctcacttaacactacgttttctgctatggtctgtggttgatgacctcaatatgagtttcgattgttaacgtgtttttgtttgggaagtaattttgtttgaaaatgctctcacatacaggaattagggcctagattgtaagctcttgcagcagtcacatttgttcccgggctttggtggttatttctaaatttttgaggtgctttgctatttcttgtgtgacctgatagctccctggaactttgggtctgtgtgtgacacatgagactcacagttggagttctccagctctggaggtaatggatagtattgtctgtatttggagactttaatttctgtgtgagaccaaaggaggagagatgtgttttgttcaaaatttaaatttgttgtggtacactatcttatgtaacctgtctggtgagtttgtttggacaacctaactcagctttatttgacatggaacctaaaatagaagataagatcttgatattctgtacaagttgatgtaataccctgatgcgttttagaggacttggcataaaatgaaagattggcaaaggcccttgaggggcttggggatgagagtatggaactgtctgcattggaccctaaactggactagaagaggcatcttcaaggttcatacgttgtccagctgtaagttcatttgagtagcagacctaacaaatatttgaggtcaaaaccctaccatgttaaaacaaacaaaaacttaccatgttaataaaagtattcatttgcttgaaaagacgaaagacctaaaaaaaat

SEQ ID NO: 291844 - DNA, 1760 bp, Homo sapiens
  misc_feature (1755)..(1756): n is a, c, g, or t
actcgattttgttcgccgttactctgcgcgtaagtcgcttgtccgtggcttctctgagaagaaaagttgaaaaagggtaaaagttttcaggaatattcgggctctctattgctaagcatagcgagtgtcggttttctctctccaacagacatcgctattgcggttccgaggcagtgggaagagatgcggcccctggacatcgtcgagctggcggaaccggaggaagtggaggtgctggagcccgaggaggatttcgagcagtttctgctcccggtcatcaacgagatgcgcgaggacatcgcgtcgctgacgcgcgagcacgggcgggcgtacctgcggaaccggagcaagctgtgggagatggacaatatgctcatccagatcaaaacgcaggtggaggcctcggaggagagcgccctcaaccacctccagaacccgggcgacgcggccgagggccgggcggccaagaggtgcgagaaggccgaggagaaggccaaggagattgcgaagatggcagagatgctggtggagctggtccggcggatagagaagagcgagtcgtcgtgagcgcggtcggcggtttccagccaatggattctggtcaactggtggagattggctgacaccctggagaagccgaaaccagagagccttttgttttctcttttttcctgtctatgctctgtctcacttaacactacgttttctgctatggtctgtggttgatgacctcaatatgagtttcgattgttaacgtgtttttgtttgggaagtaattttgtttgaaaatgctctcacatacaggaattagggcctagattgtaagctcttgcagcagtcacatttgttcccgggctttggtggttatttctaaatttttgaggtgctttgctatttcttgtgtgacctgatagctccctggaactttgggtctgtgtgtgacacatgagactcacagttggagttctccagctctggaggtgctgaaggagctgcattaattctggaagacgactccatgcagcaactactgaagaaaggaccagacttcaacggggagtgtggatgggccgacctggctgggactctcggagcattctggagaaagacctggtattgcatagtaattgctccgtaatggttggcgactgtaaggagcatggtgtgagacccatataggacggcagagatggcagtgcttgttcaaccagttccaaggtatttctcctggtactctattcgagtacatgcgccttgcctcttgctgagctgttgttctgaccaccttaaatcagcgtatgtatgacactgtaaccctgatatagatttgatacgatctagaatattcttgttacaagcttgattcttaatagccactgatcgcgctttgtacgaagcgatattggccatttagaatgaaaacgatcttgcaaatgcaccttgagggggcctaggggcgatagccatgtccataggacctgtactggcactggaccctcaagggcctttgccaatctttcgttttagaggacttggcataaaatgaaagattggcaaaggcccttgaggggcttggggatgagagtatggaactgtctgcattggaccctaaactggactagaagaggcatcttcaaggttcatacgttgtccagctgtaagttcatttgagtagcagacctaacaaatatttgaggtcaaaaccctaccatgttaaaactgatacttttattaacatggtaagtttttgttgtnnagcc

SEQ ID NO: 291845 - DNA, 1152 bp, Homo sapiens
aaatcgagctcggctacccatgcttcgatcgcgccgaggagaaggccaaggagattgcgaagatggcagagatgctggtggagctggtccggcggatagagaagagcgagtcgtcgtgagcgcggtcggcggtttccagccaatggattctggtcaactggtggagattggctgacaccctggagaagccgaaaccagagagccttttgttttctcttttttcctgtctatgctctgtctcacttaacactacgttttctgctatggtctgtggttgatgacctcaatatgagtttcgattgttaacgtgtttttgtttgggaagtaattttgtttgaaaatgctctcacatacaggaattagggcctagattgtaagctcttgcagcagtcacatttgttcccgggctttggtggttatttctaaatttttgaggtgctttgctatttcttgtgtgacctgatagctccctggaactttgggtctgtgtgtgacacatgagactcacagttggagttctccagctctggaggtgctgaaggagctgcattaattctggaagacgactccatgcagcaactactgaagaaaggaccagacttcaacggggagtgtggatgggccgacctggctgggactcgtgaatctggagaagagctggagaatggatagtattgtctgtatttggagactttaatttctgtgtgagaccaaaggaggagagatgtgttttgttcaaaatttaaatttgttgtggtacactatcttatgtaacctgtctggtgagtttgtttggacaacctaactcagctttatttgacatggaacctaaaatagaagataagatcttgatattctgtacaagttgatgtaataccctgatgcgttttagaggacttggcataaaatgaaagattggcaaaggcccttgaggggcttggggatgagagtatggaactgtctgcattggaccctaaactggactagaagaggcatcttcaaggttcatacgttgtccagctgtaagttcatttgagtagcagacctaacaaatatttgaggtcaaaaccctaccatgttaaaacaaacaaaaacttaccatgttaataaaagtattcatttgcttgaaaagacgaaagacctaaaaaaaat

SEQ ID NO: 291846 - DNA, 1141 bp, Homo sapiens
cgatctagagctccccctatgtccgaggagaaggccaaggagattgcgaagatggcagagatgctggtggagctggtccggcggatagagaagagcgagtcgtcgtgagcgcggtcggcggtttccagccaatggattctggtcaactggtggagattggctgacaccctggagaagccgaaaccagagagccttttgttttctcttttttcctgtctatgctctgtctcacttaacactacgttttctgctatggtctgtggttgatgacctcaatatgagtttcgattgttaacgtgtttttgtttgggaagtaattttgtttgaaaatgctctcacatacaggaattagggcctagattgtaagctcttgcagcagtcacatttgttcccgggctttggtggttatttctaaatttttgaggtgctttgctatttcttgtgtgacctgatagctccctggaactttgggtctgtgtgtgacacatgagactcacagttggagttctccagctctggaggtgctgaaggagctgcattaattctggaagacgactccatgcagcaactactgaagaaaggaccagacttcaacggggagtgtggatgggccgacctggctgggactcgtgaatctggagaagagctggagaatggatagtattgtctgtatttggagactttaatttctgtgtgagaccaaaggaggagagatgtgttttgttcaaaatttaaatttgttgtggtacactatcttatgtaacctgtctggtgagtttgtttggacaacctaactcagctttatttgacatggaacctaaaatagaagataagatcttgatattctgtacaagttgatgtaataccctgatgcgttttagaggacttggcataaaatgaaagattggcaaaggcccttgaggggcttggggatgagagtatggaactgtctgcattggaccctaaactggactagaagaggcatcttcaaggttcatacgttgtccagctgtaagttcatttgagtagcagacctaacaaatatttgaggtcaaaaccctaccatgttaaaacaaacaaaaacttaccatgttaataaaagtattcatttgcttgaaaagacgaaagacctaaaaaaaat

SEQ ID NO: 291847 - DNA, 1043 bp, Homo sapiens
actcgattttgttcgccgttactctgcgcgtaagtcgcttgtccgtggcttctctgagaagaaaagttgaaaaagggtaaaagttttcaggaatattcgggctctctattgctaagcatagcgagtgtcggttttctctctccaacagacatcgctattgcggttccgaggcagtgggaagagatgcggcccctggacatcgtcgagctggcggaaccggaggaagtggaggtgctggagcccgaggaggatttcgagcagtttctgctcccggtcatcaacgagatgcgcgaggacatcgcgtcgctgacgcgcgagcacgggcgggcgtacctgcggaaccggagcaagctgtgggagatggacaatatgctcatccagatcaaaacgcaggtggaggcctcggaggagagcgccctcaaccacctccagaacccgggcgacgcggccgagggccgggcggccaagaggtgcgagaaggccgaggagaaggccaaggagattgcgaagatggcagagatgctggtggagctggtccggcggatagagaagagcgagtcgtcgtgagcgcggtcggcggtttccagccaatggattctggtcaactggtggagattggctgacaccctggagaagccgaaaccagagagccttttgttttctcttttttcctgtctatgctctgtctcacttaacactacgttttctgctatggtctgtggttgatgacctcaatatgagtttcgattgttaacgtgtttttgtttgggaagtaattttgtttgaaaatgctctcacatacaggaattagggcctagattgtaagctcttgcagcagtcacatttgttcccgggctttggtggttatttctaaatttttgaggtgctttgctatttcttgtgtgacctgatagctccctggaactttgggtctgtgtgtgacacatgagactcacagttggagttctccagctctggaggtgcctactttatatctacatagcgtgattgcgattgccggattactagggttacctcaaggt

SEQ ID NO: 291848 - DNA, 959 bp, Homo sapiens
cggacgcgtgggtcgacggacgcgtgggcgacccacgcgttctgtctcacttaacactacgttttctgctatggtctgtggttgatgacctcaatatgagtttcgattgttaacgtgtttttgtttgggaagtaattttgtttgaaaatgctctcacatacaggaattagggcctagattgtaagctcttgcagcagtcacatttgttcccgggctttggtggttatttctaaatttttgaggtgctttgctatttcttgtgtgacctgatagctccctggaactttgggtctgtgtgtgacacatgagactcacagttggagttctccagctctggaggtgctgaaggagctgcattaattctggaagacgactccatgcagcaactactgaagaaaggaccagacttcaacggggagtgtggatgggccgacctggctgggactcgtgaatctggagaagagctggagaatggatagtattgtctgtatttggagactttaatttctgtgtgagaccaaaggaggagagatgtgttttgttcaaaatttaaatttgttgtggtacactatcttatgtaacctgtctggtgagtttgtttggacaacctaactcagctttatttgacatggaacctaaaatagaagataagatcttgatattctgtacaagttgatgtaataccctgatgcgttttagaggacttggcataaaatgaaagattggcaaaggcccttgaggggcttggggatgagagtatggaactgtctgcattggaccctaaactggactagaagaggcatcttcaaggttcatacgttgtccagctgtaagttcatttgagtagcagacctaacaaatatttgaggtcaaaaccctaccatgttaaaacaaacaaaaacttaccatgttaataaaagtattcatttgcttgaaaagacgaaagacctaaaaaaaat

SEQ ID NO: 291849 - DNA, 1558 bp, Homo sapiens
actcgattttgttcgccgttactctgcgcgtaagtcgcttgtccgtggcttctctgagaagaaaagttgaaaaagggtaaaagttttcaggaatattcgggctctctattgctaagcatagcgagtgtcggttttctctctccaacagacatcgctattgcggttccgaggcagtgggaagagatgcggcccctggacatcgtcgagctggcggaaccggaggaagtggaggtgctggagcccgaggaggatttcgagcagtttctgctcccggtcatcaacgagatgcgcgaggacatcgcgtcgctgacgcgcgagcacgggcgggcgtacctgcggaaccggagcaagctgtgggagatggacaatatgctcatccagatcaaaacgcaggtggaggcctcggaggagagcgccctcaaccacctccagaacccgggcgacgcggccgagggccgggcggccaagaggtgcgagaaggccgaggagaaggccaaggagattgcgaagatggcagagatgctggtggagctggtccggcggatagagaagagcgagtcgtcgtgagcgcggtcggcggtttccagccaatggattctggtcaactggtggagattggctgacaccctggagaagccgaaaccagagagccttttgttttctcttttttcctgtctatgctctgtctcacttaacactacgttttctgctatgtgtttttgtttgggaagtaattttgtttgaaaatgctctcacatacaggaattagggcctagattgtaagctcttgcagcagtcacatttgttcccgggctttggtggttatttctaaatttttgaggtgctttgctatttcttgtgtgacctgatagctccctggaactttgggtctgtgtgtgacacatgagactcacagttggagttctccagctctggaggtgctgaaggagctgcattaattctggaagacgactccatgcagcaactactgaagaaaggaccagacttcaacggggagtgtggatgggccgacctggctgggactcgtgaatctggagaagagctggagaatggatagtattgtctgtatttggagactttaatttctgtgtgagaccaaaggaggagagatgtgttttgttcaaaatttaaatttgttgtggtacactatcttatgtaacctgtctggtgagtttgtttggacaacctaactcagctttatttgacatggaacctaaaatagaagataagatcttgatattctgtacaagttgatgtaataccctgatgcgttttagaggacttggcataaaatgaaagattggcaaaggcccttgaggggcttggggatgagagtatggaactgtctgcattggaccctaaactggactagaagaggcatcttcaaggttcatacgttgtccagctgtaagttcatttgagtagcagacctaacaaatatttgaggtcaaaaccctaccatgttaaaacaaacaaaaacttaccatgttaataaaagtattcatttgcttgaaaagacgaaagacctaaaaaaaat

SEQ ID NO: 291850 - DNA, 1238 bp, Homo sapiens
  misc_feature (83)..(83): n is a, c, g, or t
  misc_feature (143)..(143): n is a, c, g, or t
ggccaacgaaagggtgattacacctccggaatccctccgcagccctctccgcctccgacgtcttggccagctgggaagatggnaaacttcttggagatggattatggtgatggctggaccacccatgagaaagtgaccttatnccctggattgcgataattaaaaatgggtaaactggccacgtttatgttataaataaatgtaccccccttaaaacccagtggaccttaaaattccctggaggagcccatatgggaaaaggactaaatgttgtaaaaaaaaaaagcccaccttttttttttaatccagagataagtacttagctgcaagctcaaggtctcgggtgaggacggtctgtggttgatgacctcaatatgagtttcgattgttaacgtgtttttgtttgggaagtaattttgtttgaaaatgctctcacatacaggaattagggcctagattgtaagctcttgcagcagtcacatttgttcccgggctttggtggttatttctaaatttttgaggtgctttgctatttcttgtgtgacctgatagctccctggaactttgggtctgtgtgtgacacatgagactcacagttggagttctccagctctggaggtgctgaaggagctgcattaattctggaagacgactccatgcagcaactactgaagaaaggaccagacttcaacggggagtgtggatgggccgacctggctgggactcgtgaatctggagaagagctggagaatggatagtattgtctgtatttggagactttaatttctgtgtgagaccaaaggaggagagatgtgttttgttcaaaatttaaatttgttgtggtacactatcttatgtaacctgtctggtgagtttgtttggacaacctaactcagctttatttgacatggaacctaaaatagaagataagatcttgatattctgtacaagttgatgtaataccctgatgcgttttagaggacttggcataaaatgaaagattggcaaaggcccttgaggggcttggggatgagagtatggaactgtctgcattggaccctaaactggactagaagaggcatcttcaaggttcatacgttgtccagctgtaagttcatttgagtagcagacctaacaaatatttgaggtcaaaaccctaccatgttaaaacaaacaaaaacttaccatgttaataaaagtattcatttgcttgaaaagacgaaagacctaaaaaaaat

SEQ ID NO: 291851 - DNA, 829 bp, Homo sapiens
ctgatctagaggacccgagttatccacatacaggaattagggcctagattgtaagctcttgcagcagtcacatttgttcccgggctttggtggttatttctaaatttttgaggtgctttgctatttcttgtgtgacctgatagctccctggaactttgggtctgtgtgtgacacatgagactcacagttggagttctccagctctggaggtgctgaaggagctgcattaattctggaagacgactccatgcagcaactactgaagaaaggaccagacttcaacggggagtgtggatgggccgacctggctgggactcgtgaatctggagaagagctggagaatggatagtattgtctgtatttggagactttaatttctgtgtgagaccaaaggaggagagatgtgttttgttcaaaatttaaatttgttgtggtacactatcttatgtaacctgtctggtgagtttgtttggacaacctaactcagctttatttgacatggaacctaaaatagaagataagatcttgatattctgtacaagttgatgtaataccctgatgcgttttagaggacttggcataaaatgaaagattggcaaaggcccttgaggggcttggggatgagagtatggaactgtctgcattggaccctaaactggactagaagaggcatcttcaaggttcatacgttgtccagctgtaagttcatttgagtagcagacctaacaaatatttgaggtcaaaaccctaccatgttaaaacaaacaaaaacttaccatgttaataaaagtattcatttgcttgaaaagacgaaagacctaaaaaaaat

SEQ ID NO: 291852 - DNA, 715 bp, Homo sapiens
gtgattctagcaggatccttaactgatagctccctggaactttgggtctgtgtgtgacacatgagactcacagttggagttctccagctctggaggtgctgaaggagctgcattaattctggaagacgactccatgcagcaactactgaagaaaggaccagacttcaacggggagtgtggatgggccgacctggctgggactcgtgaatctggagaagagctggagaatggatagtattgtctgtatttggagactttaatttctgtgtgagaccaaaggaggagagatgtgttttgttcaaaatttaaatttgttgtggtacactatcttatgtaacctgtctggtgagtttgtttggacaacctaactcagctttatttgacatggaacctaaaatagaagataagatcttgatattctgtacaagttgatgtaataccctgatgcgttttagaggacttggcataaaatgaaagattggcaaaggcccttgaggggcttggggatgagagtatggaactgtctgcattggaccctaaactggactagaagaggcatcttcaaggttcatacgttgtccagctgtaagttcatttgagtagcagacctaacaaatatttgaggtcaaaaccctaccatgttaaaacaaacaaaaacttaccatgttaataaaagtattcatttgcttgaaaagacgaaagacctaaaaaaaat

SEQ ID NO: 291853 - DNA, 1212 bp, Homo sapiens
actcgattttgttcgccgttactctgcgcacatcgctattgcggttccgaggcagtgggaagagatgcggcccctggacatcgtcgagctggcggaaccggaggaagtggaggtgctggagcccgaggaggatttcgagcagtttctgctcccggtcatcaacgagatgcgcgaggacatcgcgtcgctgacgcgcgagcacgggcgggcgtacctgcggaaccggagcaagctgtgggagatggacaatatgctcatccagatcaaaacgcaggtggaggcctcggaggagagcgccctcaaccacctccagaacccgggcgacgcggccgagggccgggcggccaagaggtgcgagaaggccgaggagaaggccaaggagattgcgaagatggcagagatgctggtggagctggtccggcggatagagaagagcgagtcgtcgtgagcgcggtcggcggtttccagccaatggattctggtcaactggtggagattggctgacaccctggagaagccgaaaccagagagccttttgttttctcttttttcctgtctatgctctgtctcacttaacactacgttttctgctatgctgaaggagctgcattaattctggaagacgactccatgcagcaactactgaagaaaggaccagacttcaacggggagtgtggatgggccgacctggctgggactcgtgaatctggagaagagctggagaatggatagtattgtctgtatttggagactttaatttctgtgtgagaccaaaggaggagagatgtgttttgttcaaaatttaaatttgttgtggtacactatcttatgtaacctgtctggtgagtttgtttggacaacctaactcagctttatttgacatggaacctaaaatagaagataagatcttgatattctgtacaagttgatgtaataccctgatgcgttttagaggacttggcataaaatgaaagattggcaaaggcccttgaggggcttggggatgagagtatggaactgtctgcattggaccctaaactggactagaagaggcatcttcaaggttcatacgttgtccagctgtaagttcatttgagtagcagacctaacaaatatttgaggtcaaaaccctaccatgttaaaacaaacaaaaacttaccatgttaataaaagtattcatttgcttgaaaagacgaaagacctaaaaaaaat

SEQ ID NO: 291854 - DNA, 1099 bp, Homo sapiens
actcgattttgttcgccgttactctgcgcgtaagtcgcttgtccgtggcttctctgagaagaaaagttgaaaaagggtaaaagttttcaggaatattcgggctctctattgctaagcatagcgagtgtcggttttctctctccaacagacatcgctattgcggttccgaggcagtgggaagagatgcggcccctggacatcgtcgagctggcggaaccggaggaagtggaggtgctggagcccgaggaggatttcgagcagtttctgctcccggtcatcaacgagatgcgcgaggacatcgcgtcgctgacgcgcgagcacgggcgggcgtacctgcggaaccggagcaagctgtgggagatggacaatatgctcatccagatcaaaacgcaggtggaggcctcggaggagagcgccctcaaccacctccagaacccgggcgacgcggccgagggccgggcggccaagaggtgcgagaagggctgaaggagctgcattaattctggaagacgactccatgcagcaactactgaagaaaggaccagacttcaacggggagtgtggatgggccgacctggctgggactcgtgaatctggagaagagctggagaatggatagtattgtctgtatttggagactttaatttctgtgtgagaccaaaggaggagagatgtgttttgttcaaaatttaaatttgttgtggtacactatcttatgtaacctgtctggtgagtttgtttggacaacctaactcagctttatttgacatggaacctaaaatagaagataagatcttgatattctgtacaagttgatgtaataccctgatgcgttttagaggacttggcataaaatgaaagattggcaaaggcccttgaggggcttggggatgagagtatggaactgtctgcattggaccctaaactggactagaagaggcatcttcaaggttcatacgttgtccagctgtaagttcatttgagtagcagacctaacaaatatttgaggtcaaaaccctaccatgttaaaacaaacaaaaacttaccatgttaataaaagtattcatttgcttgaaaagacgaaagacctaaaaaaaat

SEQ ID NO: 291855 - DNA, 764 bp, Homo sapiens
actcgattttgttcgccgttactctgcgcgtaagtcgcttgtccgtggcttctctgagaagaaaagttgaaaaagggtaaaagttttcaggaatattcgggctctctattgctaagcatagcgagtgtcggttttctctctccaacagacatcgctattgcggttccgaggcagtgggaagagatgcggcccctggacatcgtcgagctggcggaaccggaggaagtggaggtgctggagcccgaggaggatttcgagcagtttctgctcccggtcatcaacgagatgcgcgaggacatcgcgtcgctgacgcgcgagcacgggcgggcgtacctgcggaaccggagcaagctgtgggagatggacaatatgctcatccagatcaaaacgcaggtggaggcctcggaggagagcgccctcaaccacctccagaacccgggcgacgcggccgagggccgggcggccaagaggtgcgagaaggccgaggagaaggccaaggagattgcgaagatggcagagatgctggtggagctggtccggcggatagagaagagcgagtcgtcgtgagcgcggtcggcggtttccagccaatggattctggtcaactggtggagattggctgacaccctggagaagccgaaaccagagagccttttgttttctcttttttcctgtctatgctctgtctcacttaacactacgttttctgctatccgccgatgactcacgacatgacggtcaatcttttcctgcttcccgagccg

SEQ ID NO: 291856 - DNA, 2363 bp, Homo sapiens
agcggaggctcgtccccggcggtcgcggccgcccgcgcgccggcggcccagcaacaggcgcaaagttgaggaaaggcccagccgccacgggccgccctcgacccgcccctgggccccgcctcctgcgagcggcggaggcggggccgcgcggttgccggagcgacgcgcagtgtttggggtcaccgggcgtccccgggcgcggccatggcaaggccgcagccgtgcgggcccccgcacgctaggtgcggctcgccgtcgctgccggagcggccgctgcaggtgaaggtggtggggctcttcagctgccccaactttcagattgcgaagagcgccgctgagaatctgaagaataatcatccatccaaatttgaagatcctatattagttcctcttcaagaatttgcatggcatcaatatctacaggagaaaaaaagggaactcaaaaatgaaacctgggaatattcttcctctgtgatttcttttgttaatggtcagtttctgggtgatgcattggatctgcagaaatgggcccacgaggtgtgggatatagttgacattaaaccctctgcactttatgacgcactcactgaggatttttccgctaagttcttaagagacaccaagcatgatttcgtgtttttggacatttgtattgattcttctccaattggaagattgatttttgagctatactgtgatgtgtgtcccaaaacatgtaaaaattttcaggtcttgtgcacaggaaaagcagggttttctcaacgtggcataagactacattacaaaaattccatttttcatcgaatagtacagaatggctggatacaaggaggggatatagtgtatggaaaaggagataatggagagtcgatttatggtccaacatttgaagatgaaaacttttcagttcctcataataaaagaggagtacttggaatggccaacaaaggccgtcacagcaacgggtcacaattctatatcacactgcaagcaactccttatctagatagaaaatttgtggcttttgggcaactgattgaaggaacagaagtgcttaaacaactagaattagttccaacacagaatgaaagaccaatacatatgtgtagaattactgacagtggagatccttatgcttgattttcatatcaatattttctgtgataatttattactttgtatctgatcagctgtttgtggatttaattaaaaagtacttgataaattgtaatttgaaagccgtggcagacactgtaggttgcctcatctacacccaatccctccccatcttcctttcctgtctctgtcatagagactgtgaaagggtggtactcaatttcctagactcctttgcagccacgggtggccatgagagatggttctggccagtgggacaggaatagaacgccagtggtcctgccccttccccttcatccagtctggaatgtggagaggctggagctacagctgtcatcttgtggccataaagaaaaggctgaggccaggtgtggtagctcacgcctgtaatcccaaagtgctgagattacaaaggcgtgagccaccgcacccggctgagagtgcttttcttaccctaagcagaatgaggtttgtcttccaagaacaatctctatttacatcagtcttaaagaggcaggcttctaatggatatgaggcttgccaaaagtaggcgtaggcttttttaactttttattttgaaatatagattcacaggaagttgcaaaaatagtacagagcagtcctgtgtacctttcacccattttccccagtggctacgcttacaaaacggtagtacaatatcaaaccaggcagctgacattggtacaatgtgtgtgatgccattttatcatgagtatattcatgtaaccaacactatagagaaaatatagaacctttccagcacctcaaagacccccttccagtacccctttacagtcaacccactcccctgccctctgccatccctaactcctgacaactggcatttgcttttccttttaatgacagctttattgctatatgacatatgctttatgctaagacctgaggtggatgggaggaagcagaccgcctatgttacattctcaactgacccagagcaacatagtgttaagaatgtgtgttctagggccagaatcctggctttgccattccctagctgcacaaactcaggcaagaacttttctgtgcctcaattccttcatctgagaaacagtggtacctaccacataagattgctgtgagggttccatgaatcaataatttctataaagaacctataagagacctggtctgctgtaagcactcgataaatttaataataaattactaatgtgtaaccttca

SEQ ID NO: 291857 - DNA, 1967 bp, Homo sapiens
agcggaggctcgtccccggcggtcgcggccgcccgcgcgccggcggcccagcaacaggcgcaaagttgaggaaaggcccagccgccacgggccgccctcgacccgcccctgggccccgcctcctgcgagcggcggaggcggggccgcgcggttgccggagcgacgcgcagtgtttggggtcaccgggcgtccccgggcgcggccatggcaaggccgcagccgtgcgggcccccgcacgctaggtgcggctcgccgtcgctgccggagcggccgctgcaggtgaaggtggtggggctcttcagctgccccaactttcagattgcgaagagcgccgctgagaatctgaagaataatcatccatccaaatttgaagatcctatattagttcctcttcaagaatttgcatggcatcaatatctacaggagaaaaaaagggaactcaaaaatgaaacctgggaatattcttcctctgtgatttcttttgttaatggtcagtttctgggtgatgcattggatctgcagaaatgggcccacgaggtgtgggatatagttgacattaaaccctctgcactttatgacgcactcactgaggatttttccgctaagttcttaagagacaccaagcatgatttcgtgtttttggacatttgtattgattcttctccaattggaagattgatttttgagctatactgtgatgtgtgtcccaaaacatgtaaaaattttcaggtcttgtgcacaggaaaagcagggttttctcaacgtggcataagactacattacaaaaattccatttttcatcgaatagtacagaatggctggatacaaggaggggatatagtgtatggaaaaggagataatggagagtcgatttatggtccaacatttgaagatgaaaacttttcagttcctcataataaaagaggagtacttggaatggccaacaaaggccgtcacagcaacgggtcacaattctatatcacactgcaagcaactccttatctagatagaaaatttgtggcttttgggcaactgattgaaggaacagaagtgcttaaacaactagaattagttccaacacagaatgaaagaccaatacatatgtgtagaattactgacagtggagatccttatgcttgattttcatatcaatattttctgtgataatttattactttgtatctgatcagctgtttgtggatttaattaaaaagtacttgataaattgtaatttgaaagccgtggcagacactgtaggttgcctcatctacacccaatccctccccatcttcctttcctgtctctgtcatagagactgtgaaagggtggtactcaatttcctagactcctttgcagccacgggtggccatgagagatggttctggccagtgggacaggaatagaacgccagtggtcctgccccttccccttcatccagtctggaatgtggagaggctggagctacagctgtcatcttgtggccataaagaaaaggctgaggccaggtgtggtagctcacgcctgtaatcccagcacttgggaggccgaggcaggtggatcacaagatcaagagattgagaccatcctggccaacatggtgaaaccctgtctctactaaaactacagaaattagctgggcatggtggcatgcacttgtagtcccagctacttgggaagctgaggcagaagaatctcttgaacccgggaggcggaggttgcagtgagccgagatgccgccactgcactccagcctggcgacagagagagactgtctcaaaaaaaaagaaaggccaagtactgcagagatgtcagccccagtctcttgagctgcgggaccaataccagcaaccacctactctggacttcttattataggagactaacagagccctgtgttgtgttgtttatgttactgttggttgagaattttgttacttgtggacaaaaaattcttaatttagcaacac

SEQ ID NO: 291858 - DNA, 2267 bp, Homo sapiens
agcggaggctcgtccccggcggtcgcggccgcccgcgcgccggcggcccagcaacaggcgcaaagttgaggaaaggcccagccgccacgggccgccctcgacccgcccctgggccccgcctcctgcgagcggcggaggcggggccgcgcggttgccggagcgacgcgcagtgtttggggtcaccgggcgtccccgggcgcggccatggcaaggccgcagccgtgcgggcccccgcacgctaggtgcggctcgccgtcgctgccggagcggccgctgcaggtgaaggtggtggggctcttcagctgccccaactttcagattgcgaagagcgccgctgaggaactcaaaaatgaaacctgggaatattcttcctctgtgatttcttttgttaatggtcagtttctgggtgatgcattggatctgcagaaatgggcccacgaggtgtgggatatagttgacattaaaccctctgcactttatgacgcactcactgaggatttttccgctaagttcttaagagacaccaagcatgatttcgtgtttttggacatttgtattgattcttctccaattggaagattgatttttgagctatactgtgatgtgtgtcccaaaacatgtaaaaattttcaggtcttgtgcacaggaaaagcagggttttctcaacgtggcataagactacattacaaaaattccatttttcatcgaatagtacagaatggctggatacaaggaggggatatagtgtatggaaaaggagataatggagagtcgatttatggtccaacatttgaagatgaaaacttttcagttcctcataataaaagaggagtacttggaatggccaacaaaggccgtcacagcaacgggtcacaattctatatcacactgcaagcaactccttatctagatagaaaatttgtggcttttgggcaactgattgaaggaacagaagtgcttaaacaactagaattagttccaacacagaatgaaagaccaatacatatgtgtagaattactgacagtggagatccttatgcttgattttcatatcaatattttctgtgataatttattactttgtatctgatcagctgtttgtggatttaattaaaaagtacttgataaattgtaatttgaaagccgtggcagacactgtaggttgcctcatctacacccaatccctccccatcttcctttcctgtctctgtcatagagactgtgaaagggtggtactcaatttcctagactcctttgcagccacgggtggccatgagagatggttctggccagtgggacaggaatagaacgccagtggtcctgccccttccccttcatccagtctggaatgtggagaggctggagctacagctgtcatcttgtggccataaagaaaaggctgaggccaggtgtggtagctcacgcctgtaatcccaaagtgctgagattacaaaggcgtgagccaccgcacccggctgagagtgcttttcttaccctaagcagaatgaggtttgtcttccaagaacaatctctatttacatcagtcttaaagaggcaggcttctaatggatatgaggcttgccaaaagtaggcgtaggcttttttaactttttattttgaaatatagattcacaggaagttgcaaaaatagtacagagcagtcctgtgtacctttcacccattttccccagtggctacgcttacaaaacggtagtacaatatcaaaccaggcagctgacattggtacaatgtgtgtgatgccattttatcatgagtatattcatgtaaccaacactatagagaaaatatagaacctttccagcacctcaaagacccccttccagtacccctttacagtcaacccactcccctgccctctgccatccctaactcctgacaactggcatttgcttttccttttaatgacagctttattgctatatgacatatgctttatgctaagacctgaggtggatgggaggaagcagaccgcctatgttacattctcaactgacccagagcaacatagtgttaagaatgtgtgttctagggccagaatcctggctttgccattccctagctgcacaaactcaggcaagaacttttctgtgcctcaattccttcatctgagaaacagtggtacctaccacataagattgctgtgagggttccatgaatcaataatttctataaagaacctataagagacctggtctgctgtaagcactcgataaatttaataataaattactaatgtgtaaccttca

SEQ ID NO: 291859 - DNA, 1735 bp, Homo sapiens
agcggaggctcgtccccggcggtcgcggccgcccgcgcgccggcggcccagcaacaggcgcaaagttgaggaaaggcccagccgccacgggccgccctcgacccgcccctgggccccgcctcctgcgagcggcggaggcggggccgcgcggttgccggagcgacgcgcagtgtttggggtcaccgggcgtccccgggcgcggccatggcaaggccgcagccgtgcgggcccccgcacgctaggtgcggctcgccgtcgctgccggagcggccgctgcaggtgaaggtggtggggctcttcagctgccccaactttcagattgcgaagagcgccgctgaggaactcaaaaatgaaacctgggaatattcttcctctgtgatttcttttgttaatggtcagtttctgggtgatgcattggatctgcagaaatgggcccacgaggtgtgggatatagttgacattaaaccctctgcactttatgacgcactcactgaggatttttccgctaagttcttaagagacaccaagcatgatttcgtgtttttggacatttgtattgattcttctccaattggaagattgatttttgagctatactgtgatgtgtgtcccaaaacatgtaaaaattttcaggtcttgtgcacaggaaaagcagggttttctcaacgtggcataagactacattacaaaaattccatttttcatcgaatagtacagaatggctggatacaaggaggggatatagtgtatggaaaaggagataatggagagtcgatttatggtccaacatttgaaggcaactgattgaaggaacagaagtgcttaaacaactagaattagttccaacacagaatgaaagaccaatacatatgtgtagaattactgacagtggagatccttatgcttgattttcatatcaatattttctgtgataatttattactttgtatctgatcagctgtttgtggatttaattaaaaagtacttgataaattgtaatttgaaagccgtggcagacactgtaggttgcctcatctacacccaatccctccccatcttcctttcctgtctctgtcatagagactgtgaaagggtggtactcaatttcctagactcctttgcagccacgggtggccatgagagatggttctggccagtgggacaggaatagaacgccagtggtcctgccccttccccttcatccagtctggaatgtggagaggctggagctacagctgtcatcttgtggccataaagaaaaggctgaggccaggtgtggtagctcacgcctgtaatcccagcacttgggaggccgaggcaggtggatcacaagatcaagagattgagaccatcctggccaacatggtgaaaccctgtctctactaaaactacagaaattagctgggcatggtggcatgcacttgtagtcccagctacttgggaagctgaggcagaagaatctcttgaacccgggaggcggaggttgcagtgagccgagatgccgccactgcactccagcctggcgacagagagagactgtctcaaaaaaaaagaaaggccaagtactgcagagatgtcagccccagtctcttgagctgcgggaccaataccagcaaccacctactctggacttcttattataggagactaacagagccctgtgttgtgttgtttatgttactgttggttgagaattttgttacttgtggacaaaaaattcttaatttagcaacac

SEQ ID NO: 291860 - DNA, 310 bp, Homo sapiens
ttcaggtcttgtgcacaggaaaagcagggttttctcaacgtggcataagactacattacaaaaattccatttttcatcgaatagtacagaatggctggatacaaggagggggtaagtttaaaatcttaaatacgagttaattgcaatatcaaatgagaaggtccaaactttcatttatctttatgaaatgtatgtagaattagatatacttaaaattagacgtatttaaagaatgctttatatagccaaataatgaagtaagatatttgtattctttaaaaaacaccctaattattaaaataaataaatc

SEQ ID NO: 291861 - DNA, 707 bp, Homo sapiens
agcggaggctcgtccccggcggtcgcggccgcccgcgcgccggcggcccagcaacaggcgcaaagttgaggaaaggcccagccgccacgggccgccctcgacccgcccctgggccccgcctcctgcgagcggcggaggcggggccgcgcggttgccggagcgacgcgcagtgtttggggtcaccgggcgtccccgggcgcggccatggcaaggccgcagccgtgcgggcccccgcacgctaggtgcggctcgccgtcgctgccggagcggccgctgcaggtgaaggtggtggggctcttcagctgccccaactttcagattgcgaagagcgccgctgaggtaaccacagagaaacctccgtcgtgggcggccctcccggctacccgctctcggccgcgtggactgcaggcgccgcgcctcctcgaggcggcgggggtcgaggccccaccggccgaggaaggggctggcgtgtcctggccgggcgggctccgtctggaggaccgggaggagagtataggggggcaagtgcgggtccgggggcgggcgttccacttggcgacttttaaagggagaactgagcgaaggaagggttcagaaccgcgctgggagataaggtaatcccctccgagacacacacacacacacccgcagattttgttctacgtcaattttttctttaattagagatatttaaatttatggaaaaa

SEQ ID NO: 291862 - DNA, 2309 bp, Homo sapiens
agcggaggctcgtccccggcggtcgcggccgcccgcgcgccggcggcccagcaacaggcgcaaagttgaggaaaggcccagccgccacgggccgccctcgacccgcccctgggccccgcctcctgcgagcggcggaggcggggccgcgcggttgccggagcgacgcgcagtgtttggggtcaccgggcgtccccgggcgcggccatggcaaggccgcagccgtgcgggcccccgcacgctaggtgcggctcgccgtcgctgccggagcggccgctgcaggtgaaggtggtggggctcttcagctgccccaactttcagattgcgaagagcgccgctgagaatctgaagaataatcatccatccaaatttgaagatcctatattagttcctcttcaagaatttgcatggcatcaatatctacaggagaaaaaaagggaactcaaaaatgaaacctgggaatattcttcctctgtgatttcttttgttaatggtcagtttctgggtgatgcattggatctgcagaaatgggcccacgaggtgtgggatatagttgacattaaaccctctgcactttatgacgcactcactgaggatttttccgctaagttcttaagagacaccaagcatgatttcgtgtttttggacatttgtattgattcttctccaattggaagattgatttttgagctatactgtgatgtgtgtcccaaaacatgtaaaaattttcaggtcttgtgcacaggaaaagcagggttttctcaacgtggcataagactacattacaaaaattccatttttcatcgaatagtacagaatggctggatacaaggaggggatatagtgtatggaaaaggagataatggagagtcgatttatggtccaacatttgaagatgaaaacttttcagttcctcataataaaagaggagtacttggaatggccaacaaaggccgtcacagcaacgggtcacaattctatatcacactgcaagcaactccttatctagatagaaaatttgtggcttttgggcaactgattgaaggaacagaagtgcttaaacaactagaattagttccaacacagaatgaaagaccaatacatatgtgtagaattactgacagtggagatccttatgcttgattttcatatcaatattttctgtgataatttattactttgtatctgatcagctgtttgtggatttaattaaaaagtacttgataaattgtaatttgaaagccgtggcagacactgtaggttgcctcatctacacccaatccctccccatcttcctttcctgtctctgtcatagagactgtgaaagggtggtactcaatttcctagactcctttgcagccacgggtggccatgagagatggttctggccagtgggacaggaatagaacgccagtggtcctgccccttccccttcatccagtctggaatgtggagaggctggagctacagctgtcatcttgtggccataaagaaaaggctgaggccaggtgtggtagctcacgcctgtaatcccaaagtgctgagattacaaaggcgtgagccaccgcacccggctgagagtgcttttcttaccctaagcagaatgaggtttgtcttccaagaacaatctctatttacatcagtcttaaagaggcaggcttctaatggatatgaggcttgccaaaagtaggcgtaggcttttttaactttttattttgaaatatagattcacaggaagttgcaaaaatagtacagagcagtcctgtgtacctttcacccattttccccagtggctacgcttacaaaacggtagtacaatatcaaaccaggcagctgacattggtacaatgtgtgtgatgccattttatcatgagtatattcatgtaaccaacactatagagaaaatatagaacctttccagcacctcaaagacccccttccagtacccctttacagtcaaccttttaatgacagctttattgctatatgacatatgctttatgctaagacctgaggtggatgggaggaagcagaccgcctatgttacattctcaactgacccagagcaacatagtgttaagaatgtgtgttctagggccagaatcctggctttgccattccctagctgcacaaactcaggcaagaacttttctgtgcctcaattccttcatctgagaaacagtggtacctaccacataagattgctgtgagggttccatgaatcaataatttctataaagaacctataagagacctggtctgctgtaagcactcgataaatttaataataaattactaatgtgtaaccttca

SEQ ID NO: 291863 - DNA, 1831 bp, Homo sapiens
agcggaggctcgtccccggcggtcgcggccgcccgcgcgccggcggcccagcaacaggcgcaaagttgaggaaaggcccagccgccacgggccgccctcgacccgcccctgggccccgcctcctgcgagcggcggaggcggggccgcgcggttgccggagcgacgcgcagtgtttggggtcaccgggcgtccccgggcgcggccatggcaaggccgcagccgtgcgggcccccgcacgctaggtgcggctcgccgtcgctgccggagcggccgctgcaggtgaaggtggtggggctcttcagctgccccaactttcagattgcgaagagcgccgctgagaatctgaagaataatcatccatccaaatttgaagatcctatattagttcctcttcaagaatttgcatggcatcaatatctacaggagaaaaaaagggaactcaaaaatgaaacctgggaatattcttcctctgtgatttcttttgttaatggtcagtttctgggtgatgcattggatctgcagaaatgggcccacgaggtgtgggatatagttgacattaaaccctctgcactttatgacgcactcactgaggatttttccgctaagttcttaagagacaccaagcatgatttcgtgtttttggacatttgtattgattcttctccaattggaagattgatttttgagctatactgtgatgtgtgtcccaaaacatgtaaaaattttcaggtcttgtgcacaggaaaagcagggttttctcaacgtggcataagactacattacaaaaattccatttttcatcgaatagtacagaatggctggatacaaggaggggatatagtgtatggaaaaggagataatggagagtcgatttatggtccaacatttgaaggcaactgattgaaggaacagaagtgcttaaacaactagaattagttccaacacagaatgaaagaccaatacatatgtgtagaattactgacagtggagatccttatgcttgattttcatatcaatattttctgtgataatttattactttgtatctgatcagctgtttgtggatttaattaaaaagtacttgataaattgtaatttgaaagccgtggcagacactgtaggttgcctcatctacacccaatccctccccatcttcctttcctgtctctgtcatagagactgtgaaagggtggtactcaatttcctagactcctttgcagccacgggtggccatgagagatggttctggccagtgggacaggaatagaacgccagtggtcctgccccttccccttcatccagtctggaatgtggagaggctggagctacagctgtcatcttgtggccataaagaaaaggctgaggccaggtgtggtagctcacgcctgtaatcccagcacttgggaggccgaggcaggtggatcacaagatcaagagattgagaccatcctggccaacatggtgaaaccctgtctctactaaaactacagaaattagctgggcatggtggcatgcacttgtagtcccagctacttgggaagctgaggcagaagaatctcttgaacccgggaggcggaggttgcagtgagccgagatgccgccactgcactccagcctggcgacagagagagactgtctcaaaaaaaaagaaaggccaagtactgcagagatgtcagccccagtctcttgagctgcgggaccaataccagcaaccacctactctggacttcttattataggagactaacagagccctgtgttgtgttgtttatgttactgttggttgagaattttgttacttgtggacaaaaaattcttaatttagcaacac

SEQ ID NO: 291864 - DNA, 1630 bp, Homo sapiens
agcggaggctcgtccccggcggtcgcggccgcccgcgcgccggcggcccagcaacaggcgcaaagttgaggaaaggcccagccgccacgggccgccctcgacccgcccctgggccccgcctcctgcgagcggcggaggcggggccgcgcggttgccggagcgacgcgcagtgtttggggtcaccgggcgtccccgggcgcggccatggcaaggccgcagccgtgcgggcccccgcacgctaggtgcggctcgccgtcgctgccggagcggccgctgcaggtgaaggtggtggggctcttcagctgccccaactttcagattgcgaagagcgccgctgaggaactcaaaaatgaaacctgggaatattcttcctctgtgatttcttttgttaatggtcagtttctgggtgatgcattggatctgcagaaatgggcccacgaggtgtgggatatagttgacattaaaccctctgcactttatgacgcactcactgaggatttttccgctaagttcttaagagacaccaaggtcttgtgcacaggaaaagcagggttttctcaacgtggcataagactacattacaaaaattccatttttcatcgaatagtacagaatggctggatacaaggaggggatatagtgtatggaaaaggagataatggagagtcgatttatggtccaacatttgaaggcaactgattgaaggaacagaagtgcttaaacaactagaattagttccaacacagaatgaaagaccaatacatatgtgtagaattactgacagtggagatccttatgcttgattttcatatcaatattttctgtgataatttattactttgtatctgatcagctgtttgtggatttaattaaaaagtacttgataaattgtaatttgaaagccgtggcagacactgtaggttgcctcatctacacccaatccctccccatcttcctttcctgtctctgtcatagagactgtgaaagggtggtactcaatttcctagactcctttgcagccacgggtggccatgagagatggttctggccagtgggacaggaatagaacgccagtggtcctgccccttccccttcatccagtctggaatgtggagaggctggagctacagctgtcatcttgtggccataaagaaaaggctgaggccaggtgtggtagctcacgcctgtaatcccagcacttgggaggccgaggcaggtggatcacaagatcaagagattgagaccatcctggccaacatggtgaaaccctgtctctactaaaactacagaaattagctgggcatggtggcatgcacttgtagtcccagctacttgggaagctgaggcagaagaatctcttgaacccgggaggcggaggttgcagtgagccgagatgccgccactgcactccagcctggcgacagagagagactgtctcaaaaaaaaagaaaggccaagtactgcagagatgtcagccccagtctcttgagctgcgggaccaataccagcaaccacctactctggacttcttattataggagactaacagagccctgtgttgtgttgtttatgttactgttggttgagaattttgttacttgtggacaaaaaattcttaatttagcaacac

SEQ ID NO: 291865 - DNA, 2795 bp, Homo sapiens
ggagcggagcaggaaggggcgaggcagccccgcccccggggcggtctcccgggacggccccgccccttgcccgcttccgcgtcagtgcctcaccaccacctgcccgcgcgccgccccatataaaggcgccgccgtccttgcccccaggactcggccccatggagacgccgccggccgccgctggcgcatggcgggtaggagctgtggcgcggggccttccaggagtctgagctatgagtggcccctgtggagagaagcctgtcctggaagccagccccaccatgagtctgtgggaatttgaggacagccacagccgtcagggcaccccaaggccgggtcaagagctggccgctgaggaggcctcggccctggaactgcagatgaaggtggacttcttccggaagctgggctattcatccacggagatccacagcgtcctgcagaagctgggcgtccaggcagacaccaacacggtgctgggtgagctggtgaaacacgggacagccaccgagcgggagcgccagacctcaccggacccctgccctcagctccctctagtcccgcggggtggtggcacccctaaggctcccaacctggagcctccactcccagaagaggaaaaggagggcagcgacctgagaccagtggtcatcgatgggagcaacgtggccatgagccatgggaacaaggaggtcttctcctgccggggcatcctgctggcagtgaactggtttctggagcggggccacacagacatcacagtgtttgtgccatcctggaggaaggagcagcctcggcccgacgtgcccatcacagaccagcacatcctgcgggaactggagaagaagaagatcctggtgttcacaccatcacgacgcgtgggtggcaagcgggtggtgtgctatgacgacagattcattgtgaagctggcctacgagtctgacgggatcgtggtttccaacgacacataccgtgacctccaaggcgagcggcaggagtggaagcgcttcatcgaggagcggctgctcatgtactccttcgtcaatgacaagtttatgccccctgatgacccactgggccggcacgggcccagcctggacaacttcctgcgtaagaagccactcactttggagcacaggaagcagccgtgtccctatggaaggaaatgcacctatgggatcaagtgccgattcttccacccagagcggccaagctgcccccagcgctctgtggcagatgagctccgtgccaatgctctcctctcaccccccagagccccaagcaaggacaaaaatggccggcggccttcaccttcatcccagtccagctctctgctaacagagagtgagcagtgcagcctggatgggaagaagctgggggcccaggcatccccagggtcccgccaagagggtctaacacagacctatgccccatcaggcaggagcctcgcacctagcgggggcagtggcagcagctttgggcccacagactggctcccacagacgctggactcactcccgtacgtctcccaggattgcctggactcgggcattggctccctggagagccagatgtcggaactttggggggttcgaggaggaggccctggtgagccgggcccaccccgagccccttacacgggctacagtccctatggatctgagctcccagccaccgcagccttctctgcctttggccgggccatgggtgctggccacttcagtgtccctgccgactacccacccgcgccccctgcctttccacctcgagagtactggtctgaaccatacccactgcccccacccacatcagtccttcaggagcccccagtgcagagcccaggggctggcaggagcccgtggggcagggcaggcagcctggccaaggagcaggccagcgtgtatactaagctgtgtggtgtgtttcccccgcacctggtggaggctgtgatggggcgcttcccacagctcctggacccccagcagctggctgccgagatcctctcctacaagtcccagcaccccagtgagtaagctgcctgtggctggcaagggcagcacccccagcctccaagggccgtcaggctgggctttgggccattgagcagcccattcccagccctgaggcccaccccagaggctggacagagggaggattcaagtcgggaaggaaacccacaaaccaaagatactgtaggattggttctggcccatgcagcacctctagctgtctgcctcagtgggtcagaagcgatcaccctgttgatacacattgtatctctgtagtttaaggagacgctgccggtaacggcgtcggtccgtggctgaggcccaaaccgtcttttctctcagagggtggggagggaggtgggggcagcagaggcctgggctgggtgccctgtgcacgccaccccacttccgccctacccctgggacgttggccttggctggctagttgggcaccgtgtgcctgccctccaagggcctcctctacgccaatgaggcctcatctgtgctctcgctgggcacgtggcttcatgtcagtaagcaagatgcttcttaataacccaccttctgccccactctattccttatcctgctgcccctgtaggggtcaagggccctccgtctacaccctcttcttctcctccatcctttattcagagtcatctcgcccttccccatgggtgggggaacctgtgtttgtttgtgtgcacatgtaaattttaaatattttaagcagaaagtccttacctcctgtaacacatcaataaagtacaatcattgtgagccctt

SEQ ID NO: 291866 - DNA, 641 bp, Homo sapiens
  misc_feature (351)..(351): n is a, c, g, or t
ggagcggagcaggaaggggcgaggcagccccgcccccggggcggtctcccgggacggccccgccccttgcccgcttccgcgtcagtgcctcaccaccacctgcccgcgcgccgccccatataaaggcgccgccgtccttgcccccaggactcggccccatggagacgccgccggccgccgctggcgcatggcggggtgaggcgcggcggggagggtgcgggcctcggcggggaagcggcagggagcgctccggcggggtccgagccgagccgaggggaggggacgggaggggacgggaggggtggagaattatggtgtttatataaaaaaaaaaaattttttaaaaacttncatcttaagtaatagcttctctatacttactccataccccaaaatcaataaataagcatttagaaaacgttgaagttttaaagattgcctcctcctaccaaaacccttctgtcttaaataatgtgtttctttttgcctacaccagctttcaaaaacctcttagtcctatgttggaaagtaatcaatgttgaaccctgtgagtagttatttacagtatgaattctcattctttcgtttaaaaataattaattgatttatttcaaattttcacctatatctcttaattctat

SEQ ID NO: 291867 - DNA, 192 bp, Homo sapiens
  misc_feature (8)..(8): n is a, c, g, or t
  misc_feature (17)..(17): n is a, c, g, or t
  misc_feature (62)..(62): n is a, c, g, or t
atcttttnccgtctttncccaccaaaattaccccccctttttttttttaaaatttcaagagntcatctcgcccttccccatgggtgggggaacctgtgtttgtttgtgtgcacatgtaaattttaaatattttaagcagaaagtccttacctcctgtaacacatcaataaagtacaatcattgtgagccctt

SEQ ID NO: 291868 - DNA, 2852 bp, Homo sapiens
agttccgatcttcgagccaccagctaacagctggatgaccttgagcacgtttttaatgtctgtgcctcagtttctccctttatagaatgggaatgggaatgcctagctgggagagcttttgagaggacaacctgaactaataacacgatgcagtgtgtagtgccaccaatccctcatcctgctggatgtggttttgggagggaggttaggagagagcgctattcaccgtccctaaccctgttggttgttcagtaggagctgtggcgcggggccttccaggagtctgagctatgagtggcccctgtggagagaagcctgtcctggaagccagccccaccatgagtctgtgggaatttgaggacagccacagccgtcagggcaccccaaggccgggtcaagagctggccgctgaggaggcctcggccctggaactgcagatgaaggtggacttcttccggaagctgggctattcatccacggagatccacagcgtcctgcagaagctgggcgtccaggcagacaccaacacggtgctgggtgagctggtgaaacacgggacagccaccgagcgggagcgccagacctcaccggacccctgccctcagctccctctagtcccgcggggtggtggcacccctaaggctcccaacctggagcctccactcccagaagaggaaaaggagggcagcgacctgagaccagtggtcatcgatgggagcaacgtggccatgagccatgggaacaaggaggtcttctcctgccggggcatcctgctggcagtgaactggtttctggagcggggccacacagacatcacagtgtttgtgccatcctggaggaaggagcagcctcggcccgacgtgcccatcacagaccagcacatcctgcgggaactggagaagaagaagatcctggtgttcacaccatcacgacgcgtgggtggcaagcgggtggtgtgctatgacgacagattcattgtgaagctggcctacgagtctgacgggatcgtggtttccaacgacacataccgtgacctccaaggcgagcggcaggagtggaagcgcttcatcgaggagcggctgctcatgtactccttcgtcaatgacaagtttatgccccctgatgacccactgggccggcacgggcccagcctggacaacttcctgcgtaagaagccactcactttggagcacaggaagcagccgtgtccctatggaaggaaatgcacctatgggatcaagtgccgattcttccacccagagcggccaagctgcccccagcgctctgtggcagatgagctccgtgccaatgctctcctctcaccccccagagccccaagcaaggacaaaaatggccggcggccttcaccttcatcccagtccagctctctgctaacagagagtgagcagtgcagcctggatgggaagaagctgggggcccaggcatccccagggtcccgccaagagggtctaacacagacctatgccccatcaggcaggagcctcgcacctagcgggggcagtggcagcagctttgggcccacagactggctcccacagacgctggactcactcccgtacgtctcccaggattgcctggactcgggcattggctccctggagagccagatgtcggaactttggggggttcgaggaggaggccctggtgagccgggcccaccccgagccccttacacgggctacagtccctatggatctgagctcccagccaccgcagccttctctgcctttggccgggccatgggtgctggccacttcagtgtccctgccgactacccacccgcgccccctgcctttccacctcgagagtactggtctgaaccatacccactgcccccacccacatcagtccttcaggagcccccagtgcagagcccaggggctggcaggagcccgtggggcagggcaggcagcctggccaaggagcaggccagcgtgtatactaagctgtgtggtgtgtttcccccgcacctggtggaggctgtgatggggcgcttcccacagctcctggacccccagcagctggctgccgagatcctctcctacaagtcccagcaccccagtgagtaagctgcctgtggctggcaagggcagcacccccagcctccaagggccgtcaggctgggctttgggccattgagcagcccattcccagccctgaggcccaccccagaggctggacagagggaggattcaagtcgggaaggaaacccacaaaccaaagatactgtaggattggttctggcccatgcagcacctctagctgtctgcctcagtgggtcagaagcgatcaccctgttgatacacattgtatctctgtagtttaaggagacgctgccggtaacggcgtcggtccgtggctgaggcccaaaccgtcttttctctcagagggtggggagggaggtgggggcagcagaggcctgggctgggtgccctgtgcacgccaccccacttccgccctacccctgggacgttggccttggctggctagttgggcaccgtgtgcctgccctccaagggcctcctctacgccaatgaggcctcatctgtgctctcgctgggcacgtggcttcatgtcagtaagcaagatgcttcttaataacccaccttctgccccactctattccttatcctgctgcccctgtaggggtcaagggccctccgtctacaccctcttcttctcctccatcctttattcagagtcatctcgcccttccccatgggtgggggaacctgtgtttgtttgtgtgcacatgtaaattttaaatattttaagcagaaagtccttacctcctgtaacacatcaataaagtacaatcattgtgagccctt

SEQ ID NO: 291869 - DNA, 2326 bp, Homo sapiens
aggtgcgtaagtcttcaacgccagaggaggtgaagaagcgcaagaaggcggtgctcttctgcctgagtgaggacaagaagaacatcatcctggaggagggcaaggagatcctggtgggcgatgtgggccagactgtcgacgatccctacgccacctttgtcaagatgctgccagataaggactgccgctatgccctctatgatgcaaccatgggaacaaggaggtcttctcctgccggggcatcctgctggcagtgaactggtttctggagcggggccacacagacatcacagtgtttgtgccatcctggaggaaggagcagcctcggcccgacgtgcccatcacagaccagcacatcctgcgggaactggagaagaagaagatcctggtgttcacaccatcacgacgcgtgggtggcaagcgggtggtgtgctatgacgacagattcattgtgaagctggcctacgagtctgacgggatcgtggtttccaacgacacataccgtgacctccaaggcgagcggcaggagtggaagcgcttcatcgaggagcggctgctcatgtactccttcgtcaatgacaagtttatgccccctgatgacccactgggccggcacgggcccagcctggacaacttcctgcgtaagaagccactcactttggagcacaggaagcagccgtgtccctatggaaggaaatgcacctatgggatcaagtgccgattcttccacccagagcggccaagctgcccccagcgctctgtggcagatgagctccgtgccaatgctctcctctcaccccccagagccccaagcaaggacaaaaatggccggcggccttcaccttcatcccagtccagctctctgctaacagagagtgagcagtgcagcctggatgggaagaagctgggggcccaggcatccccagggtcccgccaagagggtctaacacagacctatgccccatcaggcaggagcctcgcacctagcgggggcagtggcagcagctttgggcccacagactggctcccacagacgctggactcactcccgtacgtctcccaggattgcctggactcgggcattggctccctggagagccagatgtcggaactttggggggttcgaggaggaggccctggtgagccgggcccaccccgagccccttacacgggctacagtccctatggatctgagctcccagccaccgcagccttctctgcctttggccgggccatgggtgctggccacttcagtgtccctgccgactacccacccgcgccccctgcctttccacctcgagagtactggtctgaaccatacccactgcccccacccacatcagtccttcaggagcccccagtgcagagcccaggggctggcaggagcccgtggggcagggcaggcagcctggccaaggagcaggccagcgtgtatactaagctgtgtggtgtgtttcccccgcacctggtggaggctgtgatggggcgcttcccacagctcctggacccccagcagctggctgccgagatcctctcctacaagtcccagcaccccagtgagtaagctgcctgtggctggcaagggcagcacccccagcctccaagggccgtcaggctgggctttgggccattgagcagcccattcccagccctgaggcccaccccagaggctggacagagggaggattcaagtcgggaaggaaacccacaaaccaaagatactgtaggattggttctggcccatgcagcacctctagctgtctgcctcagtgggtcagaagcgatcaccctgttgatacacattgtatctctgtagtttaaggagacgctgccggtaacggcgtcggtccgtggctgaggcccaaaccgtcttttctctcagagggtggggagggaggtgggggcagcagaggcctgggctgggtgccctgtgcacgccaccccacttccgccctacccctgggacgttggccttggctggctagttgggcaccgtgtgcctgccctccaagggcctcctctacgccaatgaggcctcatctgtgctctcgctgggcacgtggcttcatgtcagtaagcaagatgcttcttaataacccaccttctgccccactctattccttatcctgctgcccctgtaggggtcaagggccctccgtctacaccctcttcttctcctccatcctttattcagagtcatctcgcccttccccatgggtgggggaacctgtgtttgtttgtgtgcacatgtaaattttaaatattttaagcagaaagtccttacctcctgtaacacatcaataaagtacaatcattgtgagccctt

SEQ ID NO: 291870 - DNA, 2274 bp, Homo sapiens
gggtggagctgggggctgggctctgcggggccctgtggccatgggaggttgcgggtcttggctccaggcagctttgagagtgagacggatagctcaccacataggagaaatcagaccgggaccaggcaggctgtggggtggagagagtggctaatttgggagatagagccgtagcacttatgaggggatgtatgtggttgatggttccaggtggcctctctacgaaccaacatggcatctctcgagcagaggccatgggccagtgggtgcgggctgccatcccccgacgacctcagagagggagttcccctaaaggtgcccatgggctgtggccctctagaccggggatccctttctcctcccttggtatgatcccacccatagagcagttttgcggggtcctggacaggccccagttttaggtgtcactctcctattcttcccagcaaggcttgccatcggccccttctcagcaattagaagtccctgcatggctcccacctccagagagttctttgcaccctctgcaggtttatgccccctgatgacccactgggccggcacgggcccagcctggacaacttcctgcgtaagaagccactcactttggagcacaggaagcagccgtgtccctatggaaggaaatgcacctatgggatcaagtgccgattcttccacccagagcggccaagctgcccccagcgctctgtggcagatgagctccgtgccaatgctctcctctcaccccccagagccccaagcaaggacaaaaatggccggcggccttcaccttcatcccagtccagctctctgctaacagagagtgagcagtgcagcctggatgggaagaagctgggggcccaggcatccccagggtcccgccaagagggtctaacacagacctatgccccatcaggcaggagcctcgcacctagcgggggcagtggcagcagctttgggcccacagactggctcccacagacgctggactcactcccgtacgtctcccaggattgcctggactcgggcattggctccctggagagccagatgtcggaactttggggggttcgaggaggaggccctggtgagccgggcccaccccgagccccttacacgggctacagtccctatggatctgagctcccagccaccgcagccttctctgcctttggccgggccatgggtgctggccacttcagtgtccctgccgactacccacccgcgccccctgcctttccacctcgagagtactggtctgaaccatacccactgcccccacccacatcagtccttcaggagcccccagtgcagagcccaggggctggcaggagcccgtggggcagggcaggcagcctggccaaggagcaggccagcgtgtatactaagctgtgtggtgtgtttcccccgcacctggtggaggctgtgatggggcgcttcccacagctcctggacccccagcagctggctgccgagatcctctcctacaagtcccagcaccccagtgagtaagctgcctgtggctggcaagggcagcacccccagcctccaagggccgtcaggctgggctttgggccattgagcagcccattcccagccctgaggcccaccccagaggctggacagagggaggattcaagtcgggaaggaaacccacaaaccaaagatactgtaggattggttctggcccatgcagcacctctagctgtctgcctcagtgggtcagaagcgatcaccctgttgatacacattgtatctctgtagtttaaggagacgctgccggtaacggcgtcggtccgtggctgaggcccaaaccgtcttttctctcagagggtggggagggaggtgggggcagcagaggcctgggctgggtgccctgtgcacgccaccccacttccgccctacccctgggacgttggccttggctggctagttgggcaccgtgtgcctgccctccaagggcctcctctacgccaatgaggcctcatctgtgctctcgctgggcacgtggcttcatgtcagtaagcaagatgcttcttaataacccaccttctgccccactctattccttatcctgctgcccctgtaggggtcaagggccctccgtctacaccctcttcttctcctccatcctttattcagagtcatctcgcccttccccatgggtgggggaacctgtgtttgtttgtgtgcacatgtaaattttaaatattttaagcagaaagtccttacctcctgtaacacatcaataaagtacaatcattgtgagccctt

SEQ ID NO: 291871 - DNA, 1217 bp, Homo sapiens
ggagcggagcaggaaggggcgaggcagccccgcccccggggcggtctcccgggacggccccgccccttgcccgcttccgcgtcagtgcctcaccaccacctgcccgcgcgccgccccatataaaggcgccgccgtccttgcccccaggactcggccccatggagacgccgccggccgccgctggcgcatggcgggtaggagctgtggcgcggggccttccaggagtctgagctatgagtggcccctgtggagagaagcctgtcctggaagccagccccaccatgagtctgtgggaatttgaggacagccacagccgtcagggcaccccaaggccgggtcaagagctggccgctgaggaggcctcggccctggaactgcagatgaaggtggacttcttccggaagctgggctattcatccacggagatccacagcgtcctgcagaagctgggcgtccaggcagacaccaacacggtgctgggtgagctggtgaaacacgggacagccaccgagcgggagcgccagacctcaccggacccctgccctcagctccctctagtcccgcggggtggtggcacccctaaggctcccaacctggagcctccactcccagaagaggaaaaggagggcagcgacctgagaccagtggtcatcgatgggagcaacgtggccatgagccatgggaacaaggaggtcttctcctgccggggcatcctgctggcagtgaactggtttctggagcggggccacacagacatcacagtgtttgtgccatcctggaggaaggagcagcctcggcccgacgtgcccatcacagaccagcacatcctgcgggaactggagaagaagaagatcctggtgttcacaccatcacgacgcgtgggtggcaagcgggtggtgtgctatgacgacagattcattgtgaagctggcctacgagtctgacgggatcgtggcttcatgtcagtaagcaagatgcttcttaataacccaccttctgccccactctattccttatcctgctgcccctgtaggggtcaagggccctccgtctacaccctcttcttctcctccatcctttattcagagtcatctcgcccttccccatgggtgggggaacctgtgtttgtttgtgtgcacatgtaaattttaaatattttaagcagaaagtccttacctcctgtaacacatcaataaagtacaatcattgtgagccctt

SEQ ID NO: 291872 - DNA, 1300 bp, Homo sapiens
ggagcggagcaggaaggggcgaggcagccccgcccccggggcggtctcccgggacggccccgccccttgcccgcttccgcgtcagtgcctcaccaccacctgcccgcgcgccgccccatataaaggcgccgccgtccttgcccccaggactcggccccatggagacgccgccggccgccgctggcgcatggcgggtaggagctgtggcgcggggccttccaggagtctgagctatgagtggcccctgtggagagaagcctgtcctggaagccagccccaccatgagtctgtgggaatttgaggacagccacagccgtcagggcaccccaaggccgggtcaagagctggccgctgaggaggcctcggccctggaactgcagatgaaggtggacttcttccggaagctgggctattcatccacggagatccacagcgtcctgcagaagctgggcgtccaggcagacaccaacacggtgctgggtgagctggtgaaacacgggacagccaccgagcgggagcgccagacctcaccggacccctgccctcagctccctctagtcccgcggggtggtggcacccctaaggctcccaacctggagcctccactcccagaagaggaaaaggagggcagcgacctgagaccagtggtcatcgatgggagcaacgtggccatgagccatgggaacaaggaggtcttctcctgccggggcatcctgctggcagtgaactggtttctggagcggggccacacagacatcacagtgtttgtgccatcctggaggaaggagcagcctcggcccgacgtgcccatcacagaccagcacatcctgcgggaactggagaagaagaagatcctggtgttcacaccatcacgacgcgtgggtggcaagcgggtggtgtgctatgacgacagattcattgtgaagctggcctacgagtctgacgggatcgtggtttccaacgacacataccgtgacctccaaggcgagcggcaggagtggaagcgcttcatcgaggagcggctgctcatgtactccttcgtcaatgacaagcttgccatcggccccttctcagcaattagaagtccctgcatggctcccacctccagagagttctttgcaccctctgcaggtttatgccccctgatgacccactgggccggcacgggcccagcctggacaacttcctgcgtaagaagccactcactttggagcacaggaagcagccgtgtccctatggtatggaacccagcctgccctccccggccctcctcactcctgcccttcctctcacctgtctg

SEQ ID NO: 291873 - DNA, 252 bp, Homo sapiens
ctgccgcctgtgttcagatgttcttggtcttcaggcagcaaactgtgccacgccaagggaggggctggggcatggaagaggcctcagcagagttagttcttgccccggtgaccttggcgttaaccactcctgtgtgtggccatcagcaggttagggagccctgtaggcctggctctaggtcccgctgggccctgacctgtgtgcacccgtcacctcccagaccagcacatcctgcgggaactggagaagaag

SEQ ID NO: 291874 - DNA, 1195 bp, Homo sapiens
tattttataattgtgggtggcatgctgcaaagccttgcagattgttatttcttacaacctgagcgtatatagtatgagcctaagaaaaaagaagagtaagaaaagaagaatggctttacagtaaaatatcatacaatgcagacaatattttaagaggatattggagattatgtacgcaagggccaagaaagcaagaaatgagaaccagagtcagccctgtagctttacttcagtgcttccattctagatgatgctgatattataaagagttagtcactgctgctaagcatggaggactatatacataagctcgtttatacagtgtttgcttgtgggagggtttaatccttttagggccttgatgtcaagaaaaaaataactggaaactatattttgctaaagatagaaatgaggaactgtgtcattttgggacatgtgcaaatcattgaggaactccatcaccctgcattgaaaattgatttttttttcctctaaaatgagaaagaaactgaataagcaatctgttgcctctttactcattcatcacaatatcctgattcgtcataaggctatcagtatataagggctagaaaataatcatagcttaaattaattttttcattgattttattgatcagtgcattgaacagtgtttattattcacaagttgtcttttattagtaaatcaaggcctcatagcacattgttaaataaagtggttgactagtctatgtaacagctcaccaagctactatctcttttaactccttataatgttgcgtcattaaaggtcaaggggtcatgctattaatctcattgctatagaccattaacatgactgaacttttccacaaagtacttatgtttacaatgctataaccctttgactgctgcggcaacctttaaccacacaaatgtcacaagctagaatcatcagcatggttcttgccatggcaatcaaagagttaagggctgtgcagtgatttgttttgtatttattaatttatatttattttgtttccattcaaggaggggattaggggtggggcagtttttgtctgctgtaagtgtcttaacctagggaagggttaaatggctttttatactattgcatcttctgtatttaccatcaattcattgtgttgtaattaaaagaaactgtcaataaataagagaacagaaaaatggttcatag

SEQ ID NO: 291875 - DNA, 1779 bp, Homo sapiens
tattttataattgtgggtggcatgctgcaaagccttgcagattgttatttcttacaacctgagcgtatatagtatgagcctaagaaaaaagaagagtaagaaaagaagaatggctttacagtaaaatatcatacaatgcagacaatattttaagaggatattggagattatgtacgcaagggccaagaaagcaagaaatgagaaccagagtcagccctgtagctttacttcagtgcttccattctagatgatgctgatattataaagagttagtcactgctgctaagcatggaggactatatacataagctcgtttatacagtgtttgcttgtgggagggtttaatccttttagggccttgatgtcaagaaaaaaataactggaaactatattttgctaaagatagaaatgaggaactgtgtcattttgggacatgtgcaaatcattgaggaactccatcaccctgcattgaaaattgatttttttttcctctaaaatgagaaagaaactgaataagcaatctgttgcctctttactcattcatcacaatatcctgattcgtcataaggctatcagtatataagggctagaaaataatcatagcattaagaaggaaggagtctatcattatgcttgaattctggcaaatgtcatgaataagggttgggtcatatttactttaatatgagacaagatttatgtgataagcaaaggcatataaggctgctcttttgaacagaacatttcagttatcaggctgtactattacaagagataagaagacaataaggacaatgtaatcacaaacagtgggattccatttgtttattgtacaccagctactttgtgggtatggttcctgactcctcttctacatgaggtttgggaaaaaagtctcaaaccaaatggaacagtgaaagggaaagtaattcatctagcacataagaatagtgattcaaaaccaatgcagaataaatttccatgggtcaataacataaggtgtcagttcagtgttactagagatatgcaaggcataaaatattttcatcaccccatcactaataacatgaaaagctcagacataggatttcccaaattgaaatgaaaacacattcatgcctgcaaaaataattctccttctgcttcatttctcattactttatctaatataaacacaaatgtaaacaaggtaatggtcttcatgtaaaatgaccatatagttaagaattttagtaaaatattgttgttctgtgtattattaaacaaatgcaatgaagtattaaaatagctgatcagtttgaatttcctgtaaagcagtaattccgcatcagaattgtagataaggttgtgaatttattgactcatttcagaacagtgtctgttgacatggcagtcagagcaggtgaatacagatgctctttctgattgcaaaggttatagagctaaattagacagcattatgtgatactagcaaagacaacttctgttataaatcagagggcaaggcttttctgaatcgatgtgataaattactaagtaatgattaccaaaaataattactaagtaataaaagatacagactggtttactgaaataagcaagtgttacatttaataattacctataatctttttttgttaacacataagcaagtgttacctttaataattacctataatctttttttgttaacacataatttggccatttcatatactgtgtacctattttcattccctctctgtgggtcattaaaaaacacaatgtggtggataagaa

SEQ ID NO: 291876 - DNA, 2562 bp, Homo sapiens
cattgcctgagtaaaattaggtttttaggtctttttggcatttacttcttttacagctgatgtggaatcaattattcctttatatgttcataagtacaaaatttcactatcttaattacttccaaacaaacaatttccaagcaagggtatgtgtgcctggtttttctgctcctccaattctaagatcgttatttgtttgccttctgtttctcacccaaaaatacagatggttgggaaagatacatcttattgagttgtcctatgcagtctctgtctatatttgcatttctttctattcctatcttgcctttttttttttttttacacagatttggttttcccttccctttgtgaaaaccagaattgagcagcattgtacatcagagatggtacccaggaaatgtctttgttcctcagtatttttcgtcaaaacttccatgcaaagacagtcccagcaaagttgacatacatcccaacctctctcattggcttttctaactttttatagagctattcccctgagaaaagtgaaatgctgagtatgatgggtattgcctgttgataggatagctaaggaaatttgcttttggagaatgtatcttaaataattatacaggaaagtagtcacagtatagtgttctgtttaaggtacatcatgggtacataaatgtctaaaaccttcatcctttggtctatttctctgtaagtgtaaattacatatatattagaaagagagatagaatcaaagaattaggggtgttacagaggcagctttttgctgccttggttttgactgtatcagcatttctattgcagacctctattttcaggggttttagagactcgaccataaaaatttgtttcaggcttaaaagttttgaaagatttttttaggtatctgattttaaacaaatagatcttgtttttatattataggagggaaataaatggagtttactagttcaattttgcgctaatataacttttaataaacttaactttttaaacaaaaacataaaatctaattagttcatagttggttgatgcttttttaaaagaatcaattattgaccttgagaaacttgcctgcttcatcagtatagtaacctatctttgagatattttaaaacgtgtatacctttattaacattatcttgattccagcggtggatcagtatgataatgcagatttatgacatccatataagctatctggtaatatagatttaggaatatatagtatatatgatacatatatatatatatatatttactagatagattaaggagaaaaagctcccataaacttagtttgtcaaataaataccatatatttaaaaaatgcacagacatttatcattcagagtcagaatgagattcaagtaattgcaaagggaagttgtctcttgggtaaacaatacacattttatagcttcttgtgaaactaattttttcctttctatattgtggttatgggaaagtaaaagaattaaaattaatacagactttatttaaataacattaaactgtgaagcagagagaaacgccaggaaattaaatatttaggccattatcttgtggttgtctgacaatacttcacctttcttttaattccccatgatgttttcaattatggagagagtattaaaatctagatttaagtttctgcattgttctcattacactcaacactatttcattaagttcttgataatatgtagtcttctgtgtgcaaggaaagaaataaataacacatttatttgctgaatgagttttaaggtgtgcaagttgtagtgatgtttttcccacacaggattctatacacttataccatcttaaatctggcatttttttttcagatagcttctactgacaaacacaaagcttgtttgtgtgcaaatataaggctaaataaatggtgctaaagtgtattatgactgtcagataaaatcaggcaaaattttgtggtgcttaaattaattttttcattgattttattgatcagtgcattgaacagtgtttattattcacaagttgtcttttattagtaaatcaaggcctcatagcacattgttaaataaagtggttgactagtctatgtaacagctcaccaagctactatctcttttaactccttataatgttgcgtcattaaaggtcaaggggtcatgctattaatctcattgctatagaccattaacatgactgaacttttccacaaagtacttatgtttacaatgctataaccctttgactgctgcggcaacctttaaccacacaaatgtcacaagctagaatcatcagcatggttcttgccatggcaatcaaagagttaagggctgtgcagtgatttgttttgtatttattaatttatatttattttgtttccattcaaggaggggattaggggtggggcagtttttgtctgctgtaagtgtcttaacctagggaagggttaaatggctttttatactattgcatcttctgtatttaccatcaattcattgtgttgtaattaaaagaaactgtcaataaataagagaacagaaaaatggttcatag

SEQ ID NO: 291877 - DNA, 4921 bp, Homo sapiens
ctcagccttcccggttcgggaaaggggaagaatgcaggaggggtaggatttctttcctgataggatcggttgggaaagaccgcagcctgtgtgtgtctttcccttcgaccaaggtgtctgttgctccgtaaataaaacgtcccactgccttctgagagcgctataaaggcagcggaagggtagtccgcggggcattccgggcggggcgcgagcagagacaggtcatggcagcgccaggcggcaggtcggagccgccgcagctccccgagtacagctgcagctacatggtgtcgcggccggtctacagcgagctcgctttccagcaacagcacgagcggcgcctgcaggagcgcaagacgctgcgggagagcctggccaagtgctgcagttgttcaagaaagagagcctttggtgtgctaaagactcttgtgcccatcttggagtggctccccaaataccgagtcaaggaatggctgcttagtgacgtcatttcgggagttagtactgggctagtggccacgctgcaagggatggcatatgccctactagctgcagttcctgtcggatatggtctctactctgcttttttccctatcctgacatactttatctttggaacatcaagacatatctcagttggaccttttccagtggtgagtttaatggtgggatctgttgttctgagcatggcccccgacgaacactttctcgtatccagcagcaatggaactgtattaaatactactatgatagacactgcagctagagatacagctagagtcctgattgccagtgccctgactctgctggttggaattatacagttgatatttggtggcttgcagattggattcatagtgaggtacttggcagatcctttggttggtggcttcacaacagctgctgccttccaagtgctggtctcacagctaaagattgtcctcaatgtttcaaccaaaaactacaatggagttctctctattatctatacgctggttgagatttttcaaaatattggtgataccaatcttgctgatttcactgctggattgctcaccattgtcgtctgtatggcagttaaggaattaaatgatcggtttagacacaaaatcccagtccctattcctatagaagtaattgtgacgataattgctactgccatttcatatggagccaacctggaaaaaaattacaatgctggcattgttaaatccatcccaagggggtttttgcctcctgaacttccacctgtgagcttgttctcggagatgctggctgcatcattttccatcgctgtggtggcttatgctattgcagtgtcagtaggaaaagtatatgccaccaagtatgattacaccatcgatgggaaccaggaattcattgcctttgggatcagcaacatcttctcaggattcttctcttgttttgtggccaccactgctctttcccgcacggccgtccaggagagcactggaggagttgctggcatcatctctgctgcgattgtgatgatcgccattcttgccctggggaagcttctggaacccttgcagaagtcggtcttggcagctgttgtaattgccaacctgaaagggatgtttatgcagctgtgtgacattcctcgtctgtggagacagaataagattgatgctgttatctgggtgtttacgtgtatagtgtccatcattctggggctggatctcggtttactagctggccttatatttggactgttgactgtggtcctgagagttcagtttccttcttggaatggccttggaagcatccctagcacagatatctacaaaagtaccaagaattacaaaaacattgaagaacctcaaggagtgaagattcttagattttccagtcctattttctatggcaatgtcgatggttttaaaaaatgtatcaagtccacagttggatttgatgccattagagtatataataagaggctgaaagcgctgaggaaaatacagaaactaataaaaagtggacaattaagagcaacaaagaatggcatcataagtgatgctgtttcaacaaataatgcttttgagcctgatgaggatattgaagatctggaggaacttgatatcccaaccaaggaaatagagattcaagtggattggaactctgagcttccagtcaaagtgaacgttcccaaagtgccaatccatagccttgtgcttgactgtggagctatatctttcctggacgttgttggagtgagatcactgcgggtgattgtcaaagaattccaaagaattgatgtgaatgtgtattttgcatcacttcaagattatgtgatagaaaagctggagcaatgcgggttctttgacgacaacattagaaaggacacattctttttgacggtccatgatgctatactctatctacagaaccaagtgaaatctcaagagggtcaaggttccattttagaaacgatcactctcattcaggattgtaaagatacccttgaattaatagaaacagagctgacggaagaagaacttgatgtccaggatgaggctatgcgtacacttgcatcctgaaagtgggttcgggaggtctctatgagcaaggaatacaagacaaaacttcctcaatgcattgactatttcttcagactcaaaacactcattcttttttctattaagccattgaaagagaagcactaagactgcttctaggctttatttataaaataaacaccttatccctaacatgggcaaaatggctagaattattcagacgatttggcagcgtccagggtaagctggtgttataatacgctgctgatctacatcacagatttgctaataatgttcacgtgggccctggcatatctctgttcagttagagtgagtgctgacccaacagcctctgtggtcaagcgagtcacgaatgattaatcataaagaaaaatcagtttttgactgacctggatatccatgagctgcactgatcaccatgtaaggtcacatttagtaaatgctgaaataaaatgattaatgcatttatcaataaaagcctttgaaaatactttggataataaattggagttttaaaaatgcaaatttgcttagtatctaataatgaagtgttattacatatagccggaattgaggatctctttgatcctggaaatggtttacctaaaagctacagaaccaggccaatatattttgaaatattgatgcagacaaatgaaataataaagagattttcatggtttataaaaatcttttttgatatgataataatcatgatcacaactgagatcaaaaaaatatatgacagattattttgtttaaaaatgcagttttaattatcttagtctatagaaatgatcattgcatggaggcatgtataggtatgatctgtgtaaaatctgacataaaaacagtgctattctgagtgaaaatttttttgatgtgcttacataaccatggtgattaaaatgagtttatattttttctcaaaaattttagcagtgtgtaaagtaagtaatctttaactgaactctgaccacttaaaaaaaaatctaaaaattgaactacctatagtagtctgtgtttaaagtgaatttttaaagacaaagcattctaaatgaactcaatataaaaacattcatttggaatgtacatactgaaaaatacaggtttttttgaccaaaagtttttatatcttttctttttatttatttttttcctaagtgccaacaattttctagatattatatacaacacaggctttgatcttggggacttttcccatatatttcacactggagtgaatgaagttgtacttcatttctagagaaaagttatacccaggtccccaattgagaatgtcttgcttgattgaaaacgacatcatcccttggtatactccagggattggtttcaggacccctgcatttaccaaaatttgtgcacactcaagtcctgcagtcacccctgcctaaagatagaatggcttctctgtttttcttctgaaatacaaccagaaacaatgtgtctatttctgaaagaataggattaatgatcatacaaatgggttaatcctgaattctggttgtaaatctggttacagcataactaggattataatgctgcctcattttcacagcactacttgcttatattgacaacaaatcatctcgctaaagagtgaatgtaggccaggcgcggtggctcatgcctgtaatcccagcactttgggaggccgaggcgggtggatcacgaggtcaggagatcgagaccatcctggctaacatggtaaaaccccgtctctactaaaaatagaaaaaaagaaattagcctagcgtggtggctggcgggcgcctgtagtcccagctatttgggaggctaaggcaggagaatggcgtgaacccgggaggcggagcttgcagtgagccgaggtcgtgccactgcactccagcctgggcgacagagcaagactccgtctcaaaaaaaaaaaaaaaaaaaaaaaaagagtgaatgtaatagtcttgcagaaaatgaatgaatacctttgttcaataaaggaaatatgcactgctcacttttttgaaggaaatgccaaagttacgttttacaacaaggctagagtttgtaaattctgggttcatttgtgatgacataagtcagcaaactgcgggaatactgtctcttctatgtattttgtgaatagtaagcataattttagttttgtattatcaatgaaaatttcacttgaaattaaagctgccttttgttatatttttaacctataggataagattccagtattgtatatgagttttaacaaattaaaaaatcaaatcatgtacatttgaaaatatttgcacacatttaaaaataaatgtaaagttgtcttttaaactactcggatgtgtcctttctgaacaaaa

SEQ ID NO: 291878 - DNA, 3841 bp, Homo sapiens
ggcatgggagttttcattcttaatgtacttcctgaaatactcagcgaaggtcttgcaaagattcaatttgtaggatcgttgtcatccagtctcttccttaggaattcattgcctttgggatcagcaacatcttctcaggattcttctcttgttttgtggccaccactgctctttcccgcacggccgtccaggagagcactggaggacgattttaatatagtggccaaaatgagccttggcctcccataattggagactcattatgacatataattggcaagtaggtggccactctcctggcatgagtttggcagctgactgtggtccttgtccccaaatctccatatctttctccagttcacagagctccccatccacagtgagatgcaagtggctcggttgctggcatcatctctgctgcgattgtgatgatcgccattcttgccctggggaagcttctggaacccttgcagaagtcggtcttggcagctgttgtaattgccaacctgaaagggatgtttatgcagctgtgtgacattcctcgtctgtggagacagaataagattgatgctgttatctgggtgtttacgtgtatagtgtccatcattctggggctggatctcggtttactagctggccttatatttggactgttgactgtggtcctgagagttcagtttccttcttggaatggccttggaagcatccctagcacagatatctacaaaagtaccaagaattacaaaaacattgaagaacctcaaggagtgaagattcttagattttccagtcctattttctatggcaatgtcgatggttttaaaaaatgtatcaagtccacagttggatttgatgccattagagtatataataagaggctgaaagcgctgaggaaaatacagaaactaataaaaagtggacaattaagagcaacaaagaatggcatcataagtgatgctgtttcaacaaataatgcttttgagcctgatgaggatattgaagatctggaggaacttgatatcccaaccaaggaaatagagattcaagtggattggaactctgagcttccagtcaaagtgaacgttcccaaagtgccaatccatagccttgtgcttgactgtggagctatatctttcctggacgttgttggagtgagatcactgcgggtgattgtcaaagaattccaaagaattgatgtgaatgtgtattttgcatcacttcaagattatgtgatagaaaagctggagcaatgcgggttctttgacgacaacattagaaaggacacattctttttgacggtccatgatgctatactctatctacagaaccaagtgaaatctcaagagggtcaaggttccattttagaaacgatcactctcattcaggattgtaaagatacccttgaattaatagaaacagagctgacggaagaagaacttgatgtccaggatgaggctatgcgtacacttgcatcctgaaagtgggttcgggaggtctctatgagcaaggaatacaagacaaaacttcctcaatgcattgactatttcttcagactcaaaacactcattcttttttctattaagccattgaaagagaagcactaagactgcttctaggctttatttataaaataaacaccttatccctaacatgggcaaaatggctagaattattcagacgatttggcagcgtccagggtaagctggtgttataatacgctgctgatctacatcacagatttgctaataatgttcacgtgggccctggcatatctctgttcagttagagtgagtgctgacccaacagcctctgtggtcaagcgagtcacgaatgattaatcataaagaaaaatcagtttttgactgacctggatatccatgagctgcactgatcaccatgtaaggtcacatttagtaaatgctgaaataaaatgattaatgcatttatcaataaaagcctttgaaaatactttggataataaattggagttttaaaaatgcaaatttgcttagtatctaataatgaagtgttattacatatagccggaattgaggatctctttgatcctggaaatggtttacctaaaagctacagaaccaggccaatatattttgaaatattgatgcagacaaatgaaataataaagagattttcatggtttataaaaatcttttttgatatgataataatcatgatcacaactgagatcaaaaaaatatatgacagattattttgtttaaaaatgcagttttaattatcttagtctatagaaatgatcattgcatggaggcatgtataggtatgatctgtgtaaaatctgacataaaaacagtgctattctgagtgaaaatttttttgatgtgcttacataaccatggtgattaaaatgagtttatattttttctcaaaaattttagcagtgtgtaaagtaagtaatctttaactgaactctgaccacttaaaaaaaaatctaaaaattgaactacctatagtagtctgtgtttaaagtgaatttttaaagacaaagcattctaaatgaactcaatataaaaacattcatttggaatgtacatactgaaaaatacaggtttttttgaccaaaagtttttatatcttttctttttatttatttttttcctaagtgccaacaattttctagatattatatacaacacaggctttgatcttggggacttttcccatatatttcacactggagtgaatgaagttgtacttcatttctagagaaaagttatacccaggtccccaattgagaatgtcttgcttgattgaaaacgacatcatcccttggtatactccagggattggtttcaggacccctgcatttaccaaaatttgtgcacactcaagtcctgcagtcacccctgcctaaagatagaatggcttctctgtttttcttctgaaatacaaccagaaacaatgtgtctatttctgaaagaataggattaatgatcatacaaatgggttaatcctgaattctggttgtaaatctggttacagcataactaggattataatgctgcctcattttcacagcactacttgcttatattgacaacaaatcatctcgctaaagagtgaatgtaggccaggcgcggtggctcatgcctgtaatcccagcactttgggaggccgaggcgggtggatcacgaggtcaggagatcgagaccatcctggctaacatggtaaaaccccgtctctactaaaaatagaaaaaaagaaattagcctagcgtggtggctggcgggcgcctgtagtcccagctatttgggaggctaaggcaggagaatggcgtgaacccgggaggcggagcttgcagtgagccgaggtcgtgccactgcactccagcctgggcgacagagcaagactccgtctcaaaaaaaaaaaaaaaaaaaaaaaaagagtgaatgtaatagtcttgcagaaaatgaatgaatacctttgttcaataaaggaaatatgcactgctcacttttttgaaggaaatgccaaagttacgttttacaacaaggctagagtttgtaaattctgggttcatttgtgatgacataagtcagcaaactgcgggaatactgtctcttctatgtattttgtgaatagtaagcataattttagttttgtattatcaatgaaaatttcacttgaaattaaagctgccttttgttatatttttaacctataggataagattccagtattgtatatgagttttaacaaattaaaaaatcaaatcatgtacatttgaaaatatttgcacacatttaaaaataaatgtaaagttgtcttttaaactactcggatgtgtcctttctgaacaaaa

SEQ ID NO: 291879 - DNA, 502 bp, Homo sapiens
tgaacaacattcctgcagaattccctggagtgagactcaggacaatattaaatccaatgaatcacgcagctttcaggagggcagggcagcacgctgcagagcagcactgaatgatggcttggcctggcgtccctggtggcagcagtggccgcaccaggcaccgtgttctcattcaacaaagactcagttttgatgtgaggactgtgaacatctccagaacaggagacatttggaagagcttgtgcccactggtatctgaaacttggctgctcattcttcagaaaccccttgtatcctgctatgattcctcagcaacaccatcacatggaaaagaaccaacaatgtgaagaaacgaatatggtgttcattttcaaactgaaaaaggaaataattacagttactatttacagtgtctggcttttcaagcttcatgctacaagcagctaactctttgtcaaacaattaattttgtttaaaataaataagtttatatatttaaagt

SEQ ID NO: 291880 - DNA, 655 bp, Homo sapiens
tgaacaacattcctgcagaattccctggagtgagactcaggacaatattaaatccaatgaatcacgcagctttcaggagggcagggcagcacgctgcagagcagcactgaatgatggcttggcctggcgtccctggtggcagcagtggccgcaccaggcaccgtgttctcattcaacaaagactcagctggcacagagctttagcaccttaagttgctcaatttgatctctgcactcaggaacaagaatcttcctggtttgtggaaagagtgctattctgacattggatgctgctgagaatcgggcaacagtcttagtgaggtgaccatcatctgaggagttttgatgtgaggactgtgaacatctccagaacaggagacatttggaagagcttgtgcccactggtatctgaaacttggctgctcattcttcagaaaccccttgtatcctgctatgattcctcagcaacaccatcacatggaaaagaaccaacaatgtgaagaaacgaatatggtgttcattttcaaactgaaaaaggaaataattacagttactatttacagtgtctggcttttcaagcttcatgctacaagcagctaactctttgtcaaacaattaattttgtttaaaataaataagtttatatatttaaagt

SEQ ID NO: 291881 - DNA, 337 bp, Homo sapiens
tgaacaacattcctgcagaattccctggagtgagactcaggacaatattaaatccaatgaatcacgcagctttcaggagggcagggcagcacgctgcagagcagcactgaatgatggcttggcctggcgtccctggtggcagcagtggccgcaccaggcaccgtgttctcattcaacaaagactcaggttagtgagcgagatgcctgtaccaaatctcccttccctctttttcaagtttctggatgttgtgtaattcttttttgcagcattcagttctgcaaggagcctagtgaatgcttccatcagtggactatgaaaggcatctggacaagcagt

SEQ ID NO: 291882 - DNA, 1390 bp, Homo sapiens
agagcagtgtcctaggaagtaggtaccctgcctcaaatgggcacttacccaggtaggcagtgagtgatatttctggaaggatcacattcccatctctctaatatgagtataacagtctcatctggatatggaaaaaagattattcagagccaacaaatctggctataggctgtttcactttctctgaaactcatccagtctgacaccagttcacaaagaacacctgtgattccagtctgatctaggcaactctagctgctttcccactaccctcaggtttgccttgtcagccatggatatggaacagaaagactatgactcgcgcacagctctgcatgttgctgcagctgaaggtactgaagggttaaggaggggaggaggagggtaatcataagaccctttctttttcaccaaaagtaccttcattatatgtgccctcaaggttataggggcagcaactagttttatctagacacccttcggtttgcagctagactatgactgagtgctgcagggtacaaaatgggaagaggccttttcccctcccctcttggtaaagacttcagtggctaagtgtctgcaccaaagggttcaagacctgcgccttctcattttccttctgcccatattcctaggacacatcgaagttgttaaattcctgatcgaggcttgcaaagtgaatccttttgccaaggacaggtggggcaacattcccctggatgatgctgtgcagttcaaccatctggaggtggtcaaactgcttcaagattaccaggactcctacacactctctgaaactcaggctgaggcagcagctgaggccctgtccaaagagaacttagaaagcatggtatgagcacaggtcatggacagcccctgctcaagaaaaagcatgagctggccacacatgtaatccataaccaccaaaaatactatggagagctacactgcttcagtggggaccaagcagtcatttggtgacttaggctagtgctttctatgggagtcaaaataccccattccctcagcagacagagtacagagaagggcctcagaggacacctgcagtacagctatccagagagactgggcttcaaggtacagcctaatggcttgccccactcaaaaccatcccagctcttcacccaggtctcctcttcctctccctgaagaaaccatcatgagagagatactctggtggagggactctagctaccatgcacatgtacatatccacagaatatgggaagtgggaatggctatatacatggctttagtagtctggagaaatctactccccttggccaggacatgctgctgctactgctaacagccaattttatagacagagaaagtattttgtgttcaaataaactttaattaccaaatc

SEQ ID NO: 291883 - DNA, 1167 bp, Homo sapiens
  misc_feature (3)..(3): n is a, c, g, or t
cgnggtgttgctcctgaattgtgcttcacattgctggctcttctccttggggtctcagcttagatgtcatttccaaagaaagacttttctgaccaccctatctcatgtggcccccctctacctctatttacagcaccctacttctcactatttatcacaattactttaaaaattacgtgtctatttatttacctgtttattacctatctcctaacaccagaatggaagttcctagttctagcacagcatctagcacagaatgctgtaagtatttcaaaaaatattttctagctgaatcaatgaatttaagggaaggaaaggacaggagtaataaaagaagctaattaacaagccaaaaggttgaggtggattgtggtcatgcagtcatttgtaaacttgttaagagtacagcctaacttgtttattttctgatttggggcacacccactttatcctcagcttcagttctgttccccaggtgggcctgccagccaagtcagctgtatcaggagccatcctcctggtggtacccaatgtcatgggaatgatgtgcctgtcacccccattggacaagctggggaacagccatagggggaccagcttctgccaggtgagatgctttgcatatagtacttactatttttgaagcaataaatttgtttaatggtaccacttttactataataaagcaattttgagctcctactaagtgtaaggagtaaataaacaatatatttggcttacaattctagaagttggtgtctctcttcaatttccacaactatgacaacctgaggcactgtgctcggaagttagacccacggcgtgaaggggcagaaattcgggtaaggaaaactccaggtggcttgtaagaatatttcaaaggccaggtgcggtggctcacgcctgtaatccctgcactttgagaggccaaggcgggcggatcacaaggtcaggagatcaagaccatcctggctaacacggtgaaacctggtctctattgaaaatacaaaaaattagccagacgtggtggcacgcgcctgtggtcccagctacttgggaggctgaggcaggagaatcgcttgaaaccgggaggcagaggttgcagtgagccaagaccgcgcgccactacacttcagcctgaacgacagagcgagactccgtctc

SEQ ID NO: 291884 - DNA, 2465 bp, Homo sapiens
gaatttgggaattgtatagttcaattcctcattttattttattacttattacataagttatacatgaatactcatcataagagttcaaacaatatagaaatacatgttctcctttccctccctactcaatccctgtcctcttttcccagaagtaaatattagcagattagtgggtatcttctagataatgtcctatgtactgacatacatacatgaatatatataaatatacttttatgatttaggattttttaaatatcaaggtaacatacatacatattattctggtatttattttttttctcatatcccaagacatagtgtctttccacatcattaaaacccctcattttagaggtacggaaactaagacctagaaaggtaaactgatttgccaaaggtaacagagctgttgatcccaaacctgaagaccactcaaccttctttattcccaatttccgtggctccagagtgagtcccagctgcatttctctagccccctaatccaatcgtgtctgggatccaggtgtgtgagcagcaacattgtgctcctgacccaggcattccgaaagaagtttgtcattcctgattttgaggagttcacgggccatgtggatcgcatctttgaggatgtcaaagagctcactggaggcaaagtggcagcctacatccctcagctggccaagtcaaacccagacctgtggggtgtctccctgtgcactgtggatggtcaacggcactctgtgggccacacaaagatccccttctgcctgcagtcctgtgtgaagcccctcacctatgccatctccataagcaccctaggcactgactacgtgcacaagtttgtgggcaaagagccaagtggcctgcgctacaacaagctctccctcaatgaggaaggaatcccccataaccccatggtcaatgctggtgccattgttgtcagctccctgatcaagatggactgtaacaaagcagagaagtttgattttgtgttgcagtatctcaacaaaatggctgggaatgaatacatgggtttcagcaatgccacattccagtcagagaaggaaacaggggatcggaattatgccatcggctattatctcaaggaaaagaagtgctttcctaagggggtggacatgatggctgcccttgatctctacttccagctgtgttctgtggaggtcacttgtgaatcaggcagtgtcatggcagccaccctcgccaacggtgggatctgccccatcacaggcgagagtgtgctgagtgctgaagcagtgcgcaacaccctcagcctcatgcattcctgcggcatgtatgacttctctggccagtttgccttccacgtgggcctgccagccaagtcagctgtatcaggagccatcctcctggtggtacccaatgtcatgggaatgatgtgcctgtcacccccattggacaagctggggaacagccatagggggaccagcttctgccagaagttggtgtctctcttcaatttccacaactatgacaacctgaggcactgtgctcggaagttagacccacggcgtgaaggggcagaaattcggaacaagactgtggtcaacctgttatttgctgcctatagtggcgatgtctcagctcttcgaaggtttgccttgtcagccatggatatggaacagaaagactatgactcgcgcacagctctgcatgttgctgcagctgaaggacacatcgaagttgttaaattcctgatcgaggcttgcaaagtgaatccttttgccaaggacaggtggggcaacattcccctggatgatgctgtgcagttcaaccatctggaggtggtcaaactgcttcaagattaccaggactcctacacactctctgaaactcaggctgaggcagcagctgaggccctgtccaaagagaacttagaaagcatggtatgagcacaggtcatggacagcccctgctcaagaaaaagcatgagctggccacacatgtaatccataaccaccaaaaatactatggagagctacactgcttcagtggggaccaagcagtcatttggtgacttaggctagtgctttctatgggagtcaaaataccccattccctcagcagacagagtacagagaagggcctcagaggacacctgcagtacagctatccagagagactgggcttcaaggtacagcctaatggcttgccccactcaaaaccatcccagctcttcacccaggtctcctcttcctctccctgaagaaaccatcatgagagagatactctggtggagggactctagctaccatgcacatgtacatatccacagaatatgggaagtgggaatggctatatacatggctttagtagtctggagaaatctactccccttggccaggacatgctgctgctactgctaacagccaattttatagacagagaaagtattttgtgttcaaataaactttaattaccaaatc

SEQ ID NO: 291885 - DNA, 2492 bp, Homo sapiens
cacccactagaaagccacccgggttctccttcatccccaacgctcctcacctagcccctgtcctgagggtgcccctaaccctggagccagctttaaaggggcaggccccttctcctgccccagccccagccccacccaccgggcccacattctccgtcttccaggtccagcgctccctcacagaactcccccgcaccttgtctcgctcgctccgcccctccttcccagccacagctagaggtcccgggcgcacctgcagagccggaggcttgctggggcatgcgctccatgaaggctctgcagaaggccctgagccgggctggcagtcactgcgggcgaggaggctggggtcacccgagccggagccccctccttggcgggggcgtccggcaccacctcagtgaggccgcggcgcagggcagagagacgccacacagccaccagccgcagcaccaggatcatgattcatcagaaagtggcatgctgtcccgcctgggtgatttgctcttttacactattgctgaaggacaggaacgaatccctatccacaagttcaccactgcactaaaggccactggactgcagacatcagatcctcggctccgagactgcatgagcgagatgcaccgcgtggtccaagagtccagtagtggtggcctcttggaccgagatctcttccgaaagtggcagcctacatccctcagctggccaagtcaaacccagacctgtggggtgtctccctgtgcactgtggatggtcaacggcactctgtgggccacacaaagatccccttctgcctgcagtcctgtgtgaagcccctcacctatgccatctccataagcaccctaggcactgactacgtgcacaagtttgtgggcaaagagccaagtggcctgcgctacaacaagctctccctcaatgaggaaggaatcccccataaccccatggtcaatgctggtgccattgttgtcagctccctgatcaagatggactgtaacaaagcagagaagtttgattttgtgttgcagtatctcaacaaaatggctgggaatgaatacatgggtttcagcaatgccacattccagtcagagaaggaaacaggggatcggaattatgccatcggctattatctcaaggaaaagaagtgctttcctaagggggtggacatgatggctgcccttgatctctacttccagctgtgttctgtggaggtcacttgtgaatcaggcagtgtcatggcagccaccctcgccaacggtgggatctgccccatcacaggcgagagtgtgctgagtgctgaagcagtgcgcaacaccctcagcctcatgcattcctgcggcatgtatgacttctctggccagtttgccttccacgtgggcctgccagccaagtcagctgtatcaggagccatcctcctggtggtacccaatgtcatgggaatgatgtgcctgtcacccccattggacaagctggggaacagccatagggggaccagcttctgccagaagttggtgtctctcttcaatttccacaactatgacaacctgaggcactgtgctcggaagttagacccacggcgtgaaggggcagaaattcggaacaagactgtggtcaacctgttatttgctgcctatagtggcgatgtctcagctcttcgaaggtttgccttgtcagccatggatatggaacagaaagactatgactcgcgcacagctctgcatgttgctgcagctgaaggacacatcgaagttgttaaattcctgatcgaggcttgcaaagtgaatccttttgccaaggacaggtggggcaacattcccctggatgatgctgtgcagttcaaccatctggaggtggtcaaactgcttcaagattaccaggactcctacacactctctgaaactcaggctgaggcagcagctgaggccctgtccaaagagaacttagaaagcatggtatgagcacaggtcatggacagcccctgctcaagaaaaagcatgagctggccacacatgtaatccataaccaccaaaaatactatggagagctacactgcttcagtggggaccaagcagtcatttggtgacttaggctagtgctttctatgggagtcaaaataccccattccctcagcagacagagtacagagaagggcctcagaggacacctgcagtacagctatccagagagactgggcttcaaggtacagcctaatggcttgccccactcaaaaccatcccagctcttcacccaggtctcctcttcctctccctgaagaaaccatcatgagagagatactctggtggagggactctagctaccatgcacatgtacatatccacagaatatgggaagtgggaatggctatatacatggctttagtagtctggagaaatctactccccttggccaggacatgctgctgctactgctaacagccaattttatagacagagaaagtattttgtgttcaaataaactttaattaccaaatc

SEQ ID NO: 291886 - DNA, 1874 bp, Homo sapiens
aacaggctgtacgccccggaagtatgggatgggcgcacctgcagagccggaggcttgctggggcatgcgctccatgaaggctctgcagaaggccctgagccgggctggcagtcactgcgggcgaggaggctggggtcacccgagccggagccccctccttggcgggggcgtccggcaccacctcagtgaggccgcggcgcagggcagagagacgccacacagccaccagccgcagcaccaggatcatgattcatcagaaagtggcatgctgtcccgcctgggtgatttgctcttttacactattgctgaaggacaggaacgaatccctatccacaagttcaccactgcactaaaggccactggactgcagacatcagatcctcggctccgagactgcatgagcgagatgcaccgcgtggtccaagagtccagtagtggtggcctcttggaccgagatctcttccgaaagtgttgcagtatctcaacaaaatggctgggaatgaatacatgggtttcagcaatgccactgctttcctaagggggtggacatgatggctgcccttgatctctacttccagctgtgttctgtggaggtcacttgtgaatcaggcagtgtcatggcagccaccctcgccaacggtgggatctgccccatcacaggcgagagtgtgctgagtgctgaagcagtgcgcaacaccctcagcctcatgcattcctgcggcatgtatgacttctctggccagtttgccttccacgtgggcctgccagccaagtcagctgtatcaggagccatcctcctggtggtacccaatgtcatgggaatgatgtgcctgtcacccccattggacaagctggggaacagccatagggggaccagcttctgccagaagttggtgtctctcttcaatttccacaactatgacaacctgaggcactgtgctcggaagttagacccacggcgtgaaggggcagaaattcggaacaagactgtggtcaacctgttatttgctgcctatagtggcgatgtctcagctcttcgaaggtttgccttgtcagccatggatatggaacagaaagactatgactcgcgcacagctctgcatgttgctgcagctgaaggacacatcgaagttgttaaattcctgatcgaggcttgcaaagtgaatccttttgccaaggacaggtggggcaacattcccctggatgatgctgtgcagttcaaccatctggaggtggtcaaactgcttcaagattaccaggactcctacacactctctgaaactcaggctgaggcagcagctgaggccctgtccaaagagaacttagaaagcatggtatgagcacaggtcatggacagcccctgctcaagaaaaagcatgagctggccacacatgtaatccataaccaccaaaaatactatggagagctacactgcttcagtggggaccaagcagtcatttggtgacttaggctagtgctttctatgggagtcaaaataccccattccctcagcagacagagtacagagaagggcctcagaggacacctgcagtacagctatccagagagactgggcttcaaggtacagcctaatggcttgccccactcaaaaccatcccagctcttcacccaggtctcctcttcctctccctgaagaaaccatcatgagagagatactctggtggagggactctagctaccatgcacatgtacatatccacagaatatgggaagtgggaatggctatatacatggctttagtagtctggagaaatctactccccttggccaggacatgctgctgctactgctaacagccaattttatagacagagaaagtattttgtgttcaaataaactttaattaccaaatc

SEQ ID NO: 291887 - DNA, 4489 bp, Homo sapiens
cacccactagaaagccacccgggttctccttcatccccaacgctcctcacctagcccctgtcctgagggtgcccctaaccctggagccagctttaaaggggcaggccccttctcctgccccagccccagccccacccaccgggcccacattctccgtcttccaggtccagcgctccctcacagaactcccccgcaccttgtctcgctcgctccgcccctccttcccagccacagctagaggtcccgggcgcacctgcagagccggaggcttgctggggcatgcgctccatgaaggctctgcagaaggccctgagccgggctggcagtcactgcgggcgaggaggctggggtcacccgagccggagccccctccttggcgggggcgtccggcaccacctcagtgaggccgcggcgcagggcagagagacgccacacagccaccagccgcagcaccaggatcatgattcatcagaaagtggcatgctgtcccgcctgggtgatttgctcttttacactattgctgaaggacaggaacgaatccctatccacaagttcaccactgcactaaaggccactggactgcagacatcagatcctcggctccgagactgcatgagcgagatgcaccgcgtggtccaagagtccagtagtggtggcctcttggaccgagatctcttccgaaagtgtgtgagcagcaacattgtgctcctgacccaggcattccgaaagaagtttgtcattcctgattttgaggagttcacgggccatgtggatcgcatctttgaggatgtcaaagagctcactggaggcaaagtggcagcctacatccctcagctggccaagtcaaacccagacctgtggggtgtctccctgtgcactgtggatggtcaacggcactctgtgggccacacaaagatccccttctgcctgcagtcctgtgtgaagcccctcacctatgccatctccataagcaccctaggcactgactacgtgcacaagtttgtgggcaaagagccaagtggcctgcgctacaacaagctctccctcaatgaggaaggaatcccccataaccccatggtcaatgctggtgccattgttgtcagctccctgatcaagatggactgtaacaaagcagagaagtttgattttgtgttgcagtatctcaacaaaatggctgggaatgaatacatgggtttcagcaatgccacattccagtcagagaaggaaacaggggatcggaattatgccatcggctattatctcaaggaaaagaagctgtgttctgtggaggtcacttgtgaatcaggcagtgtcatggcagccaccctcgccaacggtgggatctgccccatcacaggcgagagtgtgctgagtgctgaagcagtgcgcaacaccctcagcctcatgcattcctgcggcatgtatgacttctctggccagtttgccttccacgtgggcctgccagccaagtcagctgtatcaggagccatcctcctggtggtacccaatgtcatgggaatgatgtgcctgtcacccccattggacaagctggggaacagccatagggggaccagcttctgccaggtgagatgctttgcatatagtacttactatttttgaagcaataaatttgtttaatggtaccacttttactataataaagcaattttgagctcctactaagtgtaaggagtaaataaacaatatatttggcttacaattctagaagttggtgtctctcttcaatttccacaactatgacaacctgaggcactgtgctcggaagttagacccacggcgtgaaggggcagaaattcggaacaagactgtggtcaacctgttatttgctgcctatagtggcgatgtctcagctcttcgaaggtttgccttgtcagccatggatatggaacagaaagactatgactcgcgcacagctctgcatgttgctgcagctgaaggacacatcgaagttgttaaattcctgatcgaggcttgcaaagtgaatccttttgccaaggacaggtggggcaacattcccctggatgatgctgtgcagttcaaccatctggaggtggtcaaactgcttcaagattaccaggactcctacacactctctgaaactcaggctgaggcagcagctgaggccctgtccaaagagaacttagaaagcatggtatgagcacaggtcatggacagcccctgctcaagaaaaagcatgagctggccacacatgtaatccataaccaccaaaaatactatggagagctacactgcttcagtggggaccaagcagtcatttggtgacttaggctagtgctttctatgggagtcaaaataccccattccctcagcagacagagtacagagaagggcctcagaggacacctgcagtacagctatccagagagactgggcttcaaggtacagcctaatggcttgccccactcaaaaccatcccagctcttcacccaggtctcctcttcctctccctgaagaaaccatcatgagagagatactctggtggagggactctagctaccatgcacatgtacatatccacagaatatgggaagtgggaatggctatatacatggctttagtagtctggagaaatctactccccttggccaggacatgctgctgctactgctaacagccaattttatagacagagaaagtattttgtgttcaaataaactttaattaccaaatcatttttgctaaacccagtccttctttcttccctaggggtatctagcttcatcaccatcatagaaggtagaaaaagatggaatcacagggtcaaagcacagcttctctacctaccctaccaaacagtacatattcacttaccccaccaggtttttctcaactccaaatactgctttaggttaagtgtattctgctgccaagggaagcataggtttgagtctaaacaggctctgaaacagattgtgcaaaacctcaggcctccttccttcctcgggaagttccaactgtggcagaaatgaagatggaacttctcaagaataaacagttttggccgggtgtggtggctcacgcctgaaatcccagcactttgggaggccaaggtgggctgatcacatgaggccaggagttcgagaccagcctggccaatatggcaaaaccccatctctactaaaaatataaaaatgagacgggcatggtggcacacacctgtaatcctagctactcaggaggctgaggcacgagagtcgcttgaacccaaaaggcagagtttgcagtgagccaagatcatgccactgcactccagcctgggtgacagagtgagactctgtctcaaaaataaataaatagtttctagcactcatcccctagatatcccccaagtgtctctcttcccctttggtcaaggttataactgggataatgattatgacagactggctgggtgtcagaggtacagatttaaggtagatggactcagggtaaggatagctacagctgtgtggggctgaaggtctgtggcactgagctactggggaaggagggctctgttttcattttgacacactgagttaataaagcacttactgagggagccagagcccaaactctaaatgtgctgtagaaaaagggccaagtcattgactgcaccactccttcagccagaggtagaaaggatttactcttcagccatctggtagagccccaagaacaagttacatgtggacaaagggagggagaggtatcatggtgattaataaattcaaacaaagctgaatgataagaccccaggatggaatacagtctgagaaaggcctgggcaaagggaggcagagggactgaaggaagcaggtcaaggaagatacacccatggtagcctaggaaattggcagtagtgttggtgggtggggaaaaggagggtttggctgtatgcctagctttcacaaggtaggggatgaggaagatgatcatgatattgcacagaggacccaacactgaattgtgggagctagaggttgcttgaggcaaagtaaaaaggcttcggacactttcaaaaggaggctggccaaaggcgtgattagggactccagtaatggacatactagaggccctcgggcacctcaagccctgaatgggtcagcagctccccatcccagagagcaaaggcaggcaccactggaccccggaaatctgtctgtagcgtgtgaaccacagagacctggctcacatccaccaggctcagcttctgggcctcatactccagcaacagccccaccttctctggctgcccaataccctcaactggggctttctcgttggccaacatggtgtaccacttgcgctgggcataggtgaacacccaggaacgatcatcaacaccaatgcagctatcccgggacatgtccacatctgccactcctatccggaactgctgggagcgcttcactgtcacttcccagtagtgtctgccactggtgaccgctgtgtctgccagcaccac

SEQ ID NO: 291888 - DNA, 663 bp, Homo sapiens
ttctccttcatccccaacgctcctcacctagcccctgtcctgagggtgcccctaaccctggagccagctttaaaggggcaggccccttctcctgccccagccccagccccacccaccgggcccacattctccgtcttccaggtccagcgctccctcacagaactcccccgcaccttgtctcgctcgctccgcccctccttcccagccacagctagaggtcccgggcgcacctgcagagccggaggcttgctggggcatgcgctccatgaaggctctgcagaaggccctgagccgggctggcagtcactgcgggcgaggaggctggggtcacccgagccggagccccctccttggcgggggcgtccggcaccacctcagtgaggccgcggcgcagggcagagagacgccacacagccaccagccgcagcaccaggatcagtaaggctcctgggacagggcaggggacgggcttgcccccactcccactgtggttctcgctagttcccgagtgcccttccaaggcagcgccgctcatctcccctctcctcgctcactagccctcggtgccttttcctttggatgtggggctttgggtgcgccgcgctcgggcggtaatctgccgtctgcctaggagtgcgttcgggcaagcgggtcctggggatg

SEQ ID NO: 291889 - DNA, 2622 bp, Homo sapiens
cacccactagaaagccacccgggttctccttcatccccaacgctcctcacctagcccctgtcctgagggtgcccctaaccctggagccagctttaaaggggcaggccccttctcctgccccagccccagccccacccaccgggcccacattctccgtcttccaggtccagcgctccctcacagaactcccccgcaccttgtctcgctcgctccgcccctccttcccagccacagctagaggtcccgggcgcacctgcagagccggaggcttgctggggcatgcgctccatgaaggctctgcagaaggccctgagccgggctggcagtcactgcgggcgaggaggctggggtcacccgagccggagccccctccttggcgggggcgtccggcaccacctcagtgaggccgcggcgcagggcagagagacgccacacagccaccagccgcagcaccaggatcatgattcatcagaaagtggcatgctgtcccgcctgggtgatttgctcttttacactattgctgaaggacaggaacgaatccctatccacaagttcaccactgcactaaaggccactggactgcagacatcagatcctcggctccgagactgcatgagcgagatgcaccgcgtggtccaagagtccagtagtggtggcctcttggaccgagatctcttccgaaagtgtgtgagcagcaacattgtgctcctgacccaggcattccgaaagaagtttgtcattcctgattttgaggagttcacgggccatgtggatcgcatctttgaggatgtcaaagagctcactggaggcaaagtggcagcctacatccctcagctggccaagtcaaacccagacctgtggggtgtctccctgtgcactgtggatggtcaacggcactctgtgggccacacaaagatccccttctgcctgcagtcctgtgtgaagcccctcacctatgccatctccataagcaccctaggcactgactacgtgcacaagtttgtgggcaaagagccaagtggcctgcgctacaacaagctctccctcaatgaggaaggaatcccccataaccccatggtcaatgctggtgccattgttgtcagctccctgatcaagatggactgtaacaaagcagagaagtttgattttgtgttgcagtatctcaacaaaatggctgggaatgaatacatgggtttcagcaatgccacattccagtcagagaaggaaacaggggatcggaattatgccatcggctattatctcaaggaaaagaagtgctttcctaagggggtggacatgatggctgcccttgatctctacttccagctgtgttctgtggaggtcacttgtgaatcaggcagtgtcatggcagccaccctcgccaacggtgggatctgccccatcacaggcgagagtgtgctgagtgctgaagcagtgcgcaacaccctcagcctcatgcattcctgcggcatgtatgacttctctggccagtttgccttccacgtgggcctgccagccaagtcagctgtatcaggagccatcctcctggtggtacccaatgtcatgggaatgatgtgcctgtcacccccattggacaagctggggaacagccatagggggaccagcttctgccagaagttggtgtctctcttcaatttccacaactatgacaacctgaggcactgtgctcggaagttagacccacggcgtgaaggggcagaaattcggaacaagactgtggtcaacctgttatttgctgcctatagtggcgatgtctcagctcttcgaaggtttgccttgtcagccatggatatggaacagaaagactatgactcgcgcacagctctgcatgttgctgcagctgaaggacacatcgaagttgttaaattcctgatcgaggcttgcaaagtgaatccttttgccaaggacaggtggggcaacattcccctggatgatgctgtgcagttcaaccatctggaggtggtcaaactgcttcaagattaccaggactcctacacactctctgaaactcaggctgaggcagcagctgaggccctgtccaaagagaacttagaaagcatggtatgagcacaggtcatggacagcccctgctcaagaaaaagcatgagctggccacacatgtaatccataaccaccaaaaatactatggagagctacactgcttcagtggggaccaagcagtcatttggtgacttaggctagtgctttctatgggagtcaaaataccccattccctcagcagacagagtacagagaagggcctcagaggacacctgcagtacagctatccagagagactgggcttcaaggtacagcctaatggcttgccccactcaaaaccatcccagctcttcacccaggtctcctcttcctctccctgaagaaaccatcatgagagagatactctggtggagggactctagctaccatgcacatgtacatatccacagaatatgggaagtgggaatggctatatacatggctttagtagtctggagaaatctactccccttggccaggacatgctgctgctactgctaacagccaattttatagacagagaaagtattttgtgttcaaataaactttaattaccaaatc

SEQ ID NO: 291890 - DNA, 4398 bp, Homo sapiens
cacccactagaaagccacccgggttctccttcatccccaacgctcctcacctagcccctgtcctgagggtgcccctaaccctggagccagctttaaaggggcaggccccttctcctgccccagccccagccccacccaccgggcccacattctccgtcttccaggtccagcgctccctcacagaactcccccgcaccttgtctcgctcgctccgcccctccttcccagccacagctagaggtcccgggcgcacctgcagagccggaggcttgctggggcatgcgctccatgaaggctctgcagaaggccctgagccgggctggcagtcactgcgggcgaggaggctggggtcacccgagccggagccccctccttggcgggggcgtccggcaccacctcagtgaggccgcggcgcagggcagagagacgccacacagccaccagccgcagcaccaggatcatgattcatcagaaagtggcatgctgtcccgcctgggtgatttgctcttttacactattgctgaaggacaggaacgaatccctatccacaagttcaccactgcactaaaggccactggactgcagacatcagatcctcggctccgagactgcatgagcgagatgcaccgcgtggtccaagagtccagtagtggtggcctcttggaccgagatctcttccgaaagtgtgtgagcagcaacattgtgctcctgacccaggcattccgaaagaagtttgtcattcctgattttgaggagttcacgggccatgtggatcgcatctttgaggatgtcaaagagctcactggaggcaaagtggcagcctacatccctcagctggccaagtcaaacccagacctgtggggtgtctccctgtgcactgtggatggtcaacggcactctgtgggccacacaaagatccccttctgcctgcagtcctgtgtgaagcccctcacctatgccatctccataagcaccctaggcactgactacgtgcacaagtttgtgggcaaagagccaagtggcctgcgctacaacaagctctccctcaatgaggaaggaatcccccataaccccatggtcaatgctggtgccattgttgtcagctccctgatcaagatggactgtaacaaagcagagaagtttgattttgtgttgcagtatctcaacaaaatggctgggaatgaatacatgggtttcagcaatgccacattccagtcagagaaggaaacaggggatcggaattatgccatcggctattatctcaaggaaaagaagtgctttcctaagggggtggacatgatggctgcccttgatctctacttccagctgtgttctgtggaggtcacttgtgaatcaggcagtgtcatggcagccaccctcgccaacggtgggatctgccccatcacaggcgagagtgtgctgagtgctgaagcagtgcgcaacaccctcagcctcatgcattcctgcggcatgtatgacttctctggccagtttgccttccacgtgggcctgccagccaagtcagctgtatcaggagccatcctcctggtggtacccaatgtcatgggaatgatgtgcctgtcacccccattggacaagctggggaacagccatagggggaccagcttctgccagaagttggtgtctctcttcaatttccacaactatgacaacctgaggcactgtgctcggaagttagacccacggcgtgaaggggcagaaattcggaacaagactgtggtcaacctgttatttgctgcctatagtggcgatgtctcagctcttcgaaggtttgccttgtcagccatggatatggaacagaaagactatgactcgcgcacagctctgcatgttgctgcagctgaaggacacatcgaagttgttaaattcctgatcgaggcttgcaaagtgaatccttttgccaaggacaggtggggcaacattcccctggatgatgctgtgcagttcaaccatctggaggtggtcaaactgcttcaagattaccaggactcctacacactctctgaaactcaggctgaggcagcagctgaggccctgtccaaagagaacttagaaagcatggtatgagcacaggtcatggacagcccctgctcaagaaaaagcatgagctggccacacatgtaatccataaccaccaaaaatactatggagagctacactgcttcagtggggaccaagcagtcatttggtgacttaggctagtgctttctatgggagtcaaaataccccattccctcagcagacagagtacagagaagggcctcagaggacacctgcagtacagctatccagagagactgggcttcaaggtacagcctaatggcttgccccactcaaaaccatcccagctcttcacccaggtctcctcttcctctccctgaagaaaccatcatgagagagatactctggtggagggactctagctaccatgcacatgtacatatccacagaatatgggaagtgggaatggctatatacatggctttagtagtctggagaaatctactccccttggccaggacatgctgctgctactgctaacagccaattttatagacagagaaagtattttgtgttcaaataaactttaattaccaaatcatttttgctaaacccagtccttctttcttccctaggggtatctagcttcatcaccatcatagaaggtagaaaaagatggaatcacagggtcaaagcacagcttctctacctaccctaccaaacagtacatattcacttaccccaccaggtttttctcaactccaaatactgctttaggttaagtgtattctgctgccaagggaagcataggtttgagtctaaacaggctctgaaacagattgtgcaaaacctcaggcctccttccttcctcgggaagttccaactgtggcagaaatgaagatggaacttctcaagaataaacagttttggccgggtgtggtggctcacgcctgaaatcccagcactttgggaggccaaggtgggctgatcacatgaggccaggagttcgagaccagcctggccaatatggcaaaaccccatctctactaaaaatataaaaatgagacgggcatggtggcacacacctgtaatcctagctactcaggaggctgaggcacgagagtcgcttgaacccaaaaggcagagtttgcagtgagccaagatcatgccactgcactccagcctgggtgacagagtgagactctgtctcaaaaataaataaatagtttctagcactcatcccctagatatcccccaagtgtctctcttcccctttggtcaaggttataactgggataatgattatgacagactggctgggtgtcagaggtacagatttaaggtagatggactcagggtaaggatagctacagctgtgtggggctgaaggtctgtggcactgagctactggggaaggagggctctgttttcattttgacacactgagttaataaagcacttactgagggagccagagcccaaactctaaatgtgctgtagaaaaagggccaagtcattgactgcaccactccttcagccagaggtagaaaggatttactcttcagccatctggtagagccccaagaacaagttacatgtggacaaagggagggagaggtatcatggtgattaataaattcaaacaaagctgaatgataagaccccaggatggaatacagtctgagaaaggcctgggcaaagggaggcagagggactgaaggaagcaggtcaaggaagatacacccatggtagcctaggaaattggcagtagtgttggtgggtggggaaaaggagggtttggctgtatgcctagctttcacaaggtaggggatgaggaagatgatcatgatattgcacagaggacccaacactgaattgtgggagctagaggttgcttgaggcaaagtaaaaaggcttcggacactttcaaaaggaggctggccaaaggcgtgattagggactccagtaatggacatactagaggccctcgggcacctcaagccctgaatgggtcagcagctccccatcccagagagcaaaggcaggcaccactggaccccggaaatctgtctgtagcgtgtgaaccacagagacctggctcacatccaccaggctcagcttctgggcctcatactccagcaacagccccaccttctctggctgcccaataccctcaactggggctttctcgttggccaacatggtgtaccacttgcgctgggcataggtgaacacccaggaacgatcatcaacaccaatgcagctatcccgggacatgtccacatctgccactcctatccggaactgctgggagcgcttcactgtcacttcccagtagtgtctgccactggtgaccgctgtgtctgccagcaccac

SEQ ID NO: 291891 - DNA, 426 bp, Homo sapiens
tctccacatccatctcccttttctctacccactcatgtccaggtggcagcctacatccctcagctggccaagtcaaacccagacctgtggggtgtctccctgtgcactgtggatggtcaacggtgagatgctgggcaagaggaaggggaggcagggcacaggtgccgaacacaggccaacccctttcatggcatctgtctgcctccaggcactctgtgggccacacaaagatccccttctgcctgcagtcctgtgtgaagcccctcacctatgccatctccataagcaccctaggcactgactacgtgcacaagtttgtgggcaaagagccaagtggcctgcgctacaacaagctctccctcaatgaggaaggtgagcactaccaaggctcagaccgtacttacagctgtccccttctccttatcc

SEQ ID NO: 291892 - DNA, 4239 bp, Homo sapiens
cggggactcggaggtactgggcgcgcgcggctccggggctcgggacgcctcgggacgcctcggggtcgggctccggctgcggctgctgctgcggcgcccgcgctccggtgcgctccgcctcctgtgcccgccgcggagcgcagtctgcgcgcccgccgtgcgccctcagctccttttcctgagcccgccgcgatgggagctgcgcggggatccccggccagaccccgccggttgcctctgctcagcgtcctgctgctgccgctgctgggcggtacccagacagccattgtcttcatcaagcagccgtcctcccaggatgcactgcaggggcgccgggcgctgcttcgctgtgaggttgaggctccgggcccggtacatgtgtactggctgctcgatggggcccctgtccaggacacggagcggcgtttcgcccagggcagcagcctgagctttgcagctgtggaccggctgcaggactctggcaccttccagtgtgtggctcgggatgatgtcactggagaagaagcccgcagtgccaacgcctccttcaacatcaaatggattgaggcaggtcctgtggtcctgaagcatccagcctcggaagctgagatccagccacagacccaggtcacacttcgttgccacattgatgggcaccctcggcccacctaccaatggttccgagatgggacccccctttctgatggtcagagcaaccacacagtcagcagcaaggagcggaacctgacgctccggccagctggtcctgagcatagtgggctgtattcctgctgcgcccacagtgcttttggccaggcttgcagcagccagaacttcaccttgagcattgctgatgaaagctttgccagggtggtgctggcaccccaggacgtggtagtagcgaggtatgaggaggccatgttccattgccagttctcagcccagccacccccgagcctgcagtggctctttgaggatgagactcccatcactaaccgcagtcgccccccacacctccgcagagccacagtgtttgccaacgggtctctgctgctgacccaggtccggccacgcaatgcagggatctaccgctgcattggccaggggcagaggggcccacccatcatcctggaagccacacttcacctagcagagattgaagacatgccgctatttgagccacgggtgtttacagctggcagcgaggagcgtgtgacctgccttccccccaagggtctgccagagcccagcgtgtggtgggagcacgcgggagtccggctgcccacccatggcagggtctaccagaagggccacgagctggtgttggccaatattgctgaaagtgatgctggtgtctacacctgccacgcggccaacctggctggtcagcggagacaggatgtcaacatcactgtggccactgtgccctcctggctgaagaagccccaagacagccagctggaggagggcaaacccggctacttggattgcctgacccaggccacaccaaaacctacagttgtctggtacagaaaccagatgctcatctcagaggactcacggttcgaggtcttcaagaatgggaccttgcgcatcaacagcgtggaggtgtatgatgggacatggtaccgttgtatgagcagcaccccagccggcagcatcgaggcgcaagcccgtgtccaagtgctggaaaagctcaagttcacaccaccaccccagccacagcagtgcatggagtttgacaaggaggccacggtgccctgttcagccacaggccgagagaagcccactattaagtgggaacgggcagatgggagcagcctcccagagtgggtgacagacaacgctgggaccctgcattttgcccgggtgactcgagatgacgctggcaactacacttgcattgcctccaacgggccgcagggccagattcgtgcccatgtccagctcactgtggcagtttttatcaccttcaaagtggaaccagagcgtacgactgtgtaccagggccacacagccctactgcagtgcgaggcccagggggaccccaagccgctgattcagtggaaaggcaaggaccgcatcctggaccccaccaagctgggacccaggatgcacatcttccagaatggctccctggtgatccatgacgtggcccctgaggactcaggccgctacacctgcattgcaggcaacagctgcaacatcaagcacacggaggcccccctctatgtcgtggacaagcctgtgccggaggagtcggagggccctggcagccctcccccctacaagatgatccagaccattgggttgtcggtgggtgccgctgtggcctacatcattgccgtgctgggcctcatgttctactgcaagaagcgctgcaaagccaagcggctgcagaagcagcccgagggcgaggagccagagatggaatgcctcaacggtgggcctttgcagaacgggcagccctcagcagagatccaagaagaagtggccttgaccagcttgggctccggccccgcggccaccaacaaacgccacagcacaagtgataagatgcacttcccacggtctagcctgcagcccatcaccacgctggggaagagtgagtttggggaggtgttcctggcaaaggctcagggcttggaggagggagtggcagagaccctggtacttgtgaagagcctgcagagcaaggatgagcagcagcagctggacttccggagggagttggagatgtttgggaagctgaaccacgccaacgtggtgcggctcctggggctgtgccgggaggctgagccccactacatggtgctggaatatgtggatctgggagacctcaagcagttcctgaggatttccaagagcaaggatgaaaaattgaagtcacagcccctcagcaccaagcagaaggtggccctatgcacccaggtagccctgggcatggagcacctgtccaacaaccgctttgtgcataaggacttggctgcgcgtaactgcctggtcagtgcccagagacaagtgaaggtgtctgccctgggcctcagcaaggatgtgtacaacagtgagtactaccacttccgccaggcctgggtgccgctgcgctggatgtcccccgaggccatcctggagggtgacttctctaccaagtctgatgtctgggccttcggtgtgctgatgtgggaagtgtttacacatggagagatgccccatggtgggcaggcagatgatgaagtactggcagatttgcaggctgggaaggctagacttcctcagcccgagggctgcccttccaaactctatcggctgatgcagcgctgctgggccctcagccccaaggaccggccctccttcagtgagattgccagcgccctgggagacagcaccgtggacagcaagccgtgaggagggagcccgctcaggatggcctgggcaggggaggacatctctagagggaagctcacagcatgatgggcaagatccctgtcctcctgggccctgaggcccctgccctagtgcaacaggcattgctgaggtctgagcagggcctggcctttcctcctcttcctcaccctcatcctttgggaggctgacttggacccaaactgggcgactagggctttgagctgggcagttttccctgccacctcttcctctatcagggacagtgtgggtgccacaggtaaccccaatttctggccttcaacttctccccttgaccgggtccaactctgccactcatctgccaactttgcctggggagggctaggcttgggatgagctgggtttgtggggagttccttaatattctcaagttctgggcacacagggttaatgagtctcttggcccactggtcccacttgggggtctagaccaggattatagaggacacagcaagtgagtcctccccactctgggcttgtgcacactgacccagacccacgtcttccccacccttctctcctttcctcatcctaagtgcctggcagatgaaggagttttcaggagcttttgacactatataaaccgccctttttgtatgcaccacgggcggcttttatatgtaattgcagcgtggggtgggtgggcatgggaggtaggggtgggccctggagatgaggagggtgggccatccttaccccacacttttattgttgtcgttttttgtttgttttgtttttttgtttttgtttttgtttttacactcgctgctctcaataaataagccttttttacaa

SEQ ID NO: 291893 - DNA, 4048 bp, Homo sapiens
cggggactcggaggtactgggcgcgcgcggctccggggctcgggacgcctcgggacgcctcggggtcgggctccggctgcggctgctgctgcggcgcccgcgctccggtgcgctccgcctcctgtgcccgccgcggagcgcagtctgcgcgcccgccgtgcgccctcagctccttttcctgagcccgccgcgatgggagctgcgcggggatccccggccagaccccgccggttgcctctgctcagcgtcctgctgctgccgctgctgggcggtacccagacagccattgtcttcatcaagcagccgtcctcccaggatgcactgcaggggcgccgggcgctgcttcgctgtgaggttgaggctccgggcccggtacatgtgtactggctgctcgatggggcccctgtccaggacacggagcggcgtttcgcccagggcagcagcctgagctttgcagctgtggaccggctgcaggactctggcaccttccagtgtgtggctcgggatgatgtcactggagaagaagcccgcagtgccaacgcctccttcaacatcaaatggattgaggcaggtcctgtggtcctgaagcatccagcctcggaagctgagatccagccacagacccaggtcacacttcgttgccacattgatgggcaccctcgatgaaagctttgccagggtggtgctggcaccccaggacgtggtagtagcgaggtatgaggaggccatgttccattgccagttctcagcccagccacccccgagcctgcagtggctctttgaggatgagactcccatcactaaccgcagtcgccccccacacctccgcagagccacagtgtttgccaacgggtctctgctgctgacccaggtccggccacgcaatgcagggatctaccgctgcattggccaggggcagaggggcccacccatcatcctggaagccacacttcacctagcagagattgaagacatgccgctatttgagccacgggtgtttacagctggcagcgaggagcgtgtgacctgccttccccccaagggtctgccagagcccagcgtgtggtgggagcacgcgggagtccggctgcccacccatggcagggtctaccagaagggccacgagctggtgttggccaatattgctgaaagtgatgctggtgtctacacctgccacgcggccaacctggctggtcagcggagacaggatgtcaacatcactgtggccactgtgccctcctggctgaagaagccccaagacagccagctggaggagggcaaacccggctacttggattgcctgacccaggccacaccaaaacctacagttgtctggtacagaaaccagatgctcatctcagaggactcacggttcgaggtcttcaagaatgggaccttgcgcatcaacagcgtggaggtgtatgatgggacatggtaccgttgtatgagcagcaccccagccggcagcatcgaggcgcaagcccgtgtccaagtgctggaaaagctcaagttcacaccaccaccccagccacagcagtgcatggagtttgacaaggaggccacggtgccctgttcagccacaggccgagagaagcccactattaagtgggaacgggcagatgggagcagcctcccagagtgggtgacagacaacgctgggaccctgcattttgcccgggtgactcgagatgacgctggcaactacacttgcattgcctccaacgggccgcagggccagattcgtgcccatgtccagctcactgtggcagtttttatcaccttcaaagtggaaccagagcgtacgactgtgtaccagggccacacagccctactgcagtgcgaggcccagggggaccccaagccgctgattcagtggaaaggcaaggaccgcatcctggaccccaccaagctgggacccaggatgcacatcttccagaatggctccctggtgatccatgacgtggcccctgaggactcaggccgctacacctgcattgcaggcaacagctgcaacatcaagcacacggaggcccccctctatgtcgtggacaagcctgtgccggaggagtcggagggccctggcagccctcccccctacaagatgatccagaccattgggttgtcggtgggtgccgctgtggcctacatcattgccgtgctgggcctcatgttctactgcaagaagcgctgcaaagccaagcggctgcagaagcagcccgagggcgaggagccagagatggaatgcctcaacggtgggcctttgcagaacgggcagccctcagcagagatccaagaagaagtggccttgaccagcttgggctccggccccgcggccaccaacaaacgccacagcacaagtgataagatgcacttcccacggtctagcctgcagcccatcaccacgctggggaagagtgagtttggggaggtgttcctggcaaaggctcagggcttggaggagggagtggcagagaccctggtacttgtgaagagcctgcagagcaaggatgagcagcagcagctggacttccggagggagttggagatgtttgggaagctgaaccacgccaacgtggtgcggctcctggggctgtgccgggaggctgagccccactacatggtgctggaatatgtggatctgggagacctcaagcagttcctgaggatttccaagagcaaggatgaaaaattgaagtcacagcccctcagcaccaagcagaaggtggccctatgcacccaggtagccctgggcatggagcacctgtccaacaaccgctttgtgcataaggacttggctgcgcgtaactgcctggtcagtgcccagagacaagtgaaggtgtctgccctgggcctcagcaaggatgtgtacaacagtgagtactaccacttccgccaggcctgggtgccgctgcgctggatgtcccccgaggccatcctggagggtgacttctctaccaagtctgatgtctgggccttcggtgtgctgatgtgggaagtgtttacacatggagagatgccccatggtgggcaggcagatgatgaagtactggcagatttgcaggctgggaaggctagacttcctcagcccgagggctgcccttccaaactctatcggctgatgcagcgctgctgggccctcagccccaaggaccggccctccttcagtgagattgccagcgccctgggagacagcaccgtggacagcaagccgtgaggagggagcccgctcaggatggcctgggcaggggaggacatctctagagggaagctcacagcatgatgggcaagatccctgtcctcctgggccctgaggcccctgccctagtgcaacaggcattgctgaggtctgagcagggcctggcctttcctcctcttcctcaccctcatcctttgggaggctgacttggacccaaactgggcgactagggctttgagctgggcagttttccctgccacctcttcctctatcagggacagtgtgggtgccacaggtaaccccaatttctggccttcaacttctccccttgaccgggtccaactctgccactcatctgccaactttgcctggggagggctaggcttgggatgagctgggtttgtggggagttccttaatattctcaagttctgggcacacagggttaatgagtctcttggcccactggtcccacttgggggtctagaccaggattatagaggacacagcaagtgagtcctccccactctgggcttgtgcacactgacccagacccacgtcttccccacccttctctcctttcctcatcctaagtgcctggcagatgaaggagttttcaggagcttttgacactatataaaccgccctttttgtatgcaccacgggcggcttttatatgtaattgcagcgtggggtgggtgggcatgggaggtaggggtgggccctggagatgaggagggtgggccatccttaccccacacttttattgttgtcgttttttgtttgttttgtttttttgtttttgtttttgtttttacactcgctgctctcaataaataagccttttttacaa

SEQ ID NO: 291894 - DNA, 507 bp, Homo sapiens
agcggggcgagagtggaagaccaggggacagaacagaaatccccatggtggccagagtgtcaggtctcatcgtgacgctcttgtcctcctccttcccaggtgggcctttgcagaacgggcagccctcagcagagatccaagaagaagtggccttgaccagcttgggctccggccccgcggccaccaacaaacgccacagcacaagtgataagatgcacttcccacggtctagcctgcagcccatcaccacgctggtgggtatgttgccttgactacagctgcccctgcctaactacaagtcacccgctgtgtcttgaggctgggtacgggctagtgttctgaagtccctgaaacctagaatgttagaggtggagggaagcataggtagagatctagcccagtgtggccccagagcctgttattcactgcccttcgtgcagattttgtcattcctgtgtactacctgtagtattatttacttgatgttttatttaaattgactcttta

SEQ ID NO: 291895 - DNA, 3637 bp, Homo sapiens
gacatcctcactctctgctaggatgaagtgtggcttccaggatgatgggtgggcccctctgcccacctaccaatggttccgagatgggacccccctttctgatggtcagagcaaccacacagtcagcagcaaggagcggaacctgacgctccggccagctggtcctgagcatagtgggctgtattcctgctgcgcccacagtgcttttggccaggcttgcagcagccagaacttcaccttgagcattgctgatgaaagctttgccagggtggtgctggcaccccaggacgtggtagtagcgaggtatgaggaggccatgttccattgccagttctcagcccagccacccccgagcctgcagtggctctttgaggatgagactcccatcactaaccgcagtcgccccccacacctccgcagagccacagtgtttgccaacgggtctctgctgctgacccaggtccggccacgcaatgcagggatctaccgctgcattggccaggggcagaggggcccacccatcatcctggaagccacacttcacctagcagagattgaagacatgccgctatttgagccacgggtgtttacagctggcagcgaggagcgtgtgacctgccttccccccaagggtctgccagagcccagcgtgtggtgggagcacgcgggagtccggctgcccacccatggcagggtctaccagaagggccacgagctggtgttggccaatattgctgaaagtgatgctggtgtctacacctgccacgcggccaacctggctggtcagcggagacaggatgtcaacatcactgtggccactgtgccctcctggctgaagaagccccaagacagccagctggaggagggcaaacccggctacttggattgcctgacccaggccacaccaaaacctacagttgtctggtacagaaaccagatgctcatctcagaggactcacggttcgaggtcttcaagaatgggaccttgcgcatcaacagcgtggaggtgtatgatgggacatggtaccgttgtatgagcagcaccccagccggcagcatcgaggcgcaagcccgtgtccaagtgctggaaaagctcaagttcacaccaccaccccagccacagcagtgcatggagtttgacaaggaggccacggtgccctgttcagccacaggccgagagaagcccactattaagtgggaacgggcagatgggagcagcctcccagagtgggtgacagacaacgctgggaccctgcattttgcccgggtgactcgagatgacgctggcaactacacttgcattgcctccaacgggccgcagggccagattcgtgcccatgtccagctcactgtggcagtttttatcaccttcaaagtggaaccagagcgtacgactgtgtaccagggccacacagccctactgcagtgcgaggcccagggggaccccaagccgctgattcagtggaaaggcaaggaccgcatcctggaccccaccaagctgggacccaggatgcacatcttccagaatggctccctggtgatccatgacgtggcccctgaggactcaggccgctacacctgcattgcaggcaacagctgcaacatcaagcacacggaggcccccctctatgtcgtggacaagcctgtgccggaggagtcggagggccctggcagccctcccccctacaagatgatccagaccattgggttgtcggtgggtgccgctgtggcctacatcattgccgtgctgggcctcatgttctactgcaagaagcgctgcaaagccaagcggctgcagaagcagcccgagggcgaggagccagagatggaatgcctcaacggtgggcctttgcagaacgggcagccctcagcagagatccaagaagaagtggccttgaccagcttgggctccggccccgcggccaccaacaaacgccacagcacaagtgataagatgcacttcccacggtctagcctgcagcccatcaccacgctggggaagagtgagtttggggaggtgttcctggcaaaggctcagggcttggaggagggagtggcagagaccctggtacttgtgaagagcctgcagagcaaggatgagcagcagcagctggacttccggagggagttggagatgtttgggaagctgaaccacgccaacgtggtgcggctcctggggctgtgccgggaggctgagccccactacatggtgctggaatatgtggatctgggagacctcaagcagttcctgaggatttccaagagcaaggatgaaaaattgaagtcacagcccctcagcaccaagcagaaggtggccctatgcacccaggtagccctgggcatggagcacctgtccaacaaccgctttgtgcataaggacttggctgcgcgtaactgcctggtcagtgcccagagacaagtgaaggtgtctgccctgggcctcagcaaggatgtgtacaacagtgagtactaccacttccgccaggcctgggtgccgctgcgctggatgtcccccgaggccatcctggagggtgacttctctaccaagtctgatgtctgggccttcggtgtgctgatgtgggaagtgtttacacatggagagatgccccatggtgggcaggcagatgatgaagtactggcagatttgcaggctgggaaggctagacttcctcagcccgagggctgcccttccaaactctatcggctgatgcagcgctgctgggccctcagccccaaggaccggccctccttcagtgagattgccagcgccctgggagacagcaccgtggacagcaagccgtgaggagggagcccgctcaggatggcctgggcaggggaggacatctctagagggaagctcacagcatgatgggcaagatccctgtcctcctgggccctgaggcccctgccctagtgcaacaggcattgctgaggtctgagcagggcctggcctttcctcctcttcctcaccctcatcctttgggaggctgacttggacccaaactgggcgactagggctttgagctgggcagttttccctgccacctcttcctctatcagggacagtgtgggtgccacaggtaaccccaatttctggccttcaacttctccccttgaccgggtccaactctgccactcatctgccaactttgcctggggagggctaggcttgggatgagctgggtttgtggggagttccttaatattctcaagttctgggcacacagggttaatgagtctcttggcccactggtcccacttgggggtctagaccaggattatagaggacacagcaagtgagtcctccccactctgggcttgtgcacactgacccagacccacgtcttccccacccttctctcctttcctcatcctaagtgcctggcagatgaaggagttttcaggagcttttgacactatataaaccgccctttttgtatgcaccacgggcggcttttatatgtaattgcagcgtggggtgggtgggcatgggaggtaggggtgggccctggagatgaggagggtgggccatccttaccccacacttttattgttgtcgttttttgtttgttttgtttttttgtttttgtttttgtttttacactcgctgctctcaataaataagccttttttacaa

SEQ ID NO: 291896 - DNA, 4084 bp, Homo sapiens
cggggactcggaggtactgggcgcgcgcggctccggggctcgggacgcctcgggacgcctcggggtcgggctccggctgcggctgctgctgcggcgcccgcgctccggtgcgctccgcctcctgtgcccgccgcggagcgcagtctgcgcgcccgccgtgcgccctcagctccttttcctgagcccgccgcgatgggagctgcgcggggatccccggccagaccccgccggttgcctctgctcagcgtcctgctgctgccgctgctgggcggtacccagacagccattgtcttcatcaagcagccgtcctcccaggatgcactgcaggggcgccgggcgctgcttcgctgtgaggttgaggctccgggcccggtacatgtgtactggctgctcgatggggcccctgtccaggacacggagcggcgtttcgcccagggcagcagcctgagctttgcagctgtggaccggctgcaggactctggcaccttccagtgtgtggctcgggatgatgtcactggagaagaagcccgcagtgccaacgcctccttcaacatcaaatggattgaggcaggtcctgtggtcctgaagcatccagcctcggaagctgagatccagccacagacccaggtcacacttcgttgccacattgatgggcaccctcggcccacctaccaatggttccgagatgggacccccctttctgatggtcagagcaaccacacagtcagcagcaaggagcggaacctgacgctccggccagctggtcctgagcatagtgggctgtattcctgctgcgcccacagtgcttttggccaggcttgcagcagccagaacttcaccttgagcattgctgatgaaagctttgccagggtggtgctggcaccccaggacgtggtagtagcgaggtatgaggaggccatgttccattgccagttctcagcccagccacccccgagcctgcagtggctctttgaggatgagactcccatcactaaccgcagtcgccccccacacctccgcagagccacagtgtttgccaacgggtctctgctgctgacccaggtccggccacgcaatgcagggatctaccgctgcattggccaggggcagaggggcccacccatcatcctggaagccacacttcacctagcagagattgaagacatgccgctatttgagccacgggtgtttacagctggcagcgaggagcgtgtgacctgccttccccccaagggtctgccagagcccagcgtgtggtgggagcacgcgggagtccggctgcccacccatggcagggtctaccagaagggccacgagctggtgttggccaatattgctgaaagtgatgctggtgtctacacctgccacgcggccaacctggctggtcagcggagacaggatgtcaacatcactgtggccactgtgccctcctggctgaagaagccccaagacagccagctggaggagggcaaacccggctacttggattgcctgacccaggccacaccaaaacctacagttgtctggtacagaaaccagatgctcatctcagaggactcacggttcgaggtcttcaagaatgggaccttgcgcatcaacagcgtggaggtgtatgatgggacatggtaccgttgtatgagcagcaccccagccggcagcatcgaggcgcaagcccgtgtccaagtgctggaaaagctcaagttcacaccaccaccccagccacagcagtgcatggagtttgacaaggaggccacggtgccctgttcagccacaggccgagagaagcccactattaagtgggaacgggcagatgggagcagcctcccagagtgggtgacagacaacgctgggaccctgcattttgcccgggtgactcgagatgacgctggcaactacacttgcattgcctccaacgggccgcagggccagattcgtgcccatgtccagctcactgtggcagtttttatcaccttcaaagtggaaccagagcgtacgactgtgtaccagggccacacagccctactgcagtgcgaggcccagggggaccccaagccgctgattcagtggaaaggcaaggaccgcatcctggaccccaccaagctgggacccaggatgcacatcttccagaatggctccctggtgatccatgacgtggcccctgaggactcaggccgctacacctgcattgcaggcaacagctgcaacatcaagcacacggaggcccccctctatgtcgtggacaagcctgtgccggaggagtcggagggccctggcagccctcccccctacaagatgatccagaccattgggttgtcggtgggtgccgctgtggcctacatcattgccgtgctgggcctcatgttccgcggccaccaacaaacgccacagcacaagtgataagatgcacttcccacggtctagcctgcagcccatcaccacgctggggaagagtgagtttggggaggtgttcctggcaaaggctcagggcttggaggagggagtggcagagaccctggtacttgtgaagagcctgcagagcaaggatgagcagcagcagctggacttccggagggagttggagatgtttgggaagctgaaccacgccaacgtggtgcggctcctggggctgtgccgggaggctgagccccactacatggtgctggaatatgtggatctgggagacctcaagcagttcctgaggatttccaagagcaaggatgaaaaattgaagtcacagcccctcagcaccaagcagaaggtggccctatgcacccaggtagccctgggcatggagcacctgtccaacaaccgctttgtgcataaggacttggctgcgcgtaactgcctggtcagtgcccagagacaagtgaaggtgtctgccctgggcctcagcaaggatgtgtacaacagtgagtactaccacttccgccaggcctgggtgccgctgcgctggatgtcccccgaggccatcctggagggtgacttctctaccaagtctgatgtctgggccttcggtgtgctgatgtgggaagtgtttacacatggagagatgccccatggtgggcaggcagatgatgaagtactggcagatttgcaggctgggaaggctagacttcctcagcccgagggctgcccttccaaactctatcggctgatgcagcgctgctgggccctcagccccaaggaccggccctccttcagtgagattgccagcgccctgggagacagcaccgtggacagcaagccgtgaggagggagcccgctcaggatggcctgggcaggggaggacatctctagagggaagctcacagcatgatgggcaagatccctgtcctcctgggccctgaggcccctgccctagtgcaacaggcattgctgaggtctgagcagggcctggcctttcctcctcttcctcaccctcatcctttgggaggctgacttggacccaaactgggcgactagggctttgagctgggcagttttccctgccacctcttcctctatcagggacagtgtgggtgccacaggtaaccccaatttctggccttcaacttctccccttgaccgggtccaactctgccactcatctgccaactttgcctggggagggctaggcttgggatgagctgggtttgtggggagttccttaatattctcaagttctgggcacacagggttaatgagtctcttggcccactggtcccacttgggggtctagaccaggattatagaggacacagcaagtgagtcctccccactctgggcttgtgcacactgacccagacccacgtcttccccacccttctctcctttcctcatcctaagtgcctggcagatgaaggagttttcaggagcttttgacactatataaaccgccctttttgtatgcaccacgggcggcttttatatgtaattgcagcgtggggtgggtgggcatgggaggtaggggtgggccctggagatgaggagggtgggccatccttaccccacacttttattgttgtcgttttttgtttgttttgtttttttgtttttgtttttgtttttacactcgctgctctcaataaataagccttttttacaa

SEQ ID NO: 291897 - DNA, 1895 bp, Homo sapiens
agcggggcgagagtggaagaccaggggacagaacagaaatccccatggtggccagagtgtcaggtctcatcgtgacgctcttgtcctcctccttcccaggtgggcctttgcagaacgggcagccctcagcagagatccaagaagaagtggccttgaccagcttgggctccggccccgcggccaccaacaaacgccacagcacaagtgataagatgcacttcccacggtctagcctgcagcccatcaccacgctggggaagagtgagtttggggaggtgttcctggcaaaggctcagggcttggaggagggagtggcagagaccctggtacttgtgaagagcctgcagagcaaggatgagcagcagcagctggacttccggagggagttggagatgtttgggaagctgaaccacgccaacgtggtgcggctcctggggctgtgccgggaggctgagccccactacatggtgctggaatatgtggatctgggagacctcaagcagttcctgaggatttccaagagcaaggatgaaaaattgaagtcacagcccctcagcaccaagcagaaggtggccctatgcacccaggtagccctgggcatggagcacctgtccaacaaccgctttgtgcataaggacttggctgcgcgtaactgcctggtcagtgcccagagacaagtgaaggtgtctgccctgggcctcagcaaggatgtgtacaacagtgagtactaccacttccgccaggcctgggtgccgctgcgctggatgtcccccgaggccatcctggagggtgacttctctaccaagtctgatgtctgggccttcggtgtgctgatgtgggaagtgtttacacatggagagatgccccatggtgggcaggcagatgatgaagtactggcagatttgcaggctgggaaggctagacttcctcagcccgagggctgcccttccaaactctatcggctgatgcagcgctgctgggccctcagccccaaggaccggccctccttcagtgagattgccagcgccctgggagacagcaccgtggacagcaagccgtgaggagggagcccgctcaggatggcctgggcaggggaggacatctctagagggaagctcacagcatgatgggcaagatccctgtcctcctgggccctgaggcccctgccctagtgcaacaggcattgctgaggtctgagcagggcctggcctttcctcctcttcctcaccctcatcctttgggaggctgacttggacccaaactgggcgactagggctttgagctgggcagttttccctgccacctcttcctctatcagggacagtgtgggtgccacaggtaaccccaatttctggccttcaacttctccccttgaccgggtccaactctgccactcatctgccaactttgcctggggagggctaggcttgggatgagctgggtttgtggggagttccttaatattctcaagttctgggcacacagggttaatgagtctcttggcccactggtcccacttgggggtctagaccaggattatagaggacacagcaagtgagtcctccccactctgggcttgtgcacactgacccagacccacgtcttccccacccttctctcctttcctcatcctaagtgcctggcagatgaaggagttttcaggagcttttgacactatataaaccgccctttttgtatgcaccacgggcggcttttatatgtaattgcagcgtggggtgggtgggcatgggaggtaggggtgggccctggagatgaggagggtgggccatccttaccccacacttttattgttgtcgttttttgtttgttttgtttttttgtttttgtttttgtttttacactcgctgctctcaataaataagccttttttacaa

SEQ ID NO: 291898 - DNA, 4778 bp, Homo sapiens
  misc_feature (4253)..(4253): n is a, c, g, or t
  misc_feature (4264)..(4264): n is a, c, g, or t
cggggactcggaggtactgggcgcgcgcggctccggggctcgggacgcctcgggacgcctcggggtcgggctccggctgcggctgctgctgcggcgcccgcgctccggtgcgctccgcctcctgtgcccgccgcggagcgcagtctgcgcgcccgccgtgcgccctcagctccttttcctgagcccgccgcgatgggagctgcgcggggatccccggccagaccccgccggttgcctctgctcagcgtcctgctgctgccgctgctgggcggtacccagacagccattgtcttcatcaagcagccgtcctcccaggatgcactgcaggggcgccgggcgctgcttcgctgtgaggttgaggctccgggcccggtacatgtgtactggctgctcgatggggcccctgtccaggacacggagcggcgtttcgcccagggcagcagcctgagctttgcagctgtggaccggctgcaggactctggcaccttccagtgtgtggctcgggatgatgtcactggagaagaagcccgcagtgccaacgcctccttcaacatcaaatggattgaggcaggtcctgtggtcctgaagcatccagcctcggaagctgagatccagccacagacccaggtcacacttcgttgccacattgatgggcaccctcggcccacctaccaatggttccgagatgggacccccctttctgatggtcagagcaaccacacagtcagcagcaaggagcggaacctgacgctccggccagctggtcctgagcatagtgggctgtattcctgctgcgcccacagtgcttttggccaggcttgcagcagccagaacttcaccttgagcattgctgatgaaagctttgccagggtggtgctggcaccccaggacgtggtagtagcgaggtatgaggaggccatgttccattgccagttctcagcccagccacccccgagcctgcagtggctctttgaggatgagactcccatcactaaccgcagtcgccccccacacctccgcagagccacagtgtttgccaacgggtctctgctgctgacccaggtccggccacgcaatgcagggatctaccgctgcattggccaggggcagaggggcccacccatcatcctggaagccacacttcacctagcagagattgaagacatgccgctatttgagccacgggtgtttacagctggcagcgaggagcgtgtgacctgccttccccccaagggtctgccagagcccagcgtgtggtgggagcacgcgggagtccggctgcccacccatggcagggtctaccagaagggccacgagctggtgttggccaatattgctgaaagtgatgctggtgtctacacctgccacgcggccaacctggctggtcagcggagacaggatgtcaacatcactgtggccactgtgccctcctggctgaagaagccccaagacagccagctggaggagggcaaacccggctacttggattgcctgacccaggccacaccaaaacctacagttgtctggtacagaaaccagatgctcatctcagaggactcacggttcgaggtcttcaagaatgggaccttgcgcatcaacagcgtggaggtgtatgatgggacatggtaccgttgtatgagcagcaccccagccggcagcatcgaggcgcaagcccgtgtccaagtgctggaaaagctcaagttcacaccaccaccccagccacagcagtgcatggagtttgacaaggaggccacggtgccctgttcagccacaggccgagagaagcccactattaagtgggaacgggcagatgggagcagcctcccagagtgggtgacagacaacgctgggaccctgcattttgcccgggtgactcgagatgacgctggcaactacacttgcattgcctccaacgggccgcagggccagattcgtgcccatgtccagctcactgtggcagtttttatcaccttcaaagtggaaccagagcgtacgactgtgtaccagggccacacagccctactgcagtgcgaggcccagggggaccccaagccgctgattcagtggaaaggcaaggaccgcatcctggaccccaccaagctgggacccaggatgcacatcttccagaatggctccctggtgatccatgacgtggcccctgaggactcaggccgctacacctgcattgcaggcaacagctgcaacatcaagcacacggaggcccccctctatgtcgtggacaagcctgtgccggaggagtcggagggccctggcagccctcccccctacaagatgatccagaccattgggttgtcggtgggtgccgctgtggcctacatcattgccgtgctgggcctcatgttctactgcaagaagcgctgcaaagccaagcggctgcagaagcagcccgagggcgaggagccagagatggaatgcctcaacggtgggcctttgcagaacgggcagccctcagcagagatccaagaagaagtggccttgaccagcttgggctccggccccgcggccaccaacaaacgccacagcacaagtgataagatgcacttcccacggtctagcctgcagcccatcaccacgctggggaagagtgagtttggggaggtgttcctggcaaaggctcagggcttggaggagggagtggcagagaccctggtacttgtgaagagcctgcagagcaaggatgagcagcagcagctggacttccggagggagttggagatgtttgggaagctgaaccacgccaacgtggtgcggctcctggggctgtgccgggaggctgagccccactacatggtgctggaatatgtggatctgggagacctcaagcagttcctgaggatttccaagagcaaggatgaaaaattgaagtcacagcccctcagcaccaagcagaaggtggccctatgcacccaggtagccctgggcatggagcacctgtccaacaaccgctttgtgcataaggacttggctgcgcgtaactgcctggtcagtgcccagagacaagtgaaggtgtctgccctgggcctcagcaaggatgtgtacaacagtgagtactaccacttccgccaggcctgggtgccgctgcgctggatgtcccccgaggccatcctggagggtgacttctctaccaagtctgatgtctgggccttcggtgtgctgatgtgggaagtgtttacacatggagagatgccccatggtgggcaggcagatgatgaagtactggcagatttgcaggctgggaaggctagacttcctcagcccgagggctgcccttccaaactctatcggctgatgcagcgctgctgggccctcagccccaaggaccggccctccttcagtgagattgccagcgccctgggagacagcaccgtggacagcaagccgtgaggagggagcccgctcaggatggcctgggcaggggaggacatctctagagggaagctcacagcatgatgggcaagatccctgtcctcctgggccctgaggcccctgccctagtgcaacaggcattgctgaggtctgagcagggcctggcctttcctcctcttcctcaccctcatcctttgggaggctgacttggacccaaactgggcgactagggctttgagctgggcagttttccctgccacctcttcctctatcagggacagtgtgggtgccacaggtaaccccaatttctggccttcaacttctccccttgaccgggtccaactctgccactcatctgccaactttgcctggggagggctaggcttgggatgagctgggtttgtggggagttccttaatattctcaagttctgggcacacagggttaatgagtctcttggcccactggtcccacttgggggtctagaccaggattatagaggacacagcaagtgagtcctccccactctgggcttgtgcacactgacccagacccacgtcttccccacccttctctcctttcctcatcctaagtgcctggcagatgaaggagttttcaggagcttttgacactatataaaccgccctttttgtatgcaccacgggcggcttttatatgtaattgcagcgtggggtgggtgggcatgggaggtaggggtgggccctggagatgaggagggtgggccatccttaccccacacttttattgttgtcgttttttgtttgttttgtttttttgtttttgtttttgtttttacactcgctgctctcaataaataagccttttttacaaaaaaaaaaaaaaanaaaaaaaaaanaaaaaaaaaaaaaaaaaaaaacaaaaaaaaaaaaaaaaaacaaaaaaaaaaaaaaagaaagaaaagaaaaaaaacaacaaagacgggggggcgcaccacaaacaagcccaacaggagaacaaccataagcgacacgcagatagtgaaaaacgaggagggaccgccacaagaggggacgacgctaacaaaaaaagagcgaggaggcgccgacgggcgacaaacaaagagaggagaaggggagagaaacacacgcgacgcgaggacatgatgagaggaaagagagaccactatagcattggtggggggggaggaaataatgtgggaggcggaaccacaccgccacccacacgaaagacagaagaaaaccgcgacgaaggcagggaaaaaccaaacaacaactaccagcggagaaccgaggaggcggagagaaacagcaggcacaagcaccagatgaccgcgcgcagagaaagagagacgagaaagcgaaaagagtcaagcacggcaaaaatcacag

SEQ ID NO: 291899 - DNA, 3487 bp, Homo sapiens
cggggactcggaggtactgggcgcgcgcggctccggggctcgggacgcctcgggacgcctcggggtcgggctccggctgcggctgctgctgcggcgcccgcgctccggtgcgctccgcctcctgtgcccgccgcggagcgcagtctgcgcgcccgccgtgcgccctcagctccttttcctgagcccgccgcgatgggagctgcgcggggatccccggccagaccccgccggttgcctctgctcagcgtcctgctgctgccgctgctgggcggtacccagacagccattgtcttcatcaagcagccgtcctcccaggatgcactgcaggggcgccgggcgctgcttcgctgtgaggttgaggctccgggcccggtacatgtgtactggctgctcgatggggcccctgtccaggacacggagcggcgtttcgcccagggcagcagcctgagctttgcagctgtggaccggctgcaggactctggcaccttccagtgtgtggctcgggatgatgtcactggagaagaagcccgcagtgccaacgcctccttcaacatcaaatggattgaggcaggtcctgtggtcctgaagcatccagcctcggaagctgagatccagccacagacccaggtcacacttcgttgccacattgatgggcaccctcggcccacctaccaatggttccgagatgggacccccctttctgatggtcagagcaaccacacagtcagcagcaaggagcggaacctgacgctccggccagctggtcctgagcatagtgggctgtattcctgctgcgcccacagtgcttttggccaggcttgcagcagccagaacttcaccttgagcattgctgatgaaagctttgccagggtggtgctggcaccccaggacgtggtagtagcgaggtatgaggaggccatgttccattgccagttctcagcccagccacccccgagcctgcagtggctctttgaggatgagactcccatcactaaccgcagtcgccccccacacctccgcagagccacagtgtttgccaacgggtctctgctgctgacccaggtccggccacgcaatgcagggatctaccgctgcattggccaggggcagaggggcccacccatcatcctggaagccacacttcacctagcagagattgaagacatgccgctatttgagccacgggtgtttacagctggcagcgaggagcgtgtgacctgccttccccccaagggtctgccagagcccagcgtgtggtgggagcacgcgggagtccggctgcccacccatggcagggtctaccagaagggccacgagctggtgttggccaatattgctgaaagtgatgctggtgtctacacctgccacgcggccaacctggctggtcagcggagacaggatgtcaacatcactgtggccactgtgccctcctggctgaagaagccccaagacagccagctggaggagggcaaacccggctacttggattgcctgacccaggccacaccaaaacctacagttgtctggtacagaaaccagatgctcatctcagaggactcacggttcgaggtcttcaagaatgggaccttgcgcatcaacagcgtggaggtgtatgatgggacatggtaccgttgtatgagcagcaccccagccggcagcatcgaggcgcaagcccgtgtccaagtgctggaaaagctcaagttcacaccaccaccccagccacagcagtgcatggagtttgacaaggaggccacggtgccctgttcagccacaggccgagagaagcccactattaagtgggaacgggcagatgggagcagcctcccagagtgggtgacagacaacgctgggaccctgcattttgcccgggtgactcgagatgacgctggcaactacacttgcattgcctccaacgggccgcagggccagattcgtgcccatgtccagctcactgtggcagtttttatcaccttcaaagtggaaccagagcgtacgactgtgtaccagggccacacagccctactgcagtgcgaggcccagggggaccccaagccgctgattcagtggaaaggcaaggaccgcatcctggaccccaccaagctgggacccaggatgcacatcttccagaatggctccctggtgatccatgacgtggcccctgaggactcaggccgctacacctgcattgcaggcaacagctgcaacatcaagcacacggaggcccccctctatgtcgtggacaagcctgtgccggaggagtcggagggccctggcagccctcccccctacaagatgatccagaccattgggttgtcggtgggtgccgctgtggcctacatcattgccgtgctgggcctcatgttctactgcaagaagcgctgcaaagccaagcggctgcagaagcagcccgagggcgaggagccagagatggaatgcctcaacggtgggcctttgcagaacgggcagccctcagcagagatccaagaagaagtggccttgaccagcttgggctccggccccgcggccaccaacaaacgccacagcacaagtgataagatgcacttcccacggtctagcctgcagcccatcaccacgctggggaagagtgagtttggggaggtgttcctggcaaaggctcagggcttggaggagggagtggcagagaccctggtacttgtgaagagcctgcagagcaaggatgagcagcagcagctggacttccggagggagttggagatgtttgggaagctgaaccacgccaacgtggtgcggctcctggggctgtgccgggaggctgagccccactacatggtgctggaatatgtggatctgggagacctcaagcagttcctgaggatttccaagagcaaggatgaaaaattgaagtcacagcccctcagcaccaagcagaaggtggccctatgcacccaggtagccctgggcatggagcacctgtccaacaaccgctttgtgcataaggacttggctgcgcgtaactgcctggtcagtgcccagagacaagtgaaggtgtctgccctgggcctcagcaaggatgtgtacaacagtgagtactaccacttccgccaggcctgggtgccgctgcgctggatgtcccccgaggccatcctggagggtgacttctctaccaagtctgatgtctgggccttcggtgtgctgatgtgggaagtgtttacacatggagagatgccccatggtgggcaggcagatgatgaagtactggcaggagttttcaggagcttttgacactatataaaccgccctttttgtatgcaccacgggcggcttttatatgtaattgcagcgtggggtgggtgggcatgggaggtaggggtgggccctggagatgaggagggtgggccatccttaccccacacttttattgttgtcgttttttgtttgttttgtttttttgtttttgtttttgtttttacactcgctgctctcaataaataagccttttttacaa

SEQ ID NO: 291900 - DNA, 3216 bp, Homo sapiens
cggggactcggaggtactgggcgcgcgcggctccggggctcgggacgcctcgggacgcctcggggtcgggctccggctgcggctgctgctgcggcgcccgcgctccggtgcgctccgcctcctgtgcccgccgcggagcgcagtctgcgcgcccgccgtgcgccctcagctccttttcctgagcccgccgcgatgggagctgcgcggggatccccggccagaccccgccggttgcctctgctcagcgtcctgctgctgccgctgctgggcggtacccagacagccattgtcttcatcaagcagccgtcctcccaggatgcactgcaggggcgccgggcgctgcttcgctgtgaggttgaggctccgggcccggtacatgtgtactggctgctcgatggggcccctgtccaggacacggagcggcgtttcgcccagggcagcagcctgagctttgcagctgtggaccggctgcaggactctggcaccttccagtgtgtggctcgggatgatgtcactggagaagaagcccgcagtgccaacgcctccttcaacatcaaatggattgaggcaggtcctgtggtcctgaagcatccagcctcggaagctgagatccagccacagacccaggtcacacttcgttgccacattgatgggcaccctcggcccacctaccaatggttccgagatgggacccccctttctgatggtcagagcaaccacacagtcagcagcaaggagcggaacctgacgctccggccagctggtcctgagcatagtgggctgtattcctgctgcgcccacagtgcttttggccaggcttgcagcagccagaacttcaccttgagcattgctgatgaaagctttgccagggtggtgctggcaccccaggacgtggtagtagcgaggtatgaggaggccatgttccattgccagttctcagcccagccacccccgagcctgcagtggctctttgaggatgagactcccatcactaaccgcagtcgccccccacacctccgcagagccacagtgtttgccaacgggtctctgctgctgacccaggtccggccacgcaatgcagggatctaccgctgcattggccaggggcagaggggcccacccatcatcctggaagccacacttcacctagcagagattgaagacatgccgctatttgagccacgggtgtttacagctggcagcgaggagcgtgtgacctgccttccccccaagggtctgccagagcccagcgtgtggtgggagcacgcgggagtccggctgcccacccatggcagggtctaccagaagggccacgagctggtgttggccaatattgctgaaagtgatgctggtgtctacacctgccacgcggccaacctggctggtcagcggagacaggatgtcaacatcactgtggccactgtgccctcctggctgaagaagccccaagacagccagctggaggagggcaaacccggctacttggattgcctgacccaggccacaccaaaacctacagttgtctggtacagaaaccagatgctcatctcagaggactcacggttcgaggtcttcaagaatgggaccttgcgcatcaacagcgtggaggtgtatgatgggacatggtaccgttgtatgagcagcaccccagccggcagcatcgaggcgcaagcccgtgtccaagtgctggaaaagctcaagttcacaccaccaccccagccacagcagtgcatggagtttgacaaggaggccacggtgccctgttcagccacaggccgagagaagcccactattaagtgggaacgggcagatgggagcagcctcccagagtgggtgacagacaacgctgggaccctgcattttgcccgggtgactcgagatgacgctggcaactacacttgcattgcctccaacgggccgcagggccagattcgtgcccatgtccagctcactgtggcagtttttatcaccttcaaagtggaaccagagcgtacgactgtgtaccagggccacacagccctactgcagtgcgaggcccagggggaccccaagccgctgattcagtggaaaggcaaggaccgcatcctggaccccaccaagctgggacccaggatgcacatcttccagaatggctccctggtgatccatgacgtggcccctgaggactcaggccgctacacctgcattgcaggcaacagctgcaacatcaagcacacggaggcccccctctatgtcgtggacaagcctgtgccggaggagtcggagggccctggcagccctcccccctacaagatgatccagaccattgggttgtcggtgggtgccgctgtggcctacatcattgccgtgctgggcctcatgttctactgcaagaagcgctgcaaagccaagcggctgcagaagcagcccgagggcgaggagccagagatggaatgcctcaacggtgggcctttgcagaacgggcagccctcagcagagatccaagaagaagtggccttgaccagcttgggctccggccccgcggccaccaacaaacgccacagcacaagtgataagatgcacttcccacggtctagcctgcagcccatcaccacgctggggaagagtgagtttggggaggtgttcctggcaaaggctcagggcttggaggagggagtggcagagaccctggtacttgtgaagagcctgcagagcaaggatgagcagcagcagctggacttccggagggagttggagatgtttgggaagctgaaccacgccaacgtggtgcggctcctggggctgtgccgggaggctgagccccactacatggtgctggaatatgtggatctggtatgctgttggcaggggacgtgggggtctcgggtagggagggcagtgtcctacaaaggtgggagtcagtggttggagcaccgtgaaaaccttgtctcgtgcagtctcagccgagacctcacctgcctgctgttacactttgcccaccttatgatgctcagcttctgccttccctgctcttggatgcctgctttccctttatcagcacccagtctttccatctgtatctcaggggcgttggtcctaagtttttctgggacttctcactgtcacactgcagggatgccttccaggtcatcttctctgactcttgttttctttggtttgttattttttcctccccaaaagcttgtccccacttgagaataaatatatcagaaccca

SEQ ID NO: 291901 - DNA, 2888 bp, Homo sapiens
cggggactcggaggtactgggcgcgcgcggctccggggctcgggacgcctcgggacgcctcggggtcgggctccggctgcggctgctgctgcggcgcccgcgctccggtgcgctccgcctcctgtgcccgccgcggagcgcagtctgcgcgcccgccgtgcgccctcagctccttttcctgagcccgccgcgatgggagctgcgcggggatccccggccagaccccgccggttgcctctgctcagcgtcctgctgctgccgctgctgggcggtacccagacagccattgtcttcatcaagcagccgtcctcccaggatgcactgcaggggcgccgggcgctgcttcgctgtgaggttgaggctccgggcccggtacatgtgtactggctgctcgatggggcccctgtccaggacacggagcggcgtttcgcccagggcagcagcctgagctttgcagctgtggaccggctgcaggactctggcaccttccagtgtgtggctcgggatgatgtcactggagaagaagcccgcagtgccaacgcctccttcaacatcaaatggattgaggcaggtcctgtggtcctgaagcatccagcctcggaagctgagatccagccacagacccaggtcacacttcgttgccacattgatgggcaccctcggcccacctaccaatggttccgagatgggacccccctttctgatggtcagagcaaccacacagtcagcagcaaggagcggaacctgacgctccggccagctggtcctgagcatagtgggctgtattcctgctgcgcccacagtgcttttggccaggcttgcagcagccagaacttcaccttgagcattgctgatgaaagctttgccagggtggtgctggcaccccaggacgtggtagtagcgaggtatgaggaggccatgttccattgccagttctcagcccagccacccccgagcctgcagtggctctttgaggatgagactcccatcactaaccgcagtcgccccccacacctccgcagagccacagtgtttgccaacgggtctctgctgctgacccaggtccggccacgcaatgcagggatctaccgctgcattggccaggggcagaggggcccacccatcatcctggaagccacacttcacctagcagagattgaagacatgccgctatttgagccacgggtgtttacagctggcagcgaggagcgtgtgacctgccttccccccaagggtctgccagagcccagcgtgtggtgggagcacgcgggagtccggctgcccacccatggcagggtctaccagaagggccacgagctggtgttggccaatattgctgaaagtgatgctggtgtctacacctgccacgcggccaacctggctggtcagcggagacaggatgtcaacatcactgtggccactgtgccctcctggctgaagaagccccaagacagccagctggaggagggcaaacccggctacttggattgcctgacccaggccacaccaaaacctacagttgtctggtacagaaaccagatgctcatctcagaggactcacggttcgaggtcttcaagaatgggaccttgcgcatcaacagcgtggaggtgtatgatgggacatggtaccgttgtatgagcagcaccccagccggcagcatcgaggcgcaagcccgtgtccaagtgctggaaaagctcaagttcacaccaccaccccagccacagcagtgcatggagtttgacaaggaggccacggtgccctgttcagccacaggccgagagaagcccactattaagtgggaacgggcagatgggagcagcctcccagagtgggtgacagacaacgctgggaccctgcattttgcccgggtgactcgagatgacgctggcaactacacttgcattgcctccaacgggccgcagggccagattcgtgcccatgtccagctcactgtggcagtttttatcaccttcaaagtggaaccagagcgtacgactgtgtaccagggccacacagccctactgcagtgcgaggcccagggggaccccaagccgctgattcagtggaaaggcaaggaccgcatcctggaccccaccaagctgggacccaggatgcacatcttccagaatggctccctggtgatccatgacgtggcccctgaggactcaggccgctacacctgcattgcaggcaacagctgcaacatcaagcacacggaggcccccctctatgtcgtggacaagcctgtgccggaggagtcggagggccctggcagccctcccccctacaagatgatccagaccattgggttgtcggtgggtgccgctgtggcctacatcattgccgtgctgggcctcatgttctactgcaagaagcgctgcaaagccaagcggctgcagaagcagcccgagggcgaggagccagagatggaatgcctcaacggtgggcctttgcagaacgggcagccctcagcagagatccaagaagaagtggccttgaccagcttgggctccggccccgcggccaccaacaaacgccacagcacaagtgataagatgcacttcccacggtctagcctgcagcccatcaccacgctggcccacccttctctcctttcctcatcctaagtgcctggcagatgaaggagttttcaggagcttttgacactatataaaccgccctttttgtatgcaccacgggcggcttttatatgtaattgcagcgtggggtgggtgggcatgggaggtaggggtgggccctggagatgaggagggtgggccatccttaccccacacttttattgttgtcgttttttgtttgttttgtttttttgtttttgtttttgtttttacactcgctgctctcaataaataagccttttttacaa

SEQ ID NO: 291902 - DNA, 2697 bp, Homo sapiens
  misc_feature (2618)..(2618): n is a, c, g, or t
  misc_feature (2623)..(2623): n is a, c, g, or t
  misc_feature (2628)..(2628): n is a, c, g, or t
  misc_feature (2632)..(2632): n is a, c, g, or t
  misc_feature (2651)..(2651): n is a, c, g, or t
  misc_feature (2666)..(2666): n is a, c, g, or t
  misc_feature (2678)..(2678): n is a, c, g, or t
  misc_feature (2693)..(2693): n is a, c, g, or t
cggggactcggaggtactgggcgcgcgcggctccggggctcgggacgcctcgggacgcctcggggtcgggctccggctgcggctgctgctgcggcgcccgcgctccggtgcgctccgcctcctgtgcccgccgcggagcgcagtctgcgcgcccgccgtgcgccctcagctccttttcctgagcccgccgcgatgggagctgcgcggggatccccggccagaccccgccggttgcctctgctcagcgtcctgctgctgccgctgctgggcggtacccagacagccattgtcttcatcaagcagccgtcctcccaggatgcactgcaggggcgccgggcgctgcttcgctgtgaggttgaggctccgggcccggtacatgtgtactggctgctcgatggggcccctgtccaggacacggagcggcgtttcgcccagggcagcagcctgagctttgcagctgtggaccggctgcaggactctggcaccttccagtgtgtggctcgggatgatgtcactggagaagaagcccgcagtgccaacgcctccttcaacatcaaatggattgaggcaggtcctgtggtcctgaagcatccagcctcggaagctgagatccagccacagacccaggtcacacttcgttgccacattgatgggcaccctcggcccacctaccaatggttccgagatgggacccccctttctgatggtcagagcaaccacacagtcagcagcaaggagcggaacctgacgctccggccagctggtcctgagcatagtgggctgtattcctgctgcgcccacagtgcttttggccaggcttgcagcagccagaacttcaccttgagcattgctgatgaaagctttgccagggtggtgctggcaccccaggacgtggtagtagcgaggtatgaggaggccatgttccattgccagttctcagcccagccacccccgagcctgcagtggctctttgaggatgagactcccatcactaaccgcagtcgccccccacacctccgcagagccacagtgtttgccaacgggtctctgctgctgacccaggtccggccacgcaatgcagggatctaccgctgcattggccaggggcagaggggcccacccatcatcctggaagccacacttcacctagcagagattgaagacatgccgctatttgagccacgggtgtttacagctggcagcgaggagcgtgtgacctgccttccccccaagggtctgccagagcccagcgtgtggtgggagcacgcgggagtccggctgcccacccatggcagggtctaccagaagggccacgagctggtgttggccaatattgctgaaagtgatgctggtgtctacacctgccacgcggccaacctggctggtcagcggagacaggatgtcaacatcactgtggccactgtgccctcctggctgaagaagccccaagacagccagctggaggagggcaaacccggctacttggattgcctgacccaggccacaccaaaacctacagttgtctggtacagaaaccagatgctcatctcagaggactcacggttcgaggtcttcaagaatgggaccttgcgcatcaacagcgtggaggtgtatgatgggacatggtaccgttgtatgagcagcaccccagccggcagcatcgaggcgcaagcccgtgtccaagtgctggaaaagctcaagttcacaccaccaccccagccacagcagtgcatggagtttgacaaggaggccacggtgccctgttcagccacaggccgagagaagcccactattaagtgggaacgggcagatgggagcagcctcccagagtgggtgacagacaacgctgggaccctgcattttgcccgggtgactcgagatgacgctggcaactacacttgcattgcctccaacgggccgcagggccagattcgtgcccatgtccagctcactgtggcagtttttatcaccttcaaagtggaaccagagcgtacgactgtgtaccagggccacacagccctactgcagtgcgaggcccagggggaccccaagccgctgattcagtggaaaggcaaggaccgcatcctggaccccaccaagctgggacccaggatgcacatcttccagaatggctccctggtgatccatgacgtggcccctgaggactcaggccgctacacctgcattgcaggcaacagctgcaacatcaagcacacggaggcccccctctatgtcgtggacaagcctgtgccggaggagtcggagggccctggcagccctcccccctacaagatgatccagaccattgggttgtcggtgggtgccgctgtggcctacatcattgccgtgctgggcctcatgttctactgcaagaagcgctgcaaagccaagcggctgcagaagcagcccgagggcgaggagccagagatggaatgcctcaacggtgggcctttgcagaacgggcagccctcagcagagatccaagaagaagtggccttgaccagcttgggctccggccccgcggccaccaacaaacgccacagcacaagtgataagatgcacttccagggtaacttgggccctttacaacttggaaaaagaattggggggggtcttgnaaggntaggnttgngggggagggaaaaccttcntttgaaaaccccaanagggaaaccccncttgcttcggggggngggc

SEQ ID NO: 291903 - DNA, 1510 bp, Homo sapiens
cggggactcggaggtactgggcgcgcgcggctccggggctcgggacgcctcgggacgcctcggggtcgggctccggctgcggctgctgctgcggcgcccgcgctccggtgcgctccgcctcctgtgcccgccgcggagcgcagtctgcgcgcccgccgtgcgccctcagctccttttcctgagcccgccgcgatgggagctgcgcggggatccccggccagaccccgccggttgcctctgctcagcgtcctgctgctgccgctgctgggcggtacccagacagccattgtcttcatcaagcagccgtcctcccaggatgcactgcaggggcgccgggcgctgcttcgctgtgaggttgaggctccgggcccggtacatgtgtactggctgctcgatggggcccctgtccaggacacggagcggcgtttcgcccagggcagcagcctgagctttgcagctgtggaccggctgcaggactctggcaccttccagtgtgtggctcgggatgatgtcactggagaagaagcccgcagtgccaacgcctccttcaacatcaaatggattgaggcaggtcctgtggtcctgaagcatccagcctcggaagctgagatccagccacagacccaggtcacacttcgttgccacattgatgggcaccctcggcccacctaccaatggttccgagatgggacccccctttctgatggtcagagcaaccacacagtcagcagcaaggagcggaacctgacgctccggccagctggtcctgagcatagtgggctgtattcctgctgcgcccacagtgcttttggccaggcttgcagcagccagaacttcaccttgagcattgctgatgaaagctttgccagggtggtgctggcaccccaggacgtggtagtagcgaggtatgaggaggccatgttccattgccagttctcagcccagccacccccgagcctgcagtggctctttgaggatgagactcccatcactaaccgcagtcgccccccacacctccgcagagccacagtgtttgccaacgggtctctgctgctgacccaggtccggccacgcaatgcagggatctaccgctgcattggccaggggcagaggggcccacccatcatcctggaagccacacttcacctagcagagattgaagacatgccgctatttgagccacgggtgtttacagctggcagcgaggagcgtgtgacctgccccacccttctctcctttcctcatcctaagtgcctggcagatgaaggagttttcaggagcttttgacactatataaaccgccctttttgtatgcaccacgggcggcttttatatgtaattgcagcgtggggtgggtgggcatgggaggtaggggtgggccctggagatgaggagggtgggccatccttaccccacacttttattgttgtcgttttttgtttgttttgtttttttgtttttgtttttgtttttacactcgctgctctcaataaataagccttttttacaa

SEQ ID NO: 291904 - DNA, 917 bp, Homo sapiens
cacggtgccctgttcagccacaggccgagagaagcccactattaagtgggaacgggcaggtgggtacagtgccggcatagggtaggggcaggcaggcagttcactgatcagatacatacctgagggctgctgggtgccccgcactgtgccaggaaatgtggagattagacaagcagtgcagggctgatgtatagtttagttaggaaggaaaaagccagacacagaagaggtcagattatagccttggacaacatggaagacaactcaaggcaacaagtgattggattggttcagacagtgctgtaaagtcctctcttccccttttccaaaatagtttatcttttccaacataaaaattacatggaggccgtgcatagtggctcacgcctgtaatcccaacactttgggaagccgagatgggtgggtcacttgaggccaggagtttgagaccagcctggccaacatggtgaaaccccatctctactaaaaatgcaaaagttagccaggcgtggtggcacatgcttgcaatcccagctgcttaggaggctgaagcaggagaatcgcttgaacccaggaggtggaggctgcagtgggccgagatcatgccattgcaccagagtctggctgacagagtgagactctgactcaaaagaaaaaagaaacaaaagttacatgggctcctttacaaaatactggaagaggccgggcgtggtggctcacgcctgtaatcccagcactgtgggaagctgaggtgggtggatcacgaggtcatgagatagagaccatcctggctaacatagagtagtgaaacctcgtctctactgaaaatacaaaaaattagccaggggtggcggcacgcatctgtagtgccagctactcgggaggctgaggtaggagaattgtttgaacccaggagg

SEQ ID NO: 291905 - DNA, 956 bp, Homo sapiens
cggggactcggaggtactgggcgcgcgcggctccggggctcgggacgcctcgggacgcctcggggtcgggctccggctgcggctgctgctgcggcgcccgcgctccggtgcgctccgcctcctgtgcccgccgcggagcgcagtctgcgcgcccgccgtgcgccctcagctccttttcctgagcccgccgcgatgggagctgcgcggggatccccggccagaccccgccggttgcctctgctcagcgtcctgctgctgccgctgctgggcggtacccagacagccattgtcttcatcaagcagccgtcctcccaggatgcactgcaggggcgccgggcgctgcttcgctgtgaggttgaggctccgggcccggtacatgtgtactggctgctcgatggggcccctgtccaggacacggagcggcgtttcgcccagggcagcagcctgagctttgcagctgtggaccggctgcaggactctggcaccttccagtgtgtggctcgggatgatgtcactggagaagaagcccgcagtgccaacgcctccttcaacatcaaatgtgagagccaggggggctgtgcccagtccccctgtcagaccctcaatgactgaggcctgggggatccctcccttacctcagcttctcccatttccagttaaacgggccaggcagaatgcatttatcatcagctttttttgctcatgtggataagaggaaattaaaagttatattttttccaaaattttttccttcaagtctgggacccatttatctgctgcatgcttgtgcaaatggaaagggcggccgagcccttggccaagtgtcagacttgacctgccagggaccaggcaggcacttagtatctggtaactgtagccccagcctcagcctccagggcttccttgtgtctgttggcacagagcctcgaggttccacggcttcctgcttgtcctcc

SEQ ID NO: 291906 - DNA, 3194 bp, Homo sapiens
cggggactcggaggtactgggcgcgcgcggctccggggctcgggacgcctcgggacgcctcggggtcgggctccggctgcggctgctgctgcggcgcccgcgctccggtgcgctccgcctcctgtgcccgccgcggagcgcagtctgcgcgcccgccgtgcgccctcagctccttttcctgagcccgccgcgatgggagctgcgcggggatccccggccagaccccgccggttgcctctgctcagcgtcctgctgctgccgctgctgggcggtacccagacagccattgtcttcatcaagcagccgtcctcccaggatgcactgcaggggcgccgggcgctgcttcgctgtgaggttgaggctccgggcccggtacatgtgtactggctgctcgatggggcccctgtccaggacacggagcggcgtttcgcccagggcagcagcctgagctttgcagctgtggaccggctgcaggactctggcaccttccagtgtgtggctcgggatgatgtcactggagaagaagcccgcagtgccaacgcctccttcaacatcaaatggattgaggcaggtcctgtggtcctgaagcatccagcctcggaagctgagatccagccacagacccaggtcacacttcgttgccacattgatgggcaccctcggcccacctaccaatggttccgagatgggacccccctttctgatggtcagagcaaccacacagtcagcagcaaggagcggaacctgacgctccggccagctggtcctgagcatagtgggctgtattcctgctgcgcccacagtgcttttggccaggcttgcagcagccagaacttcaccttgagcattgctgatgaaagctttgccagggtggtgctggcaccccaggacgtggtagtagcgaggtatgaggaggccatgttccattgccagttctcagcccagccacccccgagcctgcagtggctctttgaggatgagactcccatcactaaccgcagtcgccccccacacctccgcagagccacagtgtttgccaacgggtctctgctgctgacccaggtccggccacgcaatgcagggatctaccgctgcattggccaggggcagaggggcccacccatcatcctggaagccacacttcacctagcagagattgaagacatgccgctatttgagccacgggtgtttacagctggcagcgaggagcgtgtgacctgccttccccccaagggtctgccagagcccagcgtgtggtgggagcacgcgggagtccggctgcccacccatggcagggtctaccagaagggccacgagctggtgttggccaatattgctgaaagtgatgctggtgtctacacctgccacgcggccaacctggctggtcagcggagacaggatgtcaacatcactgtggccactgtgccctcctggctgaagaagccccaagacagccagctggaggagggcaaacccggctacttggattgcctgacccaggccacaccaaaacctacagttgtctggtacagaaaccagatgctcatctcagagggaagagtgagtttggggaggtgttcctggcaaaggctcagggcttggaggagggagtggcagagaccctggtacttgtgaagagcctgcagagcaaggatgagcagcagcagctggacttccggagggagttggagatgtttgggaagctgaaccacgccaacgtggtgcggctcctggggctgtgccgggaggctgagccccactacatggtgctggaatatgtggatctgggagacctcaagcagttcctgaggatttccaagagcaaggatgaaaaattgaagtcacagcccctcagcaccaagcagaaggtggccctatgcacccaggtagccctgggcatggagcacctgtccaacaaccgctttgtgcataaggacttggctgcgcgtaactgcctggtcagtgcccagagacaagtgaaggtgtctgccctgggcctcagcaaggatgtgtacaacagtgagtactaccacttccgccaggcctgggtgccgctgcgctggatgtcccccgaggccatcctggagggtgacttctctaccaagtctgatgtctgggccttcggtgtgctgatgtgggaagtgtttacacatggagagatgccccatggtgggcaggcagatgatgaagtactggcagatttgcaggctgggaaggctagacttcctcagcccgagggctgcccttccaaactctatcggctgatgcagcgctgctgggccctcagccccaaggaccggccctccttcagtgagattgccagcgccctgggagacagcaccgtggacagcaagccgtgaggagggagcccgctcaggatggcctgggcaggggaggacatctctagagggaagctcacagcatgatgggcaagatccctgtcctcctgggccctgaggcccctgccctagtgcaacaggcattgctgaggtctgagcagggcctggcctttcctcctcttcctcaccctcatcctttgggaggctgacttggacccaaactgggcgactagggctttgagctgggcagttttccctgccacctcttcctctatcagggacagtgtgggtgccacaggtaaccccaatttctggccttcaacttctccccttgaccgggtccaactctgccactcatctgccaactttgcctggggagggctaggcttgggatgagctgggtttgtggggagttccttaatattctcaagttctgggcacacagggttaatgagtctcttggcccactggtcccacttgggggtctagaccaggattatagaggacacagcaagtgagtcctccccactctgggcttgtgcacactgacccagacccacgtcttccccacccttctctcctttcctcatcctaagtgcctggcagatgaaggagttttcaggagcttttgacactatataaaccgccctttttgtatgcaccacgggcggcttttatatgtaattgcagcgtggggtgggtgggcatgggaggtaggggtgggccctggagatgaggagggtgggccatccttaccccacacttttattgttgtcgttttttgtttgttttgtttttttgtttttgtttttgtttttacactcgctgctctcaataaataagccttttttacaa

SEQ ID NO: 291907 - DNA, 3849 bp, Homo sapiens
cggggactcggaggtactgggcgcgcgcggctccggggctcgggacgcctcgggacgcctcggggtcgggctccggctgcggctgctgctgcggcgcccgcgctccggtgcgctccgcctcctgtgcccgccgcggagcgcagtctgcgcgcccgccgtgcgccctcagctccttttcctgagcccgccgcgatgggagctgcgcggggatccccggccagaccccgccggttgcctctgctcagcgtcctgctgctgccgctgctgggcggtacccagacagccattgtcttcatcaagcagccgtcctcccaggatgcactgcaggggcgccgggcgctgcttcgctgtgaggttgaggctccgggcccggtacatgtgtactggctgctcgatggggcccctgtccaggacacggagcggcgtttcgcccagggcagcagcctgagctttgcagctgtggaccggctgcaggactctggcaccttccagtgtgtggctcgggatgatgtcactggagaagaagcccgcagtgccaacgcctccttcaacatcaaatggattgaggcaggtcctgtggtcctgaagcatccagcctcggaagctgagatccagccacagacccaggtcacacttcgttgccacattgatgggcaccctcggcccacctaccaatggttccgagatgggacccccctttctgatggtcagagcaaccacacagtcagcagcaaggagcggaacctgacgctccggccagctggtcctgagcatagtgggctgtattcctgctgcgcccacagtgcttttggccaggcttgcagcagccagaacttcaccttgagcattgctgatgaaagctttgccagggtggtgctggcaccccaggacgtggtagtagcgaggtatgaggaggccatgttccattgccagttctcagcccagccacccccgagcctgcagtggctctttgaggatgagactcccatcactaaccgcagtcgccccccacacctccgcagagccacagtgtttgccaacgggtctctgctgctgacccaggtccggccacgcaatgcagggatctaccgctgcattggccaggggcagaggggcccacccatcatcctggaagccacacttcacctagcagagattgaagacatgccgctatttgagccacgggtgtttacagctggcagcgaggagcgtgtgacctgccttccccccaagggtctgccagagcccagcgtgtggtgggagcacgcgggagtccggctgcccacccatggcagggtctaccagaagggccacgagctggtgttggccaatattgctgaaagtgatgctggtgtctacacctgccacgcggccaacctggctggtcagcggagacaggatgtcaacatcactgtggccaatgggagcagcctcccagagtgggtgacagacaacgctgggaccctgcattttgcccgggtgactcgagatgacgctggcaactacacttgcattgcctccaacgggccgcagggccagattcgtgcccatgtccagctcactgtggcagtttttatcaccttcaaagtggaaccagagcgtacgactgtgtaccagggccacacagccctactgcagtgcgaggcccagggggaccccaagccgctgattcagtggaaaggcaaggaccgcatcctggaccccaccaagctgggacccaggatgcacatcttccagaatggctccctggtgatccatgacgtggcccctgaggactcaggccgctacacctgcattgcaggcaacagctgcaacatcaagcacacggaggcccccctctatgtcgtggacaagcctgtgccggaggagtcggagggccctggcagccctcccccctacaagatgatccagaccattgggttgtcggtgggtgccgctgtggcctacatcattgccgtgctgggcctcatgttctactgcaagaagcgctgcaaagccaagcggctgcagaagcagcccgagggcgaggagccagagatggaatgcctcaacggtgggcctttgcagaacgggcagccctcagcagagatccaagaagaagtggccttgaccagcttgggctccggccccgcggccaccaacaaacgccacagcacaagtgataagatgcacttcccacggtctagcctgcagcccatcaccacgctggggaagagtgagtttggggaggtgttcctggcaaaggctcagggcttggaggagggagtggcagagaccctggtacttgtgaagagcctgcagagcaaggatgagcagcagcagctggacttccggagggagttggagatgtttgggaagctgaaccacgccaacgtggtgcggctcctggggctgtgccgggaggctgagccccactacatggtgctggaatatgtggatctgggagacctcaagcagttcctgaggatttccaagagcaaggatgaaaaattgaagtcacagcccctcagcaccaagcagaaggtggccctatgcacccaggtagccctgggcatggagcacctgtccaacaaccgctttgtgcataaggacttggctgcgcgtaactgcctggtcagtgcccagagacaagtgaaggtgtctgccctgggcctcagcaaggatgtgtacaacagtgagtactaccacttccgccaggcctgggtgccgctgcgctggatgtcccccgaggccatcctggagggtgacttctctaccaagtctgatgtctgggccttcggtgtgctgatgtgggaagtgtttacacatggagagatgccccatggtgggcaggcagatgatgaagtactggcagatttgcaggctgggaaggctagacttcctcagcccgagggctgcccttccaaactctatcggctgatgcagcgctgctgggccctcagccccaaggaccggccctccttcagtgagattgccagcgccctgggagacagcaccgtggacagcaagccgtgaggagggagcccgctcaggatggcctgggcaggggaggacatctctagagggaagctcacagcatgatgggcaagatccctgtcctcctgggccctgaggcccctgccctagtgcaacaggcattgctgaggtctgagcagggcctggcctttcctcctcttcctcaccctcatcctttgggaggctgacttggacccaaactgggcgactagggctttgagctgggcagttttccctgccacctcttcctctatcagggacagtgtgggtgccacaggtaaccccaatttctggccttcaacttctccccttgaccgggtccaactctgccactcatctgccaactttgcctggggagggctaggcttgggatgagctgggtttgtggggagttccttaatattctcaagttctgggcacacagggttaatgagtctcttggcccactggtcccacttgggggtctagaccaggattatagaggacacagcaagtgagtcctccccactctgggcttgtgcacactgacccagacccacgtcttccccacccttctctcctttcctcatcctaagtgcctggcagatgaaggagttttcaggagcttttgacactatataaaccgccctttttgtatgcaccacgggcggcttttatatgtaattgcagcgtggggtgggtgggcatgggaggtaggggtgggccctggagatgaggagggtgggccatccttaccccacacttttattgttgtcgttttttgtttgttttgtttttttgtttttgtttttgtttttacactcgctgctctcaataaataagccttttttacaa

SEQ ID NO: 291908 - DNA, 3470 bp, Homo sapiens
attcggaacgagggagtccttggccactggtccacttggggtctagaccaggattatagaggacacagcaagtgagtcctccccactctgggcttgtgcacactgacccagacccacgtcttccccacccttctctcctttcctcagccatgttccattgccagttctcagcccagccacccccgagcctgcagtggctctttgaggatgagactcccatcactaaccgcagtcgccccccacacctccgcagagccacagtgtttgccaacgggtctctgctgctgacccaggtccggccacgcaatgcagggatctaccgctgcattggccaggggcagaggggcccacccatcatcctggaagccacacttcacctagcagagattgaagacatgccgctatttgagccacgggtgtttacagctggcagcgaggagcgtgtgacctgccttccccccaagggtctgccagagcccagcgtgtggtgggagcacgcgggagtccggctgcccacccatggcagggtctaccagaagggccacgagctggtgttggccaatattgctgaaagtgatgctggtgtctacacctgccacgcggccaacctggctggtcagcggagacaggatgtcaacatcactgtggccactgtgccctcctggctgaagaagccccaagacagccagctggaggagggcaaacccggctacttggattgcctgacccaggccacaccaaaacctacagttgtctggtacagaaaccagatgctcatctcagaggactcacggttcgaggtcttcaagaatgggaccttgcgcatcaacagcgtggaggtgtatgatgggacatggtaccgttgtatgagcagcaccccagccggcagcatcgaggcgcaagcccgtgtccaagtgctggaaaagctcaagttcacaccaccaccccagccacagcagtgcatggagtttgacaaggaggccacggtgccctgttcagccacaggccgagagaagcccactattaagtgggaacgggcagatgggagcagcctcccagagtgggtgacagacaacgctgggaccctgcattttgcccgggtgactcgagatgacgctggcaactacacttgcattgcctccaacgggccgcagggccagattcgtgcccatgtccagctcactgtggcagtttttatcaccttcaaagtggaaccagagcgtacgactgtgtaccagggccacacagccctactgcagtgcgaggcccagggggaccccaagccgctgattcagtggaaaggcaaggaccgcatcctggaccccaccaagctgggacccaggatgcacatcttccagaatggctccctggtgatccatgacgtggcccctgaggactcaggccgctacacctgcattgcaggcaacagctgcaacatcaagcacacggaggcccccctctatgtcgtggacaagcctgtgccggaggagtcggagggccctggcagccctcccccctacaagatgatccagaccattgggttgtcggtgggtgccgctgtggcctacatcattgccgtgctgggcctcatgttctactgcaagaagcgctgcaaagccaagcggctgcagaagcagcccgagggcgaggagccagagatggaatgcctcaacggtgggcctttgcagaacgggcagccctcagcagagatccaagaagaagtggccttgaccagcttgggctccggccccgcggccaccaacaaacgccacagcacaagtgataagatgcacttcccacggtctagcctgcagcccatcaccacgctggggaagagtgagtttggggaggtgttcctggcaaaggctcagggcttggaggagggagtggcagagaccctggtacttgtgaagagcctgcagagcaaggatgagcagcagcagctggacttccggagggagttggagatgtttgggaagctgaaccacgccaacgtggtgcggctcctggggctgtgccgggaggctgagccccactacatggtgctggaatatgtggatctgggagacctcaagcagttcctgaggatttccaagagcaaggatgaaaaattgaagtcacagcccctcagcaccaagcagaaggtggccctatgcacccaggtagccctgggcatggagcacctgtccaacaaccgctttgtgcataaggacttggctgcgcgtaactgcctggtcagtgcccagagacaagtgaaggtgtctgccctgggcctcagcaaggatgtgtacaacagtgagtactaccacttccgccaggcctgggtgccgctgcgctggatgtcccccgaggccatcctggagggtgacttctctaccaagtctgatgtctgggccttcggtgtgctgatgtgggaagtgtttacacatggagagatgccccatggtgggcaggcagatgatgaagtactggcagatttgcaggctgggaaggctagacttcctcagcccgagggctgcccttccaaactctatcggctgatgcagcgctgctgggccctcagccccaaggaccggccctccttcagtgagattgccagcgccctgggagacagcaccgtggacagcaagccgtgaggagggagcccgctcaggatggcctgggcaggggaggacatctctagagggaagctcacagcatgatgggcaagatccctgtcctcctgggccctgaggcccctgccctagtgcaacaggcattgctgaggtctgagcagggcctggcctttcctcctcttcctcaccctcatcctttgggaggctgacttggacccaaactgggcgactagggctttgagctgggcagttttccctgccacctcttcctctatcagggacagtgtgggtgccacaggtaaccccaatttctggccttcaacttctccccttgaccgggtccaactctgccactcatctgccaactttgcctggggagggctaggcttgggatgagctgggtttgtggggagttccttaatattctcaagttctgggcacacagggttaatgagtctcttggcccactggtcccacttgggggtctagaccaggattatagaggacacagcaagtgagtcctccccactctgggcttgtgcacactgacccagacccacgtcttccccacccttctctcctttcctcatcctaagtgcctggcagatgaaggagttttcaggagcttttgacactatataaaccgccctttttgtatgcaccacgggcggcttttatatgtaattgcagcgtggggtgggtgggcatgggaggtaggggtgggccctggagatgaggagggtgggccatccttaccccacacttttattgttgtcgttttttgtttgttttgtttttttgtttttgtttttgtttttacactcgctgctctcaataaataagccttttttacaa

SEQ ID NO: 291909 - DNA, 3600 bp, Homo sapiens
cggggactcggaggtactgggcgcgcgcggctccggggctcgggacgcctcgggacgcctcggggtcgggctccggctgcggctgctgctgcggcgcccgcgctccggtgcgctccgcctcctgtgcccgccgcggagcgcagtctgcgcgcccgccgtgcgccctcagctccttttcctgagcccgccgcgatgggagctgcgcggggatccccggccagaccccgccggttgcctctgctcagcgtcctgctgctgccgctgctgggcggtacccagacagccattgtcttcatcaagcagccgtcctcccaggatgcactgcaggggcgccgggcgctgcttcgctgtgaggttgaggctccgggcccggtacatgtgtactggctgctcgatggggcccctgtccaggacacggagcggcgtttcgcccagggcagcagcctgagctttgcagctgtggaccggctgcaggactctggcaccttccagtgtgtggctcgggatgatgtcactggagaagaagcccgcagtgccaacgcctccttcaacatcaaatggattgaggcaggtcctgtggtcctgaagcatccagcctcggaagctgagatccagccacagacccaggtcacacttcgttgccacattgatgggcaccctcggcccacctaccaatggttccgagatgggacccccctttctgatggtcagagcaaccacacagtcagcagcaaggagcggaacctgacgctccggccagctggtcctgagcatagtgggctgtattcctgctgcgcccacagtgcttttggccaggcttgcagcagccagaacttcaccttgagcattgctgatgaaagctttgccagggtggtgctggcaccccaggacgtggtagtagcgaggtatgaggaggccatgttccattgccagttctcagcccagccacccccgagcctgcagtggctctttgaggatgagactcccatcactaaccgcagtcgccccccacacctccgcagagccacagtgtttgccaacgggtctctgctgctgacccaggtccggccacgcaatgcagggatctaccgctgcattggccaggggcagaggggcccacccatcatcctggaagccacacttcacctagcagagattgaagacatgccgctatttgagccacgggtgtttacagctggcagcgaggagcgtgtgacctgccttccccccaagggtctgccagagcccagcgtgtggtgggagcacgcgggagtccggctgcccacccatggcagggtctaccagaagggccacgagctggtgttggccaatattgctgaaagtgatgctggtgtctacacctgccacgcggccaacctggctggtcagcggagacaggatgtcaacatcactgtggccactgtgccctcctggctgaagaagccccaagacagccagctggaggagggcaaacccggctacttggattgcctgacccaggccacaccaaaacctacagttgtctggtacagaaaccagatgctcatctcagaggactcacggttcgaggtcttcaagaatgggaccttgcgcatcaacagcgtggaggtgtatgatgggacatggtaccgttgtatgagcagcaccccagccggcagcatcgaggcgcaagcccgtgtccaagtgctggaaaagctcaagttcacaccaccaccccagccacagcagtgcatggagtttgacaaggaggccacggtgccctgttcagccacaggccgagagaagcccactattaagtgggaacgggcagatgggagcagcctcccagagtgggtgacagacaacgctgggaccctgcattttgcccgggtgactcgagatgacgctggcaactacacttgcattgcctccaacgggccgcagggccagattcgtgcccatgtccagctcactgtggcagtttttatcaccttcaaagtggaaccagagcgtacgactgtgtaccagggccacacagccctactgcagtgcgaggcccagggggaccccaagccgctgattcagtggaaaggcaaggaccgcatcctggaccccaccaagctgggacccaggatgcacatcttccagaatggctccctggtgatccatgacgtggcccctgaggactcaggccgctacacctgcattgcaggcaacagctgcaacatcaagcacacggaggcccccctctatgtcgtggacaagcctgtgccggaggagtcggagggccctggcagccctcccccctacaagatgatccagaccattgggttgtcggtgggtgccgctgtggcctacatcattgccgtgctgggcctcatgttctactgcaagaagcgctgcaaagccaagcggctgcagaagcagcccgagggcgaggagccagagatggaatgcctcaacggtgggcctttgcagaacgggcagccctcagcagagatccaagaagaagtggccttgaccagcttgggctccggccccgcggccaccaacaaacgccacagcacaatgtttacacatggagagatgccccatggtgggcaggcagatgatgaagtactggcagatttgcaggctgggaaggctagacttcctcagcccgagggctgcccttccaaactctatcggctgatgcagcgctgctgggccctcagccccaaggaccggccctccttcagtgagattgccagcgccctgggagacagcaccgtggacagcaagccgtgaggagggagcccgctcaggatggcctgggcaggggaggacatctctagagggaagctcacagcatgatgggcaagatccctgtcctcctgggccctgaggcccctgccctagtgcaacaggcattgctgaggtctgagcagggcctggcctttcctcctcttcctcaccctcatcctttgggaggctgacttggacccaaactgggcgactagggctttgagctgggcagttttccctgccacctcttcctctatcagggacagtgtgggtgccacaggtaaccccaatttctggccttcaacttctccccttgaccgggtccaactctgccactcatctgccaactttgcctggggagggctaggcttgggatgagctgggtttgtggggagttccttaatattctcaagttctgggcacacagggttaatgagtctcttggcccactggtcccacttgggggtctagaccaggattatagaggacacagcaagtgagtcctccccactctgggcttgtgcacactgacccagacccacgtcttccccacccttctctcctttcctcatcctaagtgcctggcagatgaaggagttttcaggagcttttgacactatataaaccgccctttttgtatgcaccacgggcggcttttatatgtaattgcagcgtggggtgggtgggcatgggaggtaggggtgggccctggagatgaggagggtgggccatccttaccccacacttttattgttgtcgttttttgtttgttttgtttttttgtttttgtttttgtttttacactcgctgctctcaataaataagccttttttacaa

SEQ ID NO: 291910 - DNA, 1662 bp, Homo sapiens
agcggggcgagagtggaagaccaggggacagaacagaaatccccatggtggccagagtgtcaggtctcatcgtgacgctcttgtcctcctccttcccaggtgggcctttgcagaacgggcagccctcagcagagatccaagaagaagtggccttgaccagcttgggctccggccccgcggccaccaacaaacgccacagcacaagtgataagatgcacttcccacggtctagcctgcagcccatcaccacgctggggagacctcaagcagttcctgaggatttccaagagcaaggatgaaaaattgaagtcacagcccctcagcaccaagcagaaggtggccctatgcacccaggtagccctgggcatggagcacctgtccaacaaccgctttgtgcataaggacttggctgcgcgtaactgcctggtcagtgcccagagacaagtgaaggtgtctgccctgggcctcagcaaggatgtgtacaacagtgagtactaccacttccgccaggcctgggtgccgctgcgctggatgtcccccgaggccatcctggagggtgacttctctaccaagtctgatgtctgggccttcggtgtgctgatgtgggaagtgtttacacatggagagatgccccatggtgggcaggcagatgatgaagtactggcagatttgcaggctgggaaggctagacttcctcagcccgagggctgcccttccaaactctatcggctgatgcagcgctgctgggccctcagccccaaggaccggccctccttcagtgagattgccagcgccctgggagacagcaccgtggacagcaagccgtgaggagggagcccgctcaggatggcctgggcaggggaggacatctctagagggaagctcacagcatgatgggcaagatccctgtcctcctgggccctgaggcccctgccctagtgcaacaggcattgctgaggtctgagcagggcctggcctttcctcctcttcctcaccctcatcctttgggaggctgacttggacccaaactgggcgactagggctttgagctgggcagttttccctgccacctcttcctctatcagggacagtgtgggtgccacaggtaaccccaatttctggccttcaacttctccccttgaccgggtccaactctgccactcatctgccaactttgcctggggagggctaggcttgggatgagctgggtttgtggggagttccttaatattctcaagttctgggcacacagggttaatgagtctcttggcccactggtcccacttgggggtctagaccaggattatagaggacacagcaagtgagtcctccccactctgggcttgtgcacactgacccagacccacgtcttccccacccttctctcctttcctcatcctaagtgcctggcagatgaaggagttttcaggagcttttgacactatataaaccgccctttttgtatgcaccacgggcggcttttatatgtaattgcagcgtggggtgggtgggcatgggaggtaggggtgggccctggagatgaggagggtgggccatccttaccccacacttttattgttgtcgttttttgtttgttttgtttttttgtttttgtttttgtttttacactcgctgctctcaataaataagccttttttacaa

SEQ ID NO: 291911 - DNA, 2864 bp, Homo sapiens
cggggactcggaggtactgggcgcgcgcggctccggggctcgggacgcctcgggacgcctcggggtcgggctccggctgcggctgctgctgcggcgcccgcgctccggtgcgctccgcctcctgtgcccgccgcggagcgcagtctgcgcgcccgccgtgcgccctcagctccttttcctgagcccgccgcgatgggagctgcgcggggatccccggccagaccccgccggttgcctctgctcagcgtcctgctgctgccgctgctgggcggtacccagacagccattgtcttcatcaagcagccgtcctcccaggatgcactgcaggggcgccgggcgctgcttcgctgtgaggttgaggctccgggcccggtacatgtgtactggctgctcgatggggcccctgtccaggacacggagcggcgtttcgcccagggcagcagcctgagctttgcagctgtggaccggctgcaggactctggcaccttccagtgtgtggctcgggatgatgtcactggagaagaagcccgcagtgccaacgcctccttcaacatcaaatggattgaggcaggtcctgtggtcctgaagcatccagcctcggaagctgagatccagccacagacccaggtcacacttcgttgccacattgatgggcaccctcggcccacctaccaatggttccgagatgggacccccctttctgatggtcagagcaaccacacagtcagcagcaaggagcggaacctgacgctccggccagctggtcctgagcatagtgggctgtattcctgctgcgcccacagtgcttttggccaggcttgcagcagccagaacttcaccttgagcattgctgatgaaagctttgccagggtggtgctggcaccccaggacgtggtagtagcgaggtatgaggaggccatgttccattgccagttctcagcccagccacccccgagcctgcagtggctctttgaggatgagactcccatcactaaccgcagtcgccccccacacctccgcagagccacagtgtttgccaacgggtctctgctgctgacccaggtccggccacgcaatgcagggatctaccgctgcattggccaggggcagaggggcccacccatcatcctggaagccacacttcacctagcagagattgaagacatgccgctatttgagccacgggtgtttacagctggcagcgaggagcgtgtgacctgccttccccccaagggtctgccagagcccagcgtgtggtgggagcacgcgggagtccggctgcccacccatggcagggtctaccagaagggccacgagctggtgttggccaatattgctgaaagtgatgctggtgtctacacctgccacgcggccaacctggctggtcagcggagacaggatgtcaacatcactgtggccactgtgccctcctggctgaagaagccccaagacagccagctggaggagggcaaacccggctacttggattgcctgacccaggccacaccaaaacctacagttgtctggtacagaaaccagatgctcatctcagaggactcacggttcgaggtcttcaagaatgggaccttgcgcatcaacagcgtggaggtgtatgatgggacatggtaccgttgtatgagcagcaccccagccggcagcatcgaggcgcaagcccgtgtccaagtgctggaaaagctcaagttcacaccaccaccccagccacagcagtgcatggagtttgacaaggaggccacggtgccctgttcagccacaggccgagagaagcccactattaagtgggaacgggcagatgggagcagcctcccagagtgggtgacagacaacgctgggaccctgcattttgcccgggtgactcgagatgacgctggcaactacacttgcattgcctccaacgggccgcagggccagattcgtgcccatgtccagctcactgtggcagtttttatcaccttcaaagtggaaccagagcgtacgactgtgtaccagggccacacagccctactgcagtgcgaggcccagggggaccccaagccgctgattcagtggaaaggcaaggaccgcatcctggaccccaccaagctgggacccaggatgcacatcttccagaatggctccctggtgatccatgacgtggcccctgaggactcaggccgctacacctgcattgcaggcaacagctgcaacatcaagcacacggaggcccccctctatgtcgtggacaagcctgtgccggaggagtcggagggccctggcagccctcccccctacaagatgatccagaccattgggttgtcggtgggtgccgctgtggcctacatcattgccgtgctgggcctcatgttctactgcaagaagcgctgcaaagccaagcggctgcagaagcagcccgagggcgaggagccagagatggaatgcctcaacggtgggcctttgcagaacgggcagccctcagcagagatccaagaagaagtggccttgaccagcttgggctccggccccgcggccaccaacaaacgccacagcacaagtgataagatgcacttcccacggtctagcctgcagcccatcaccacgctggcctaagtgcctggcagatgaaggagttttcaggagcttttgacactatataaaccgccctttttgtatgcaccacgggcggcttttatatgtaattgcagcgtggggtgggtgggcatgggaggtaggggtgggccctggagatgaggagggtgggccatccttaccccacacttttattgttgtcgttttttgtttgttttgtttttttgtttttgtttttgtttttacactcgctgctctcaataaataagccttttttacaa

SEQ ID NO: 291912 - DNA, 2719 bp, Homo sapiens
cggggactcggaggtactgggcgcgcgcggctccggggctcgggacgcctcgggacgcctcggggtcgggctccggctgcggctgctgctgcggcgcccgcgctccggtgcgctccgcctcctgtgcccgccgcggagcgcagtctgcgcgcccgccgtgcgccctcagctccttttcctgagcccgccgcgatgggagctgcgcggggatccccggccagaccccgccggttgcctctgctcagcgtcctgctgctgccgctgctgggcggtacccagacagccattgtcttcatcaagcagccgtcctcccaggatgcactgcaggggcgccgggcgctgcttcgctgtgaggttgaggctccgggcccggtacatgtgtactggctgctcgatggggcccctgtccaggacacggagcggcgtttcgcccagggcagcagcctgagctttgcagctgtggaccggctgcaggactctggcaccttccagtgtgtggctcgggatgatgtcactggagaagaagcccgcagtgccaacgcctccttcaacatcaaatggattgaggcaggtcctgtggtcctgaagcatccagcctcggaagctgagatccagccacagacccaggtcacacttcgttgccacattgatgggcaccctcggcccacctaccaatggttccgagatgggacccccctttctgatggtcagagcaaccacacagtcagcagcaaggagcggaacctgacgctccggccagctggtcctgagcatagtgggctgtattcctgctgcgcccacagtgcttttggccaggcttgcagcagccagaacttcaccttgagcattgctgatgaaagctttgccagggtggtgctggcaccccaggacgtggtagtagcgaggtatgaggaggccatgttccattgccagttctcagcccagccacccccgagcctgcagtggctctttgaggatgagactcccatcactaaccgcagtcgccccccacacctccgcagagccacagtgtttgccaacgggtctctgctgctgacccaggtccggccacgcaatgcagggatctaccgctgcattggccaggggcagaggggcccacccatcatcctggaagccacacttcacctagcagagattgaagacatgccgctatttgagccacgggtgtttacagctggcagcgaggagcgtgtgacctgccttccccccaagggtctgccagagcccagcgtgtggtgggagcacgcgggagtccggctgcccacccatggcagggtctaccagaagggccacgagctggtgttggccaatattgctgaaagtgatgctggtgtctacacctgccacgcggccaacctggctggtcagcggagacaggatgtcaacatcactgtggccactgtgccctcctggctgaagaagccccaagacagccagctggaggagggcaaacccggctacttggattgcctgacccaggccacaccaaaacctacagttgtctggtacagaaaccagatgctcatctcagaggactcacggttcgaggtcttcaagaatgggaccttgcgcatcaacagcgtggaggtgtatgatgggacatggtaccgttgtatgagcagcaccccagccggcagcatcgaggcgcaagcccgtgtccaagtgctggaaaagctcaagttcacaccaccaccccagccacagcagtgcatggagtttgacaaggaggccacggtgccctgttcagccacaggccgagagaagcccactattaagtgggaacgggcagatgggagcagcctcccagagtgggtgacagacaacgctgggaccctgcattttgcccgggtgactcgagatgacgctggcaactacacttgcattgcctccaacgggccgcagggccagattcgtgcccatgtccagctcactgtggcagtttttatcaccttcaaagtggaaccagagcgtacgactgtgtaccagggccacacagccctactgcagtgcgaggcccagggggaccccaagccgctgattcagtggaaaggcaaggaccgcatcctggaccccaccaagctgggacccaggatgcacatcttccagaatggctccctggtgatccatgacgtggcccctgaggactcaggccgctacacctgcattgcaggcaacagctgcaacatcaagcacacggaggcccccctctatgtcgtggacaagcctgtgccggaggagtcggagggccctggcagccctcccccctacaagatgatccagaccattgggttgtcggtgggtgccgctgtggcctacatcattgccgtgctgggcctcatgttctactgcaagaagcgctgcaaagccaagcggctgcagaagcagcccgagggcgaggagccagagctgcgccttcctcttcattccccagctggtccttgccctcaccccatggtcctcaaactgctgcttctcaaatccctagttctggggcaagagcgggcaggagtcctatcagtctttccattaacaagtacttacgcggctgggcacagtggctcacacttgtaatcccagcactttgggagactgaggcaggaggatcgcctgaggccaggagtccgagaccagcctgggcaacatagcaagactctgtctctacaaaaaaattaaaaacaaacaaacaagtacttatgaa

SEQ ID NO: 291913 - DNA, 1768 bp, Homo sapiens
tcaaggaacgaaggggccactgactcagagcggcaagtacagcgagtagtccgagagcgcccaccggcgggcggggcggctggtacggccgatcatgggcagtttctgcacgtagcgcgaggccgggctaggcccgtacggcgcggggaaggcagtctggaaaaggcgcccgcggcagcgcctcccagcctgccgcccggctatgatgaaacgaaagtgcggggcgccgcgcggggcgaaacggctcttctggaaaacgtcgcgggtgccggtcccggggccctgctgccggggtgccccgcgcgcccgatgcacgcgcggcaagggcctgctctcagaggcggcgggcccagaggccggcgcggggccgcctccgccgctgccccgggggctctcgtcgccgtgcgggctgactatggcgcttgccgtcagctgcggcatcttccgcaccgagtccggggctgccgccggctccttcttgtccccgggcggccgcggagccgtgggtgcaggctggccggtgccaaagcgtgtggccaagctgtcaccgaagaaggcgtagagctcccggtagatgtcggccagggtcaccgaaagagaagggtcctccggccccgcgccccctggcggcagcgggaggccggacccaaagctgggttctgcaccgcccccggaggacgactcttgaaagagaaggctgtcccatggcaggtcgtccaggcgccggcaccccctgccacctgggccacccctgttgggctctgctgcctgggccttcatcttcagcagtcgctctaccgccacctgtaagagccaaggactaagataggcaaaaaattcgaggaacctgggcccatcaaatattccaaagtaagcctgcttggctgctaagctcatgcagggaagggaggctggaaggggacggtactcaccagaatggctccatagactttgtgtccatctgctttgacctgggcattagatactgaataatcatccagcacagcctgcaagtttgtccagtaggtggacaggtgtgggtacaggactcgttctactgcctggaaggaagagaaggaatacagttagcatgtctttgatacttattccctctcaaggaccctttcccatgaaagacctacctttatctctgatcctagacagggctcaatcctcctaaattccctgattggcatattcaaccatatatttatttggaacctactgtatacctaagctaggcattgggaataaagataaggtacaaagggagacaataaaaaatatacccaatatcactgccctgtgtgctaaataatgctcattactgacaactccaaaatttagtttgcatactgctaccctatacaatcaggcaagtactggcttcacttagatgtaaactgagactcagttcaaacaatctgcataaaaacaaccaaccagagacttggactctgattatacaatttaaaatcctgtgattggacaggcgctgtggctcacgcctgtaatcccagcactttgggaggccgaggccagtggatcacctgaggtcaggagttcaagaccagcttggccaagatggtgaaaccccatctctactaaaaatacaaaaattagctgggcgcagtagcagttgcctgtaatctcaactacttgggaggctgaggcaggagaatcacttgaactcggggggcagaggttgcagtgagccgagatcacaccaccgcactccaccctgggaagcaaagtgagactccgtctc

SEQ ID NO: 291914 - DNA, 320 bp, Homo sapiens
atcagaaagatatgaaggactgggttgaagccctgaaccaagccagcaagatcaccgttcccaaaggtgggggcctacccatgaccactgaagttctcaagagctcacagccttgggaagtgagactagaagaggggagcagaaagggaccttgagtagacaaaggccacacacatcattgtcattactgttttaattgtctggcttctctctggactgggagctcagtgaggattctgaccagtgacttacacaaaaggcgctctatacatattataatatattcgcttactaaatgaataaggactttccaactgcgt

SEQ ID NO: 291915 - DNA, 1342 bp, Homo sapiens
agcctgaggaggagacaggacagagcgtctggagaggcaggaggacaccgagttccccgtgttggcctccaggtcctgtgcttgcggagccgtccggcggctgggatcgagccccgacaatgggcaacgcgcaggagcggccgtcagagactatcgaccgcgagcggaaacgcctggtcgagacgctgcaggcggactcgggactgctgttggacgcgctgctggcgcggggcgtgctcaccgggccagagtacgaggcattggatgcactgcctgatgccgagcgcagggtgcgccgcctactgctgctggtgcagggcaagggcgaggccgcctgccaggagctgctacgctgtgcccagcgtaccgcgggcgcgccggaccccgcttgggactggcagcacgtgggtccgggctaccgggaccgcagctatgaccctccatgcccaggccactggacgccggaggcacccggctcggggaccacatgccccgggttgcccagagcttcagaccctgacgaggccgggggccctgagggctccgaggcggtgcaatccgggaccccggaggagccagagccagagctggaagctgaggcctctaaagaggctgaaccggagccggagccagagccagagctggaacccgaggctgaagcagaaccagagccggaactggagccagaaccggacccagagcccgagcccgacttcgaggaaagggacgagtccgaagattcctgaaggccagagctctgacaggcggtgccccgcccatgctggataggacctgggatgctgctggagctgaatcggatgccaccaaggctcggtccagcccagtaccgctggaagtgaataaactccggagggtcggacgggacctgggctctctccacgattctggctgtttgcccaggaacttagggtgggtacctctgagtcccagggacctgggcaggcccaagcccaccacgagcatcatccagtcctcagccctaatctgcccttaggagtccaggctgcaccctggagatcccaaacctagccccctagtgggacaaggacctgaccctcctgcccgcatacacaacccatttcccctggtgagccacttggcagcatatgtaggtaccagctcaaccccacgcaagttcctgagctgaacatggagcaaggggagggtgacttctctccacatagggagggcttagagctcacagccttgggaagtgagactagaagaggggagcagaaagggaccttgagtagacaggtttctacacatatagcctatagggttgtcgggttttacatctggaacaggctatgacgagtac

SEQ ID NO: 291916 - DNA, 1591 bp, Homo sapiens
agcctgaggaggagacaggacagagcgtctggagaggcaggaggacaccgagttccccgtgttggcctccaggtcctgtgcttgcggagccgtccggcggctgggatcgagccccgacaatgggcaacgcgcaggagcggccgtcagagactatcgaccgcgagcggaaacgcctggtcgagacgctgcaggcggactcgggactgctgttggacgcgctgctggcgcggggcgtgctcaccgggccagagtacgaggcattggatgcactgcctgatgccgagcgcagggtgcgccgcctactgctgctggtgcagggcaagggcgaggccgcctgccaggagctgctacgctgtgcccagcgtaccgcgggcgcgccggaccccgcttgggactggcagcacgtgggtccgggtgagcgcgcggggcggggcctagggcagagcagggacggggctggggcagacaaaaggcccggggagggcagggttgtcgtctccgctagaagtaggcgagtgtgaaaccgcacaggggtaaattgagcctcagtcactcccacttccgccccaggctaccgggaccgcagctatgaccctccatgcccaggccactggacgccggaggcacccggctcggggaccacatgccccgggttgcccagagcttcagaccctgacgaggccgggggccctgagggctccgaggcggtgcaatccgggaccccggaggagccagagccagagctggaagctgaggcctctaaagaggctgaaccggagccggagccagagccagagctggaacccgaggctgaagcagaaccagagccggaactggagccagaaccggacccagagcccgagcccgacttcgaggaaagggacgagtccgaagattcctgaaggccagagctctgacaggcggtgccccgcccatgctggataggacctgggatgctgctggagctgaatcggatgccaccaaggctcggtccagcccagtaccgctggaagtgaataaactccggagggtcggacgggacctgggctctctccacgattctggctgtttgcccaggaacttagggtgggtacctctgagtcccagggacctgggcaggcccaagcccaccacgagcatcatccagtcctcagccctaatctgcccttaggagtccaggctgcaccctggagatcccaaacctagccccctagtgggacaaggacctgaccctcctgcccgcatacacaacccatttcccctggtgagccacttggcagcatatgtaggtaccagctcaaccccacgcaagttcctgagctgaacatggagcaaggggagggtgacttctctccacatagggagggcttagagctcacagccttgggaagtgagactagaagaggggagcagaaagggaccttgagtagacaaaggccacacacatcattgtcattactgttttaattgtctggcttctctctggactgggagctcagtgaggattctgaccagtgacttacacaaaaggcgctctatacatattataatatattcgcttactaaatgaataaggactttccaactgcgt

SEQ ID NO: 291917 - DNA, 1435 bp, Homo sapiens
agcctgaggaggagacaggacagagcgtctggagaggcaggaggacaccgagttccccgtgttggcctccaggtcctgtgcttgcggagccgtccggcggctgggatcgagccccgacaatgggcaacgcgcaggagcggccgtcagagactatcgaccgcgagcggaaacgcctggtcgagacgctgcaggcggactcgggactgctgttggacgcgctgctggcgcggggcgtgctcaccgggccagagtacgaggcattggatgcactgcctgatgccgagcgcagggtgcgccgcctactgctgctggtgcagggcaagggcgaggccgcctgccaggagctgctacgctgtgcccagcgtaccgcgggcgcgccggaccccgcttgggactggcagcacgtgggtccgggctaccgggaccgcagctatgaccctccatgcccaggccactggacgccggaggcacccggctcggggaccacatgccccgggttgcccagagcttcagaccctgacgaggccgggggccctgagggctccgaggcggtgcaatccgggaccccggaggagccagagccagagctggaagctgaggcctctaaagaggctgaaccggagccggagccagagccagagctggaacccgaggctgaagcagaaccagagccggaactggagccagaaccggacccagagcccgagcccgacttcgaggaaagggacgagtccgaagattcctgaaggccagagctctgacaggcggtgccccgcccatgctggataggacctgggatgctgctggagctgaatcggatgccaccaaggctcggtccagcccagtaccgctggaagtgaataaactccggagggtcggacgggacctgggctctctccacgattctggctgtttgcccaggaacttagggtgggtacctctgagtcccagggacctgggcaggcccaagcccaccacgagcatcatccagtcctcagccctaatctgcccttaggagtccaggctgcaccctggagatcccaaacctagccccctagtgggacaaggacctgaccctcctgcccgcatacacaacccatttcccctggtgagccacttggcagcatatgtaggtaccagctcaaccccacgcaagttcctgagctgaacatggagcaaggggagggtgacttctctccacatagggagggcttagagctcacagccttgggaagtgagactagaagaggggagcagaaagggaccttgagtagacaaaggccacacacatcattgtcattactgttttaattgtctggcttctctctggactgggagctcagtgaggattctgaccagtgacttacacaaaaggcgctctatacatattataatatattcgcttactaaatgaataaggactttccaactgcgt

SEQ ID NO: 291918 - DNA, 1311 bp, Homo sapiens
agcctgaggaggagacaggacagagcgtctggagaggcaggaggacaccgagttccccgtgttggcctccaggtcctgtgcttgcggagccgtccggcggctgggatcgagccccgacaatgggcaacgcgcaggagcggccgtcagagactatcgaccgcgagcggaaacgcctggtcgagacgctgcaggcggactcgggactgctgttggacgcgctgctggcgcggggcgtgctcaccgggccagagtacgaggcattggatgcactgcctgatgccgagcgcagggctaccgggaccgcagctatgaccctccatgcccaggccactggacgccggaggcacccggctcggggaccacatgccccgggttgcccagagcttcagaccctgacgaggccgggggccctgagggctccgaggcggtgcaatccgggaccccggaggagccagagccagagctggaagctgaggcctctaaagaggctgaaccggagccggagccagagccagagctggaacccgaggctgaagcagaaccagagccggaactggagccagaaccggacccagagcccgagcccgacttcgaggaaagggacgagtccgaagattcctgaaggccagagctctgacaggcggtgccccgcccatgctggataggacctgggatgctgctggagctgaatcggatgccaccaaggctcggtccagcccagtaccgctggaagtgaataaactccggagggtcggacgggacctgggctctctccacgattctggctgtttgcccaggaacttagggtgggtacctctgagtcccagggacctgggcaggcccaagcccaccacgagcatcatccagtcctcagccctaatctgcccttaggagtccaggctgcaccctggagatcccaaacctagccccctagtgggacaaggacctgaccctcctgcccgcatacacaacccatttcccctggtgagccacttggcagcatatgtaggtaccagctcaaccccacgcaagttcctgagctgaacatggagcaaggggagggtgacttctctccacatagggagggcttagagctcacagccttgggaagtgagactagaagaggggagcagaaagggaccttgagtagacaaaggccacacacatcattgtcattactgttttaattgtctggcttctctctggactgggagctcagtgaggattctgaccagtgacttacacaaaaggcgctctatacatattataatatattcgcttactaaatgaataaggactttccaactgcgt

SEQ ID NO: 291919 - DNA, 1132 bp, Homo sapiens
agcctgaggaggagacaggacagagcgtctggagaggcaggaggacaccgagttccccgtgttggcctccaggtcctgtgcttgcggagccgtccggcggctgggatcgaggctaccgggaccgcagctatgaccctccatgcccaggccactggacgccggaggcacccggctcggggaccacatgccccgggttgcccagagcttcagaccctgacgaggccgggggccctgagggctccgaggcggtgcaatccgggaccccggaggagccagagccagagctggaagctgaggcctctaaagaggctgaaccggagccggagccagagccagagctggaacccgaggctgaagcagaaccagagccggaactggagccagaaccggacccagagcccgagcccgacttcgaggaaagggacgagtccgaagattcctgaaggccagagctctgacaggcggtgccccgcccatgctggataggacctgggatgctgctggagctgaatcggatgccaccaaggctcggtccagcccagtaccgctggaagtgaataaactccggagggtcggacgggacctgggctctctccacgattctggctgtttgcccaggaacttagggtgggtacctctgagtcccagggacctgggcaggcccaagcccaccacgagcatcatccagtcctcagccctaatctgcccttaggagtccaggctgcaccctggagatcccaaacctagccccctagtgggacaaggacctgaccctcctgcccgcatacacaacccatttcccctggtgagccacttggcagcatatgtaggtaccagctcaaccccacgcaagttcctgagctgaacatggagcaaggggagggtgacttctctccacatagggagggcttagagctcacagccttgggaagtgagactagaagaggggagcagaaagggaccttgagtagacaaaggccacacacatcattgtcattactgttttaattgtctggcttctctctggactgggagctcagtgaggattctgaccagtgacttacacaaaaggcgctctatacatattataatatattcgcttactaaatgaataaggactttccaactgcgt

SEQ ID NO: 291920 - DNA, 977 bp, Homo sapiens
tagtagaaatggtgtttcaccatgttggccaggctggtcttgaactcctgacctcgtgatccacccacctcgacctcccaaagtgctgggattacaggcgtgaggcactataccaggcagggatacggtttttcaaactgcttctaagagaggtggacccagaaagcctctgacctgcaccggagctcttggcagacctggactgtttcagaaatgcattcttgggccccacaccagacaggcctagtcgggaactctggggaacgcagcactctggcctctaacagccaagccttctgggtgattctgacacatatcgaatctgggaatcactaggcctctgccttgtcttcagactgggagtgactaagaccagaaagccaaccgcctgccctccaaccgcctgccctccaaccgccagccctccaaccgcctgccctccaatagccagccctccaaccgcctgccctccaatcgccagccctcccggcttccatctcctcccagctacctgcagtgccaccaggtttatcaccttagagcatccacagccacagttacccagagagaagagaaggaggagacacagggcttggggacgaaggcattcaaacaggtaactgatgactgcaaactctgcgatctatctacaggcagcaaagtgttgctattacttaaaaacaaaaaaaaccccaggtagtcagtcttccctagaaaaggttccagaccttgttcttccataaatttggggagaggcagggtggtgctgagtcagagtaggaggtacctgcaggtttcaaggtctctgttcgtagcgttcggtaaggattcaaacgtcgtgataaagccttctgacctgtaccctctttcaaagaaagcgtgtcgtgggcacagagacagttttagtcggtagcttcggatttgcctgcttgagatcccgcaagcgccaggatcagccacacagccggcaacagccc

SEQ ID NO: 291921 - DNA, 771 bp, Homo sapiens
tagtagaaatggtgtttcaccatgttggccaggctggtcttgaactcctgacctcgtgatccacccacctcgacctcccaaagtgctgggattacaggcgtgaggcactataccaggcagggatacggtttttcaaactgcttctaagagaggtggacccagaaagcctctgacctgcaccggagctcttggcagacctggactgtttcagaaatgcattcttgggccccacaccagacaggcctagtcgggaactctggggaacgcagcactctggcctctaacagccaagccttctgggtgattctgacacatatcgaatctgggaatcactaggcctctgccttgtcttcagactgggagtgactaagaccagaaagccaaccgcctgccctccaaccgcctgccctccaaccgccagccctccaaccgcctgccctccaatagccagccctccaaccgcctgccctccaatcgccagccctcccggcttccatctcctcccagctacctgcagtgccaccaggtttatcaccttagagcatccacagccacagttacccagagagaagagaaggaggagacacagggcttggggacgaaggcattcaaacaggcaggtcctcccacgggaatcccgtgacggccgactccacgaccacttccccagcatgactagatttcctgcagcttcgaaatgcaaacattgcctcagacaaaagctaaaattgttacagtcagaaccgaaaccacgagtgagaaggggctctg

SEQ ID NO: 291922 - DNA, 2868 bp, Homo sapiens
tcggaaggggccaggagacactggaaggtccggacggcagggaaggggacggggttctttccagtcccacccgtgtagggacacctctccccctcatcccccgatgtaccctcgctgaatctgggatgggagagacgaaccgagtctaggcatctgcgtagcagcgccggggagagcggggagcccaggcggagcccagtcgactcccggattcccctgccccgcccccggcacgaggccccgccccggcgccccgcccctcctcgggactcgaccgggctgcgctcactgcccagccggggccccgggagcctccaggctcccgcccgccctgagctgcggcctccgcatggaggggccactcactccaccaccgctgcagggaggcggagccgccgctgttccggagcccggagcccggcaacacccgggacacgagacggcggcgcagcggtacagcgcccgactgctgcaggccggctacgagcccgagagccctagattggacctcgctacacacccgacgacaccccgttcagaactatcttcagtggtcttactggcaggtgttggtgtccagatggatcgccttcgcagggctagcatggcggactacctgatcagcggcggcaccggctacgtgcccgaggatgggctcaccgcgcagcagctcttcgccagcgccgacggcctcacctacaacgacttcctgattctcccaggattcatagacttcatagctgatgaggtggacctgacctcagccctgacccggaagatcacgctgaagacgccactgatctcctcccccatggacactgtgacagaggctgacatggccattgccatggctctgatgggaggtattggtttcattcaccacaactgcaccccagagttccaggccaacgaggtgcggaaggtcaagaagtttgaacagggcttcatcacggaccctgtggtgctgagcccctcgcacactgtgggcgatgtgctggaggccaagatgcggcatggcttctctggcatccccatcactgagacgggcaccatgggcagcaagctggtgggcatcgtcacctcccgagacatcgactttcttgctgagaaggaccacaccaccctcctcagtgaggtgatgacgccaaggattgaactggtggtggctccagcaggtgtgacgttgaaagaggcaaatgagatcctgcagcgtagcaagaaagggaagctgcctatcgtcaatgattgcgatgagctggtggccatcatcgcccgcaccgacctgaagaagaaccgagactaccctctggcctccaaggattcccagaagcagctgctctgtggggcagctgtgggcacccgtgaggatgacaaataccgtctggacctgctcacccaggcgggcgtcgacgtcatagtcttggactcgtcccaagggaattcggtgtatcagatcgccatggtgcattacatcaaacagaagtacccccacctccaggtgattggggggaacgtggtgacagcagcccaggccaagaacctgattgatgctggtgtggacgggctgcgcgtgggcatgggctgcggctccatctgcatcacccaggaagtgatggcctgtggtcggccccagggcactgctgtgtacaaggtggctgagtatgcccggcgctttggtgtgcccatcatagccgatggcggcatccagaccgtgggacacgtggtcaaggccctggcccttggagcctccacagtgatgatgggctccctgctggccgccactacggaggcccctggcgagtacttcttctcagacggggtgcggctcaagaagtaccggggcatgggctcactggatgccatggagaagagcagcagcagccagaaacgatacttcagcgagggggataaagtgaagatcgcgcagggtgtctcgggctccatccaggacaaaggatccattcagaagttcgtgccctacctcatagcaggcatccaacacggctgccaggatatcggggcccgcagcctgtctgtccttcggtccatgatgtactcaggagagctcaagtttgagaagcggaccatgtcggcccagattgagggtggtgtccatggcctgcactcttacgaaaagcggctgtactgaggacagcggtggaggccgaggtggtggaggggatgcaccccagtgtccacttttgggcacagcctccctccataactgagtggtccacagatttgcactacgggttctccagctcctttccaggcagagaggaggggaggtcctgaggggactgctgcccctcactcggcatcccctgcagagtcaggactgctcccggggccaggctgccctgggagcccccctccgagcccagccagccaggctctcaggccctgcgcctgcctcaggtctttcttgctgcagcctgctccagcctggcccccaccccaggggcaggcggcccctcctggcttctcctgtagggcacctccctgcccctagcctcccaggaaatggtgctctcctggccctgcctctggcccttcccgggccgctgcccctcagccatgtggcacttctgagctcctgacctaggccaaggggaggtctctgcccccttccccggccctgggctacccttgggtcctgctcctcaggccgctcccctgtccctggccatgggtaggagactgccctggtcatggccgcctgcctgtcattcctgactcaccaccgtccccaggtgaaccattcctcccttctcctcagctgcagtcgaaggctttaactttgcacacttgggatcacagttgcgtcattgtgtattaaatacttggaataaatcaagcaggtctcaa

SEQ ID NO: 291923 - DNA, 2310 bp, Homo sapiens
agcggccgcgcgggtgtttatgtcgggtcgcggggtctcgcggcacatggcggactacctgatcagcggcggcaccggctacgtgcccgaggatgggctcaccgcgcagcagctcttcgccagcgccgacggcctcacctacaacgacttcctgattctcccaggattcatagacttcatagctgatgaggtggacctgacctcagccctgacccggaagatcacgctgaagacgccactgatctcctcccccatggacactgtgacagaggctgacatggccattgccatggctctgatgggaggtattggtttcattcaccacaactgcaccccagagttccaggccaacgaggtgcggaaggtcaagaagtttgaacagggcttcatcacggaccctgtggtgctgagcccctcgcacactgtgggcgatgtgctggaggccaagatgcggcatggcttctctggcatccccatcactgagacgggcaccatgggcagcaagctggtgggcatcgtcacctcccgagacatcgactttcttgctgagaaggaccacaccaccctcctcagtgaggtgatgacgccaaggattgaactggtggtggctccagcaggtgtgacgttgaaagaggcaaatgagatcctgcagcgtagcaagaaagggaagctgcctatcgtcaatgattgcgatgagctggtggccatcatcgcccgcaccgacctgaagaagaaccgagactaccctctggcctccaaggattcccagaagcagctgctctgtggggcagctgtgggcacccgtgaggatgacaaataccgtctggacctgctcacccaggcgggcgtcgacgtcatagtcttggactcgtcccaagggaattcggtgtatcagatcgccatggtgcattacatcaaacagaagtacccccacctccaggtgattggggggaacgtggtgacagcagcccaggccaagaacctgattgatgctggtgtggacgggctgcgcgtgggcatgggctgcggctccatctgcatcacccaggaagtgatggcctgtggtcggccccagggcactgctgtgtacaaggtggctgagtatgcccggcgctttggtgtgcccatcatagccgatggcggcatccagaccgtgggacacgtggtcaaggccctggcccttggagcctccacagtgatgatgggctccctgctggccgccactacggaggcccctggcgagtacttcttctcagacggggtgcggctcaagaagtaccggggcatgggctcactggatgccatggagaagagcagcagcagccagaaacgatacttcagcgagggggataaagtgaagatcgcgcagggtgtctcgggctccatccaggacaaaggatccattcagaagttcgtgccctacctcatagcaggcatccaacacggctgccaggatatcggggcccgcagcctgtctgtccttcggtccatgatgtactcaggagagctcaagtttgagaagcggaccatgtcggcccagattgagggtggtgtccatggcctgcactcttacgaaaagcggctgtactgaggacagcggtggaggccgaggtggtggaggggatgcaccccagtgtccacttttgggcacagcctccctccataactgagtggtccacagatttgcactacgggttctccagctcctttccaggcagagaggaggggaggtcctgaggggactgctgcccctcactcggcatcccctgcagagtcaggactgctcccggggccaggctgccctgggagcccccctccgagcccagccagccaggctctcaggccctgcgcctgcctcaggtctttcttgctgcagcctgctccagcctggcccccaccccaggggcaggcggcccctcctggcttctcctgtagggcacctccctgcccctagcctcccaggaaatggtgctctcctggccctgcctctggcccttcccgggccgctgcccctcagccatgtggcacttctgagctcctgacctaggccaaggggaggtctctgcccccttccccggccctgggctacccttgggtcctgctcctcaggccgctcccctgtccctggccatgggtaggagactgccctggtcatggccgcctgcctgtcattcctgactcaccaccgtccccaggtgaaccattcctcccttctcctcagctgcagtcgaaggctttaactttgcacacttgggatcacagttgcgtcattgtgtattaaatacttggaataaatcaagcaggtctcaa

SEQ ID NO: 291924 - DNA, 2661 bp, Homo sapiens
tcggaaggggccaggagacactggaaggtccggacggcagggaaggggacggggttctttccagtcccacccgtgtagggacacctctccccctcatcccccgatgtaccctcgctgaatctgggatgggagagacgaaccgagtctaggcatctgcgtagcagcgccggggagagcggggagcccaggcggagcccagtcgactcccggattcccctgccccgcccccggcacgaggccccgccccggcgccccgcccctcctcgggactcgaccgggctgcgctcactgcccagccggggccccgggagcctccaggctcccgcccgccctgagctgcggcctccgcatggaggggccactcactccaccaccgctgcagggaggcggagccgccgctgttccggagcccggagcccggcaacacccgggacacgagacggcggcgcagcggtacagcgcccgactgctgcaggccggctacgagcccgagagcgacttcctgattctcccaggattcatagacttcatagctgatgaggtggacctgacctcagccctgacccggaagatcacgctgaagacgccactgatctcctcccccatggacactgtgacagaggctgacatggccattgccatggctctgatgggaggtattggtttcattcaccacaactgcaccccagagttccaggccaacgaggtgcggaaggtcaagaagtttgaacagggcttcatcacggaccctgtggtgctgagcccctcgcacactgtgggcgatgtgctggaggccaagatgcggcatggcttctctggcatccccatcactgagacgggcaccatgggcagcaagctggtgggcatcgtcacctcccgagacatcgactttcttgctgagaaggaccacaccaccctcctcagtgaggtgatgacgccaaggattgaactggtggtggctccagcaggtgtgacgttgaaagaggcaaatgagatcctgcagcgtagcaagaaagggaagctgcctatcgtcaatgattgcgatgagctggtggccatcatcgcccgcaccgacctgaagaagaaccgagactaccctctggcctccaaggattcccagaagcagctgctctgtggggcagctgtgggcacccgtgaggatgacaaataccgtctggacctgctcacccaggcgggcgtcgacgtcatagtcttggactcgtcccaagggaattcggtgtatcagatcgccatggtgcattacatcaaacagaagtacccccacctccaggtgattggggggaacgtggtgacagcagcccaggccaagaacctgattgatgctggtgtggacgggctgcgcgtgggcatgggctgcggctccatctgcatcacccaggaagtgatggcctgtggtcggccccagggcactgctgtgtacaaggtggctgagtatgcccggcgctttggtgtgcccatcatagccgatggcggcatccagaccgtgggacacgtggtcaaggccctggcccttggagcctccacagtgatgatgggctccctgctggccgccactacggaggcccctggcgagtacttcttctcagacggggtgcggctcaagaagtaccggggcatgggctcactggatgccatggagaagagcagcagcagccagaaacgatacttcagcgagggggataaagtgaagatcgcgcagggtgtctcgggctccatccaggacaaaggatccattcagaagttcgtgccctacctcatagcaggcatccaacacggctgccaggatatcggggcccgcagcctgtctgtccttcggtccatgatgtactcaggagagctcaagtttgagaagcggaccatgtcggcccagattgagggtggtgtccatggcctgcactcttacgaaaagcggctgtactgaggacagcggtggaggccgaggtggtggaggggatgcaccccagtgtccacttttgggcacagcctccctccataactgagtggtccacagatttgcactacgggttctccagctcctttccaggcagagaggaggggaggtcctgaggggactgctgcccctcactcggcatcccctgcagagtcaggactgctcccggggccaggctgccctgggagcccccctccgagcccagccagccaggctctcaggccctgcgcctgcctcaggtctttcttgctgcagcctgctccagcctggcccccaccccaggggcaggcggcccctcctggcttctcctgtagggcacctccctgcccctagcctcccaggaaatggtgctctcctggccctgcctctggcccttcccgggccgctgcccctcagccatgtggcacttctgagctcctgacctaggccaaggggaggtctctgcccccttccccggccctgggctacccttgggtcctgctcctcaggccgctcccctgtccctggccatgggtaggagactgccctggtcatggccgcctgcctgtcattcctgactcaccaccgtccccaggtgaaccattcctcccttctcctcagctgcagtcgaaggctttaactttgcacacttgggatcacagttgcgtcattgtgtattaaatacttggaataaatcaagcaggtctcaa

SEQ ID NO: 291925 - DNA, 2406 bp, Homo sapiens
  misc_feature (2351)..(2351): n is a, c, g, or t
  misc_feature (2353)..(2353): n is a, c, g, or t
  misc_feature (2360)..(2360): n is a, c, g, or t
  misc_feature (2362)..(2362): n is a, c, g, or t
  misc_feature (2369)..(2369): n is a, c, g, or t
  misc_feature (2390)..(2390): n is a, c, g, or t
  misc_feature (2392)..(2392): n is a, c, g, or t
  misc_feature (2395)..(2395): n is a, c, g, or t
  misc_feature (2397)..(2397): n is a, c, g, or t
  misc_feature (2401)..(2401): n is a, c, g, or t
agcggccgcgcgggtgtttatgtcgggtcgcggggtctcgcggcacatggcggactacctgatcagcggcggcaccggctacgtgcccgaggatgggctcaccgcgcagcagctcttcgccagcgccgacggcctcacctacaacgacttcctgattctcccaggattcatagacttcatagctgatgaggtggacctgacctcagccctgacccggaagatcacgctgaagacgccactgatctcctcccccatggacactgtgacagaggctgacatggccattgccatggctctgatgggaggtattggtttcattcaccacaactgcaccccagagttccaggccaacgaggtgcggaaggtcaagaagtttgaacagggcttcatcacggaccctgtggtgctgagcccctcgcacactgtgggcgatgtgctggaggccaagatgcggcatggcttctctggcatccccatcactgagacgggcaccatgggcagcaagctggtgggcatcgtcacctcccgagacatcgactttcttgctgagaaggaccacaccaccctcctcagtgaggtgatgacgccaaggattgaactggtggtggctccagcaggtgtgacgttgaaagaggcaaatgagatcctgcagcgtagcaagaaagggaagctgcctatcgtcaatgattgcgatgagctggtggccatcatcgcccgcaccgacctgaagaagaaccgagactaccctctggcctccaaggattcccagaagcagctgctctgtggggcagctgtgggcacccgtgaggatgacaaataccgtctggacctgctcacccaggcgggcgtcgacgtcatagtcttggactcgtcccaagggaattcggtgtatcagatcgccatggtgcattacatcaaacagaagtacccccacctccaggtgattggggggaacgtggtgacagcagcccaggccaagaacctgattgatgctggtgtggacgggctgcgcgtgggcatgggctgcggctccatctgcatcacccaggaagtgatggcctgtggtcggccccagggcactgctgtgtacaaggtggctgagtatgcccggcgctttggtgtgcccatcatagccgatggcggcatccagaccgtgggacacgtggtcaaggccctggcccttggagcctccacagtgatgatgggctccctgctggccgccactacggaggcccctggcgagtacttcttctcagacggggtgcggctcaagaagtaccggggcatgggctcactggatgccatggagaagagcagcagcagccagaaacgatacttcagcgagggggataaagtgaagatcgcgcagggtgtctcgggctccatccaggacaaaggatccattcagaagttcgtgccctacctcatagcaggcatccaacacggctgccaggatatcggggcccgcagcctgtctgtccttcggtccatgatgtactcaggagagctcaagtttgagaagcggaccatgtcggcccagattgagggtggtgtccatggcctgcactcttacgaaaagcggctgtactgaggacagcggtggaggccgaggtggtggaggggatgcaccccagtgtccacttttgggcacagcctccctccataactgagtggtccacagatttgcactacgggttctccagctcctttccaggcagagaggaggggaggtcctgaggggactgctgcccctcactcggcatcccctgcagagtcaggactgctcccggggccaggctgccctgggagcccccctccgagcccagccagccaggctctcaggccctgcgcctgcctcaggtctttcttgctgcagcctgctccagcctggcccccaccccaggggcaggcggcccctcctggcttctcctgtagggcacctccctgcccctagcctcccaggaaatggtgctctcctggccctgcctctggcccttcccgggccgctgcccctcagccatgtggcacttctgagctcctgacctaggccaaggggaggtctctgcccccttccccggccctgggctacccttgggtcctgctcctcaggccgctcccctgtccctggccatgggtaggagactgccctggtcatggccgcctgcctgtcattcctgactcaccaccgtccccaggtgaaccattcctcccttctcctcagctgcagtcgaaggctttaactttgcacacttgggatcacagttgcgtcattgtgtattaaatacttggaataaatcaagcaggtctcaaaaaaaaaaaaaaaaaaaaaaaaaacaaaaaaaaaaaaaaananaaacaananaaaaaanaacaaaaaaaaaaaaaaaagngnggngncgcncgccc
